United States Patent Application Publication US 2005/0228172 A9 - sequence listing, part 161

SEQ ID NO: 721149 - DNA, 2177 bp, Homo sapiens
aagataagtatataccatagcaagctggcaaaatagacataactgtactatagtgactactatcctcacttggtaagattatgaagaaaggcaaggaaatgtctgttacaaaaatcaatataacatagttacatttacaggaagcaatgtaatttggctggggcatgatggagggcttttgggtttgttgcaaagttctgttttttgtttgtttttgttttttttctgagacggagtctcactctgtcacccaggctggagtgcagtggcgcgatctcggctcactgcaagctccgcctcccgggttcacgccattctcccgcctcagcctcctgagtagctgggactacaggtgcccaccaccatgcccggctaattttttatatttttttagtagagacggggtttcaccattcacaggatggtctcgatctcctgacctcatgatccgcccgccttggcctcccaaagtgctgggattataggcgtgagtcaccgcgcccggccaaagttctgtttcttgacctgggtagttgtgacaaagacatttgccttataatcataattaactaatctctacatttttttgggtctggttttctgtttcatcttaaaacaaaaagataaataataaataatgcatacataaatccaaggaaaaaagttaatggggcatgtgttctggaaatcgagggaagaaaacacatatggagcggggagcagagtctcctgtctctgtgtttttctgcacaaatcacaccccaccccacccaccacccagtggccatcagcagggatagtccctcacaataagtttctctagcttccagcttgttcaactgtagagggagcaatggtcagatcctacatgttctgtcccttgttgagtgtgttttggggtctttgtgccttgtgatattctgaattctctctctataatgctgaattaatttttttctctatttttagcatcttattgtttgcctataagaattgccaagtcattcaatcttaaaaccatcaagttattacatctgaagatttctgagtcaatctgagaagcatcattatcttatccttattctgtgctcactgtgcaaatgctcggctataccgattattgcctaagcagtatccattatctttaaaaaggacaaacaaaaattaatctcaatttggaatttcaactgttctgatagatgctatttcttcaatgagctggaactgtagaatcgaatcctctraggaagcctcaggtacatgagtctcgcagctgcagatacaaccctcttcattcatggtcaaacaagttaaggctggctctagaaatgaacattcctttgcacaattgctagaggttcacatttatgttttctgtgtattgatcactaaaatagaaaatcggtgccatcatatcagagaatcactaagtcatgggttttgaatatctacagaatcatggaatctgagatctgctgagtcatgatatttgaaaattacgtttgcacacaagccttgatttgcattttcaggatattaaaatcaaaactgcagaatcccatagtcattctctttgaaaacttcagctttgattcaaacattctgcagctgccaattcataaattctgagaaattaagagtcagattgagattgtacaatagcagacacatattccattactaaaggaagtccctggagggactaagatattcaaagtggtgagagaaagaaatactaataatttgttctatgttagctacatatcactacttcatataggtcctccactgtatgtggtattatccccatgttagaactgaggaaaccaaagttgaggatgatttgatatcaagtaagttcataggttccagagctaggacttcaactgcacatctatcagaagccttgattgacaatcatgaaatcatggagagagtgagaggatcatggaaaagtcagcctctgtctggccagggtcccatcccagctgcctgcaaagtcttctaatcacttgtacccatgctccattcaggcagaataacaagaccagaccttcagctagctcatagggtttgcaaatgatttttgctgatttatttgatgactaaagtacccacacatccttactcttcccctgcttgaattctggggctattctgggaaagggtctaggagt

SEQ ID NO: 721150 - DNA, 630 bp, Homo sapiens
gaattagatcttgaacatacgtcaagacctctttccctaaaactgactgtccccattcyccagcaaagttgttcactcttttcttggtatccacactgcacttatataaattggattatcacactgtacagcaaatatttccttgtcgaggaattgtgagttccttgaagacatgaatgtgtttttctcacttattatttttttagagacaatgtcttgctatgttgcccagagtggtctcaaactcctgggctcaagtgatcttcctgccttggtgtcccaaagttctgggattacaggcatgagctaccacatctggcccttcctcatttttgtattcccagagcttcccagcatggtaccagcacagaatagatgctcattaaatgttcattgtgagaatgaaggaaccaacccttaaaggatgacaggttggggctgtagactactggaacatctagaactctctgatccatacaaaccagagaatagtatttgtgaaggtacctataagtggctggagtggttttttttaataaaaattgtcagataacatcgatgtgtttattatgtacaatatgatgttttgaaatataaatacaaatacataaaatacactgtgggatggtt

SEQ ID NO: 721151 - DNA, 630 bp, Homo sapiens
gaattagatcttgaacatacgtcaagacctctttccctaaaactgactgtccccattctccagcaaagttgttcactcttttcttggtatccacactgcacttatataaattggattatcacactgtacagcaaatatttccttgtcgaggaattgtgagttccttgaagacatgaatgtgtttttctcacttattatttttttagagacaatgtcttgctatgttgcccagagtggtctcaaactcctgggctcaagtgatcttcctgccttggtgtcccaaagttctgggattacaggcatgagctaccacatctggcccttcctcatttttgtattcccagagcttcccagcatggtaccagcacagaatagatgctcattaaatgttcattgtgagaatgaaggaaccaacccttaaaggatgacaggtkggggctgtagactactggaacatctagaactctctgatccatacaaaccagagaatagtatttgtgaaggtacctataagtggctggagtggttttttttaataaaaattgtcagataacatcgatgtgtttattatgtacaatatgatgttttgaaatataaatacaaatacataaaatacactgtgggatggtt

SEQ ID NO: 721152 - DNA, 1119 bp, Homo sapiens
ccttggaaccctttcagtgtaaaaattccccccccttccacttttttttttttcccccacccatttcccccccccaattctcctaatgttttcttctttgtatgcaagtgttaatctcccactatggttccttctatgcctagtactgtatcaacatccaggtgcttccccttcctttctccaccccaccccccagccagatatgtcaattgtattgaaaacaacttacatctagtttactaagtacaaacttgtgctggttaatgcttctcaaaaagtaggagtgggctgtttgttgagatcaacaatcatttttttaaaaatccgatatggaaatttttgtgtcaagtttcactrtcatttagttcttgactgattttcttctgatgggttagtagctctcaacagaagattttaaaagtcccctgctcaggtacctgtcctgccgatagagctggggtgtaccctgcaccctgactcaacattgcttgtctccacatgcctgtaaatgggcttgggtggctttctcaggctacacacctgtcacttcttagtcacccagaatcaaaatattaacagctctgatcacattttctgaacctatgaggctttatttcaagagtggtgacactccaaaatgcagctaggatttccgcattttcacgtgttagtgttgaaatcatttttacttcaggaaaccaagggttggacaatggcttccagactttctcctttcgttatgctccttcagcgccttatgcaaataccggttgtcttatgctgccattcgtctcctctgccagaatgtgaggtccgcgacagcagggataagaatgcattcatttttatatctgcagtgccttggagagtgtctgacacatagtgggcactcatttagaaaccaccaattgaatcattaaggtgaccaaaaacagggtgggggaaatacgtccatcagacaacagggaaatatttcttaaaaaaaaaatttcccaaaactagcttttccctccttatgtgtctgaaatatctcataaaattttaaactatccctttcagcacaaatctgcctggagctgtttcctgaacacaggaccaaaaggcaggaatcaaaagtag

SEQ ID NO: 721153 - DNA, 1506 bp, Homo sapiens
aagaaaattcattattctgaagctgttaagagtaaaattgctcaactacaaagataattattgtcatccttcgcctcaaattcacacacaaagataaatgaagagcaaataaaaaaggtaagtactctacaytttcagaaccataataatataaaggaaatgtaaaataaactgaatacaatttctgcataaaggctaaattccattactacacgagttgctgaaacagcacattttcatataaaataattgtaacaggtagtgaaaaatacactgaaatctactcaaaagaatacaagtcacatggtatctatacagattcaataactaacagtgcagtctgcataaaggacaacagtttctctttcgccatctccctgttttttcttttctctttactgtttttaggattaactcaatagtagattcagctacaccagtattttcagaagtttcagtgccaatgccttaaaaggcatgtaacagcagaaaggtgatgccaaagtggtagagagggcaccaccacacaatctatttctcaacttgatacctctgatgttgatgacttaataatcactgtcatcagaccagcaccatctcattatgctttcagtggctaccccgcacattttaacatgcatatctgacttaacagtctaaagcagccgggtgtggtggcctgcaccagttgtctcagttactcgggaggctgaggcaggaggattgcttgagcccaggagttcaaggctgcagtgagctatgatcacaccactgccctccagcctggaaaacacagcaaggtcctgtctcttaaaaacaaaaagtctaaagttcaccagtttctctctcttcctttcaaacaacaaaaggactaacatttcaactatcaacgtgcctctccagttttacaagttattgctgcccagtatttcagttctaaggtaacaggtattttctttcaactatgtgaagatactattttatcaatctattgtcattactgttctttgaacttcttgggaatctaatgctgtttgttatgtctgctgttcttgctcatggtaggtatttccctgtgtatttggagtgtgagattatcttcagtagagtttgttttgagaatatcatgccacttgggttgagggtacaaacttcaagtttggttttatattgatttctatagctactccagcattatcaccaactgaagacaattttttattttaatgccctggcatgaagattcttgaactacacaggaaacataaattcaaactctaggctcacttaagggccaactgtggctgcaaattctcaatgaagactatttctgttttgtctctatccttaagcccaggctaaagcagatatacttctacacttctttgtaaattctctatgctggctagctcaattttctgtttgtttgcttattttctaattggccctttcattaagggtgtagtccttgaccagttctagctttgtgtgtatatctgtgcatgc

SEQ ID NO: 721154 - DNA, 1506 bp, Homo sapiens
aagaaaattcattattctgaagctgttaagagtaaaattgctcaactacaaagataattattgtcatccttcgcctcaaattcacacacaaagataaatgaagagcaaataaaaaaggtaagtactctacattttcagaaccataataatataaaggaaatgtaaaataaactgaatacaatttctgcataaaggctaaattccattactacacgagttgctgaaacagcacattttcatataaaataattgtaacaggtagtgaaaaatacactgaaatctactcaaaagaatacaagtcacatggtatctatacagattcaataactaacagtgcagtctgcataaaggacaacagtttctctttcgccatctccctgttttttcttttctctttactgtttttaggattaactcaatagtagattcagctacaccagtattttcagaagtttcagtgccaatgccttaaaaggcatgwaacagcagaaaggtgatgccaaagtggtagagagggcaccaccacacaatctatttctcaacttgatacctctgatgttgatgacttaataatcactgtcatcagaccagcaccatctcattatgctttcagtggctaccccgcacattttaacatgcatatctgacttaacagtctaaagcagccgggtgtggtggcctgcaccagttgtctcagttactcgggaggctgaggcaggaggattgcttgagcccaggagttcaaggctgcagtgagctatgatcacaccactgccctccagcctggaaaacacagcaaggtcctgtctcttaaaaacaaaaagtctaaagttcaccagtttctctctcttcctttcaaacaacaaaaggactaacatttcaactatcaacgtgcctctccagttttacaagttattgctgcccagtatttcagttctaaggtaacaggtattttctttcaactatgtgaagatactattttatcaatctattgtcattactgttctttgaacttcttgggaatctaatgctgtttgttatgtctgctgttcttgctcatggtaggtatttccctgtgtatttggagtgtgagattatcttcagtagagtttgttttgagaatatcatgccacttgggttgagggtacaaacttcaagtttggttttatattgatttctatagctactccagcattatcaccaactgaagacaattttttattttaatgccctggcatgaagattcttgaactacacaggaaacataaattcaaactctaggctcacttaagggccaactgtggctgcaaattctcaatgaagactatttctgttttgtctctatccttaagcccaggctaaagcagatatacttctacacttctttgtaaattctctatgctggctagctcaattttctgtttgtttgcttattttctaattggccctttcattaagggtgtagtccttgaccagttctagctttgtgtgtatatctgtgcatgc

SEQ ID NO: 721155 - DNA, 618 bp, Homo sapiens
tccataaaaaaataaatcaatgtttgttttcattattctcaagaactagcaaagtgcctaactcatattaggcagtcaataaatatttgttaaaaaataataatttactcattaatggctagtaaatggtagggccaggattagaatccaggttttctgaatcatggttcactaccctcagtgactgaaataaatagtgatattagccaataagaaacctcaggagaggatccascctaaagaatacctttacagccacagttactcaagtcacttgtttgtccactcaattactcagtatttactgagttcctgttaaaggcactgggctaagtcctgggggtataagagtaagcaatttaaacatagcctctgacatcacagaggtagtagataccaatcaaataatcacacatatacatttatttaaaaatgtctgaatttttaattgacaaatattttatgtatttacaggatacaatgtgtttttggtattatacactgtgggatgaatatatcaaggtaattaacatatctatcgtctcacatgcttcacttttttttttgcagtgagaagatttaaaatctactcctttagcaattttgagatatacatta

SEQ ID NO: 721156 - DNA, 618 bp, Homo sapiens
tccataaaaaaataaatcaatgtttgttttcattattctcaagaactagcaaagtgcctaactcatattaggcagtcaataaatatttgttaaaaaataataatttactcattaatggctagtaaatggtagggccaggattagaatccaggttttctgaatcatggttcactaccctcagtgactgaaataaatagtgatattagccaataagaaacctcaggagaggatccagcctaaagaatacctttacagccacagttactcaagtcacttgtttgtccactcaattactcagtatttactgagttcctgttaaaggcactgggctaagtcctgggggtataagagtaagcaatttaaacatagcctctgacatcacagaggtagtagataccaatcaaataatcacacatatacatttatttaaaaatgtctgaatttttaattgacaaatattttatgtatttacaggatacaatgtgtttttggtattatacactgtgggatgaatatatcaaggtaattaacatatctatcgtctcacatgcttcacttttttttttgyagtgagaagatttaaaatctactcctttagcaattttgagatatacatta

SEQ ID NO: 721157 - DNA, 1288 bp, Homo sapiens
atatcatgagcaaacaaggataatttgacttcctgggaggagggataattaacgggcaccttaaatctctaaaaccttggtaaagtgctttgttttataaaatagataatagttagaattttgtgttttgtctatggatgtctacacattattttagaccctggaaatacaggtgccacagctgacattttatttgctaaatttcaacaataaccatcatcaaacagtgaaaaatgaacaggaataaatagcatgggaacattaagtggccaaagggtatgagaaaaatgttaggaaattcttgttatctgtgcaattagaaacaaaataaaccaaagaattgaattaatgacaagaagtgatatatattgaactaaaatatgttagcatctagtcatttctatttctaaaatatcatagtaaagggaagaaaagccattgtattcaactgctcagaaatctgactgtgagtactccagcatctacctacctttgactatggacttctgaagactatagtactagcactagcagggaacaacattcaaagaaccttggactgggcaaccagccttgcgattaaatgcttcttgctcaatgttcatctaatacctttgggttccaagatctcaacacattcttagcatttggtctcagcaaaagatcagataatcatttgcttctcagcgtagatttcagttagtgggtttgatttcctcatctagtactatttgcctcttaaatcaaatgtccaaaaagaaataaggacagggcaaaaggcaatatgcaaaaggcaccagaagctactatgcgggggtttcctttttgctgtagtctcagaaatggcagggaggggtcagaagtttttgccctattaggaagtaaggcagaattccccacagtgatgtcacagacaagacttagttaaggaggggctagaaagtaatamaagaatggaatgatatgttttctcccctgacaacccacaccgttctcttagaggcagggaaaagagaaagaaggtggaagttggagaaagaatggtagagtattaggcaaagaaaataaaagtcttccctcatagaagaagaaagcatcattctagtaactccccatccctaccctatctcaagtgcagctaatggtgagaagtagaaaatgttttgtcaataaatgaatcacaaatgagttcctctctatattccgtaagacacattctgtgtagatcctgtaattaaggagttccaaacttagctaagaagccatgtacatttttaaaatataaagc

SEQ ID NO: 721158 - DNA, 959 bp, Homo sapiens
tgctgatgtccttgtacactgcggctgtcctctatgagcagactgaagaaacagataccaggtagctggggcctgtaggagtcagggttctctagagagacagaaccaacagggtgtgtgcatgtctgcagattatgcatatatcagaagtgcggttgccaaaggaaatatttggttgctcttgggggccatggacttttatggaggataaacagaagttatgggcaatgtccctccagagatatatatatggagagagacaaagagcaattttcagaatttggcttacatgattgtgggggctggcaggccagaaatctgcatgccaycaggctgaaaattcccgagggagttgatgtcaaggaggtctggaagcagaattcttttctgttcgggaacctgtcttttctgtgaaggccctcaacagattggatgaggcccactacattttggagggtcagctgctttgctcaaagtctactgatttaaatgttaatcacatatcaaaaataccttcagggcaacatctaggctgctgtttgactaaacaactgggcacagtatcctagccaagttgacacctaaagtgacccataacggggatgtcagctcgaaccacatttcatggcggaccagcccctcagagcctggctgaagactgaaaacctgtttatccaatggctgactgagctgtgaagcacccagcaaagagccccactgtgctcctccccgccccatgagctgagggatcctgccatctgttcatccctctaaggacatctgagggaggcattgtgatgctggatggtgactgtgttttccaaaccaaaatctgacacacatgggctggcagataggaatgtagttatgaaaagaacagggcaggatgttgggaatcatgatcatggtggaaaatttgggatttgcagtcccgacttgtggagaagactccagaaccc

SEQ ID NO: 721159 - DNA, 649 bp, Homo sapiens
tttttkttttttctttaactacactgaaatatttctattacatcaactttaattaaaatcaagattttatataatttacaattgctcatctgtgcaacataaataaccagataaccaggcagctatacaaatgttgcttaaatttataaaataactgttgagaaatcaattttcgtataatttttagtgagattaaaattttaaaaaaagttctcaataatgaatatgttttcaaaacccagtgtttacatgatatagttgcctatttacatcagtcatatcacctgttgattaagatttatatcctaaacaatgacgtttatattccaaaatagtactttttacattaaaatttagtattaaaatcagatagctttagatttagattacagctcttccacctaatagaggagctcttaatttctcaatatgttttactttgttgcctttacatgaaaagtgttaaatgtgcctactttatcatatttgggagctaattaaatgaaatcatgtataaaaataatttgcacattttctggcccatagcaatcaccatgtcagggaaaaagtcatgtaatcaccaaatctcgtatttttttttttaattcctgtgcatgaaggaaaaggatattgcacttacataacacta

SEQ ID NO: 721160 - DNA, 607 bp, Homo sapiens
ttgtattcttagttttttgcattgacctttgcagtttaataattcaaatgtctaaggcaatctctttcccttggaggctataaccacatcccatatgctttactgtgttaagatattttatgactttttaaatttttatttgattcaattattatttcaaaatttatttcttattaattatctctaacagtgccagtgagtgaacacatttccactaacacgtattggccagcattagatggtcttacccaagtgtaacccyatcatgtaaccagaagaacaacaaaaccagtccctgtgccaaaaatgttgaggacagctgtactgtactatttggtgtggcattgtttacctgcttttttctgaagggggagggttaagactgcaattcataaattgtgccctttatcattacatcatattcccctttgatatgatttcaacagagcttgaaatttgtttctatttcccctggtgtctcttttccactcctttgttttcaagttttctttgtaattttgtgttaagtgtgtttcttaaaaacaacatataggtgtatttttaaaaatcacaatctatatgtttttttcctttgaactttcatttt

SEQ ID NO: 721161 - DNA, 1510 bp, Homo sapiens
taatatttctcataggatagaactttaccagaattaaacaatagaattgtttaattctattaaacaatagaattgtttaattctattaaacaattagaaactattaaacaaatgctattaattatttaatagaaagatatagacaccgaattttttcatagaatctatcatagtctccttttatttttctatagtcttcaggctgtgctaatttgaaaatccatccgtagcacatacatttgtccattttcacatgacagcataccttagcctaagatgactgatacagataatggtactcagagtaggatgcttggaatacagcagtacatgagatatatggcactggctttagggccagataatggagaatgacatgttgcagctgaaaagatggtaattcrcattatgcagtggtgaaaccaacaaaacttttctctggcaacttggaaaacagataatataacaaatgaactgatgactttaactaaagtaatagggaaggagaatgttattagcaagtattggttgttattggccatatttgacaaagtgttggaataaagagatgaacttcttaagaattacccatttacagagattaaaggaactagagcctagaaatttcaggatggcaaattgaaagatgccactgttactcctcggcaatcctttgaaaaagaaaggacaattaatatttagccttgtccagtaacaatgaacacttagagctctgaggcaagccactgaagggacccaacatcctttacacagtactcctttaaaaatgcatacactgaacgtaagcatggctaaacaatcagacaaccccaaatgaataaatgttcaatcaaacgactgacccatactcctcaaaaatatcagtgtcatgaaagacaaagaaggacactaaaaatacatgacaactaaatgcaatctggggtcctgagttagaaaataaatagcactattgggttaattgaatacattttaatatggcctatatgttagataagaatgttatatcaatgttaaattatttgaatttgattatgataatgtggttatataaaagcatgtcctcatcacatgctgaaatatttaggatttaatataatcacgataacttactgttgaatggttcagcaacaatcaatgtgtgtgtgtgtgtgtgtgtgtgtgtgtgtctaaagaaagccagaaagaaagagaaaaatctaaaaggagggagagaatgtaaatgtggaaaaatattattaattggtgaaaaggaaaagaatatatgggaattacaccattcttactacttttgtgtatatttgaaatttttcaaaagagaagttaaaaaaataagccttggaacaagatcacaatatcttagccctgatacctttgaagttaaaacctttgaataaggtagcactcaataaatcatttaggttagacatagtagcttaactaaatgagaataaaggtgtgattcttccacaaaattagaatgggtttaaga

SEQ ID NO: 721162 - DNA, 1510 bp, Homo sapiens
taatatttctcataggatagaactttaccagaattaaacaatagaattgtttaattctattaaacaatagaattgtttaattctattaaacaattagaaactattaaacaaatgctattaattatttaatagaaagatatagacaccgaattttttcatagaatctatcatagtctccttttatttttctatagtcttcaggctgtgctaatttgaaaatccatccgtagcacatacatttgtccattttcacatgacagcataccttagcctaagatgactgatacagataatggtactcagagtaggatgcttggaatacagcagtacatgagatatatggcactggctttagggccagataatggagaatgacatgttgcagctgaaaagatggtaattcgcattatgcagtggtgaaaccaacaaaacttttctctggcaacttggaaaacagataatataacaaatgaactgatgactttaactaaagtaatagggaaggagaatgttattagcaagtattggttgttattggccatatttgacaaagtgttggaataaagagatgaacttcttaagaattacccatttacagagattaaaggaactagagcctagaaatttcaggatggcaaattgaaagatgccactgttactcctcggcaatcctttgaaaaagaaaggacaattaatatttagccttgtccagtaacaatgaacacttagagctctgaggcaagccactgaagggacccaacatcctttacacagtactcctttaaaaatgcatacactgaacgtaagcatggctaaacaatcagacaaccccaaatgaataaatgttcaatcaaacgactgacccatactcctcaaaaatatcagtgtcatgaaagacaaagaaggacactaaaaatacatgacaactaaatgcaatctggggtcctgagttagaaaataaatagcactattgggttaattgaatacatyttaatatggcctatatgttagataagaatgttatatcaatgttaaattatttgaatttgattatgataatgtggttatataaaagcatgtcctcatcacatgctgaaatatttaggatttaatataatcacgataacttactgttgaatggttcagcaacaatcaatgtgtgtgtgtgtgtgtgtgtgtgtgtgtgtctaaagaaagccagaaagaaagagaaaaatctaaaaggagggagagaatgtaaatgtggaaaaatattattaattggtgaaaaggaaaagaatatatgggaattacaccattcttactacttttgtgtatatttgaaatttttcaaaagagaagttaaaaaaataagccttggaacaagatcacaatatcttagccctgatacctttgaagttaaaacctttgaataaggtagcactcaataaatcatttaggttagacatagtagcttaactaaatgagaataaaggtgtgattcttccacaaaattagaatgggtttaaga

SEQ ID NO: 721163 - DNA, 1510 bp, Homo sapiens
taatatttctcataggatagaactttaccagaattaaacaatagaattgtttaattctattaaacaatagaattgtttaattctattaaacaattagaaactattaaacaaatgctattaattatttaatagaaagatatagacaccgaattttttcatagaatctatcatagtctccttttatttttctatagtcttcaggctgtgctaatttgaaaatccatccgtagcacatacatttgtccattttcacatgacagcataccttagcctaagatgactgatacagataatggtactcagagtaggatgcttggaatacagcagtacatgagatatatggcactggctttagggccagataatggagaatgacatgttgcagctgaaaagatggtaattcgcattatgcagtggtgaaaccaacaaaacttttctctggcaacttggaaaacagataatataacaaatgaactgatgactttaactaaagtaatagggaaggagaatgttattagcaagtattggttgttattggccatatttgacaaagtgttggaataaagagatgaacttcttaagaattacccatttacagagattaaaggaactagagcctagaaatttcaggatggcaaattgaaagatgccactgttactcctcggcaatcctttgaaaaagaaaggacaattaatatttagccttgtccagtaacaatgaacacttagagctctgaggcaagccactgaagggacccaacatcctttacacagtactcctttaaaaatgcatacactgaacgtaagcatggctaaacaatcagacaaccccaaatgaataaatgttcaatcaaacgactgacccatactcctcaaaaatatcagtgtcatgaaagacaaagaaggacactaaaaatacatgacaactaaatgcaatctggggtcctgagttagaaaataaatagcactattgggttaattgaatacattttaatatggcctatatgttagataagaatgttatatcaatgttaaattatttgaatttgattatgataatgtggttatataaaagcatgtcctcatcacatgctgaaatatttaggatttaatataatcacgataacttactgttgaatggttcagcaacaatcartgtgtgtgtgtgtgtgtgtgtgtgtgtgtgtctaaagaaagccagaaagaaagagaaaaatctaaaaggagggagagaatgtaaatgtggaaaaatattattaattggtgaaaaggaaaagaatatatgggaattacaccattcttactacttttgtgtatatttgaaatttttcaaaagagaagttaaaaaaataagccttggaacaagatcacaatatcttagccctgatacctttgaagttaaaacctttgaataaggtagcactcaataaatcatttaggttagacatagtagcttaactaaatgagaataaaggtgtgattcttccacaaaattagaatgggtttaaga

SEQ ID NO: 721164 - DNA, 573 bp, Homo sapiens
ccactccttctgccatgtgaggacatggcattcaaggcactgtcttacaagcagaaactggacccttgccagataccgcctacatcttggacttcccagcctccagaatggtaagaaaaaaatttctattatatataagttacccagtctgtgttattttgttatagcaacagtaatgaactaaaacaggtgtcttgggtttgctacatcacaaccatagcacctgcaaataatgagtttcccttttttctccctctctaaagactttttttttttttttttttttttttttttgagagggagtctcactctgtcgcccaggctggagtgcagtggcgcgatctcagctcactgcaagctccacctcccaggttcacaccattctcctgcctcagcctcctgagtagctgggactacaggcgcccaccactgcaccccgctrattttttgtatttttagtagagatggggtttcactgtgttagccaggatggtctcaatctcctaaactcgtgatctgcctgcctcggcctcccaatgaaacttttatttattttattttattttatatttg

SEQ ID NO: 721165 - DNA, 1469 bp, Homo sapiens
catattggcatgtattacctcatctgccctgtgagataccagccccactttataaatgagaagataaatggcttgtcctgggccacacggtccagtaaatggcaaagagggattggagccagaatttccatttccccacagctctccactgagctgcagacaggactgccaaagtcccgggagaccagtttgagagaatgcttttagattttccagattgccaggagtaaatcagcttttaggacttggaaagcccacacgacgtggtcaccttcctcacctgcgtcacggtggcctgcaccatccacagctggtgtgagggttcctgctgtgctgctggggcattgaggggctccgattgaacatggggggcgcygtccagaacttccctcaaccccagtctgtggtaactatgtgtttcagggatttcttacagagaaattccaaaacttccagacaacccacagccttccctagacctcagcattgtaaataatggattctgaggctgagacagctccagccacagacagtatgaccaggttttgatggtatgggactaggagagctttcagtaaaccacaggaagaataaattctggtttctttctttttttttttttttcctctgttgcccaggctggagtgcagtcgtgtgatcttggctcactgtaatctctgcctcctgggttcaagaaattctcctacctcagcctccctggtagctgggattacaggctgtgtgccaccacacccagctaatttttgtatttttagtagagacaggtttcaccatgttggccaggctggtctcgagctcctgacctcaagtgatccgcctgcctcagcctcccaaattgctgggattacaggcgtgagccaccgcacccagccatgttctggtttccattacctggtggattatttgattatagcaaataataatgtagtatatgtttcaagatagctacaagagaagcttttgaatgttatcactacaaagtgataaatgtttaaagtgattaagcatttatcaggtaattatcctgatttgattattatacaatgtatacatgcattgaagtgtcacactgtagcccataaatatgtagaattatgtgtcaattatacaaaaaaatcaattaacattttaagaaagaagcctcaggtagaattttcttttcatcatatattgagtaaagtagagagatgtcatttctctttttttcttttcccaggacaagacatttcaaagaaagtattaaattcattcacgagtgccggctccgcggtgagagctgccttgtacactggtacgtgtgtctcttgcttaatagcgccttagcgtattctggtcggcttggcttcccatcaagtgtttttccgtgtgtgaataatggtttcacctcctaatagttttctgtaaaccctgactctcaaacgcgtgctccatttgtccagcgctgtgtg

SEQ ID NO: 721166 - DNA, 888 bp, Homo sapiens
tatcctgggagagttgagtggtgctgcccagcagcagcgagaatgcttctcacgttgctatcaggtggcccctgctccgtggggtccggagcggttcaccrcctggcttttgactgtttataaatttggcataggcatgccagtgggttttgcagaatccatgtaaggattgcacgttacataccaagcttgccagtgacgcactggctgacatgtcccacggcgtgtccctgcttcctggccgctgcagcagcctgaattcaactctgcagagcgacttatgctttcctgaaccttatttccttaagagctatttttagaaaaattaggactgaggtttgattcctggttttaggctccccaggctggcagaagctggaattgctttaaagcaaccaattccttctttggccgctcaccagtactccttctgctgagggatgaggggccgccaagggggacagaagtgagccgagctctgctcgttgccctcacactggtgagctccttagcgtgtcaggggctgctccaggtagagtgggcacagccaggaccagagaggccagctccctgctcgccaggggccagcatctccagtggattcaaatgcaaaagggcaaatcaaggggttctggtccatcttgtgtcattcaaactgtagttttgaaaagttcaattagaatgttttgcccgtgataagaatcacaagagactcttcaagtgctttatcctgggagagttgagtggtgctgcccagcagcagcgagaatgcttctcacgttgctattcggtggcccctgctccgtggggtccggagcggttcaccgcctggcttttgactgtttataaatttggattacaaatgactgtgaaatggataacaatatg

SEQ ID NO: 721167 - DNA, 888 bp, Homo sapiens
tatcctgggagagttgagtggtgctgcccagcagcagcgagaatgcttctcacgttgctatcaggtggcccctgctccgtggggtccggagcggttcaccacctggcttttgactgtttataaatttggcataggcatgccagtgggttttgcagaatccatgtaaggattgcacgttacataccaagcttgccagtgacgcactggctgacatgtcccacggcgtgtccctgcttcctggccgctgcagcagcctgaattcaactctgcagagcgacttatgctttcctgaaccttatttccttaagagctatttttagaaaaattaggactgaggtttgattcctggttttaggctccccaggctggcagaagctggaattgctttaaagcaaccaattccttctttggccgctcaccagtactccttctgctgagggatgaggggccgccaagggggacagaagtgagccgagctctgctcgttgccctcacactggtgagctccttagcgtgtcaggggctgctccaggtagagtgggcacagccaggaccagagaggccagctccctgctcgccaggggccagcatctccagtggattcaaatgcaaaagggcaaatcaaggggttctggtccatcttgtgtcattcaaactgtagttttgaaaagttcaattagaatgttttgcccgtgataagaatcacaagagactcttcaagtgctttatcctgggagagttgagtggtgctgcccagcagcagygagaatgcttctcacgttgctattcggtggcccctgctccgtggggtccggagcggttcaccgcctggcttttgactgtttataaatttggattacaaatgactgtgaaatggataacaatatg

SEQ ID NO: 721168 - DNA, 559 bp, Homo sapiens
cccattctctttccccacctaaagaaattggctcccatctgtgggataccaagcatcttagaaagtctgggtgtgatgctggagggctgctcaccagtggtgtggayacaggtacaccgtgccacctctctgactcttggtacgtcaatggtggaagggaaggcaggctggcatcagaattaagagataaggctatgaaaccacaaaggcctggatttgaatcctggcttcctcttttagtagttgtatattagggtactggctttacactcctgggcctcagtttctcaccttaaaaatggagaatgaaaatatttccttctcggaaatgccctgcccgtagcgtctgtctcagtgcttgctggcctcctgcacccacacagaagctgtgcgattacagctggctatccctggaaagcagggagggtcaggaacatggggagtcttcagaagatgtttgtggaatgaatcctttttaaaaaaatcaatgttcttcagaaaataacaagtgttggtgaggatgtggggaaactggaatccttgtgcattgctggtggga

SEQ ID NO: 721169 - DNA, 1692 bp, Homo sapiens
tggtttcaagtaatgagattggaacaacaacgaagattaaaaaatacttgtttccccttactgttgatgcgtggtattgtatcaattcactgcaattccttttgtagtcagacacaaaactactggttaacattggttaatatgacatttctttaacaaactttgtatccttaaaacatttaagcatttaacagcttgtagtcttttaaagaaaattggttccaattaattgtactctttttctatttgaatctcacattgtcaaaagtggttaatgggagacaattctgactcctttgtcactaactgacatctttggactttcttttctttcttgaagcaaaagttctcaggcacatcttgagtcctcatattaacgcatgaaatcactatgtctccaaggactccgagaacctttccacagagaaagataccagagatcaaaacttggtaataatttctggtgtttcttaatgcattcaggaggcgtagcacagtaatactagggttgctagagccttctgtaataggaacaaaatgtatcatttcttaaatctgcagtttgaaaagaatttttcttgctttaataaagctccccttgagaggcagcatagtgtaaaggacacagagactgaaaccagactgctgtgtttacctcttgacttcacagatgatgagcagagagacactggacaagttacctactttctctatgtatcatttccactgtcttctttgtgccttaatgccctcatatataaattagggataataatggtacctgtctaataaggttgtcttaggaattaactccctaaatatttgggaatcactttaaaaattgtctggcacacagagaagacccaattactgctaaagctaattttttaaaaagctttttaatgtaattttcttccttttccrccaaattttgtgcatctctgtatacatcgtaacagaaaacatatttctaaattagagtgttgctacaaaacacacaaatctttatttttgtctttttaatctttagctcagatgccaagtagtacagttttagatcacgtcttgtgctgacttcacttaaacagcaacaattgaaaagaaaagaaaaaaaaaaccattctctaaagtagctaggatacagagtgtatgtgatataaaacctgcacccaatttgtctatggatgcaatggcagagacaaaagggacaataacatgcttctaaagttttgtgtataactgctttaaaagcttcaatttcttaggtcccattttttatcttttatcatgggaagctttagagttgaatttaaattacttaaatgtctttagatacataacaaatattttccttttgttcctggccctctctgattagtctatcaaaacttttgattccactgagggaagtcattggcttgatgcagacaaacataataaatgtggatcttactaatacccttcaggcttcattcacaaaacagtgctaaatacaattatactttggagaatttttttgttattataatattttggatatttttcatggatatattttacatttgtaatatggaagcttcatagaaatagtttcaagagttaaatttctcaaagtataaagtttctaaacttaaaatttttgcaatttgccatatggttattagatgatcagatttttttagggaaataatt

SEQ ID NO: 721170 - DNA, 939 bp, Homo sapiens
catgattgtaagtttcctgaggcctgtccacccttgcagaactgtgagtcaataaaacctctttcctttataaattacccagtcttgggtatttcttcacagcagtgtgagaacagactaatacacacacacacacacacacacacacacacacacattttatgtctcatatagatcaactattttttctttctaaaaattatatatatcgagtaaatttttttaatggagaaacaataaagataaaatataaccctttgttataatgcctaaggaaaaatcacaatttatgtttagcttcattttcatacatagatggatcttgactttttaaccaatcttcaactgtttatataggttgtagctagtttcattctattatacacaatgtggcaatgaacatcctatacactcacacactcatcattgaacatgtcatgtttttattttcctttaaaataaaatcctggtataccactgggtcagagtaggtccatggctcaggttttggttttattttgttttgttttgtttttggtagagacagagccttgctatgctgttcaggtggtctcaaattcccatggctcagatttttkatacacaccatcaaactgccctccagaaaatcatacctgagttccagtgcatgagagtgctcagggtttcaaagatgaccacttcttttgtgggaaaagcttttccatgttccatagtgattccaattggtcatgcatagaaacatttgggtgaggatggcactgatgtgtgggtaagtgtccagggccaacctttcaagggggaaattagtgcctgtcttcatcttcccctggctgcctggagccctggacccagcactgtcagggagaggggtctgccactggcccagataggatgtcaaaaggaggcattaccttagtagagtcacttcagtccaag

SEQ ID NO: 721171 - DNA, 578 bp, Homo sapiens
ggagagacgggatttcaccgtgctagccaggctgctctccaactccagacctcaagtgatctgcccgcctcagcctcccaacgtgctgggccgattcagctgtattttaaagcgaaggtccccccagcactcacagccatcctctttcccaattaggaacaaaagagccatggtcatggcccataccatctgtgtccaactcctgaaggcacccctgtgcgttgtatgatccagtgtgawcctggatgattggggcttgtcatcagggaatccacatctcactggtgtcttccacccccatgcacctccacctacctggacacatcccattcctcagtgaaacagttttgtcctgaaggggcagcaactttcccttataacagcatgaaggtcgttctggtggattccttcaggccttctagggcctgagggaggtctgaggtctgatatacacttcattcccaccccgcaacccctcagaatctgagagaatggagccgagtacctgtaggaccatggaatcagaggaagactatgttgaggaaaaggaatctgagaagtgtgttaaagagggagtt

SEQ ID NO: 721172 - DNA, 578 bp, Homo sapiens
ggagagacgggatttcaccgtgctagccaggctgctctccaactccagacctcaagtgatctgcccgcctcagcctcccaacgtgctgggccgattcagctgtattttaaagcgaaggtccccccagcactcacagccatcctctttcccaattaggaacaaaagagccatggtcatggcccataccatctgtgtccaactcctgaaggcacccctgtgcgttgtatgatccagtgtgaacctggatgattggggcttgtcatcagggaatccacatctcactggtgtcttccwcccccatgcacctccacctacctggacacatcccattcctcagtgaaacagttttgtcctgaaggggcagcaactttcccttataacagcatgaaggtcgttctggtggattccttcaggccttctagggcctgagggaggtctgaggtctgatatacacttcattcccaccccgcaacccctcagaatctgagagaatggagccgagtacctgtaggaccatggaatcagaggaagactatgttgaggaaaaggaatctgagaagtgtgttaaagagggagtt

SEQ ID NO: 721173 - DNA, 481 bp, Homo sapiens
gtccttggtgcagtgcttacctccactgtgacttctcccttaaccttcccaatcctcctccactgcttcctgggatgcccaggtgctaggaaatgccacttaytctgggggctcatactaactggctgtgtttcagaaaatcaaccacttccctggcatgacagaaatctgccgcaaagatctgctggctcggaacctcaaccgcatgtacaaactctatccctctgagtacaacatcttcccccgcacctggtgcctccccgcagagtgagtgggtctggcttcccatgctgagataccagggggaggaaaagggtcgctctcagagctctggtcttgtgacctaggaatgtctcagagggatggaagtggaatgagaaagtttcagctggtcaaagaaaagagggtctgagactgagtgctccaggaagagcatggactagatagcaggaagagctccatgcggccccgggaaagcctt

SEQ ID NO: 721174 - DNA, 481 bp, Homo sapiens
gtccttggtgcagtgcttacctccactgtgacttctcccttaaccttcccaatcctcctccactgcttcctgggatgcccaggtgctaggaaatgccacttactctgggggctcatactaactggctgtgtttcagaaaatcaaccacttccctggcatgacagaaatctgccgcaaagatctgctggctcggaacctcaaccgcatgtacaaactctatccctctgagtacaacatcttcccccgcacctggtgcctccccgcagagtgagtgggtctggcttcccatgctgagataccagggggaggaaaagggtcgctctcagagctctggtcttgtgacctaggaatgtctcagagggatggaagtggaatgagaaagtttcagctggtcaaagaaaagagggtctgagactgagtgctccaggaagrgcatggactagatagcaggaagagctccatgcggccccgggaaagcctt

SEQ ID NO: 721175 - DNA, 2325 bp, Homo sapiens
ggcacctgccaccacgcccagttaacttttgtatttttagtagagacggggtttcaccatcttgrccaggctggtcttgaactcctgaactcgtgatccaccctcctcagcctctcaaagcgctgggattacaggcatgagccaccatgcctggcctctcctcatttattaagtgggagtaataacagtaactattttacatggttattgtggaaattcaattagctatgtgtgtgaagcacttagaacagcacatagtaggcacttcaaaagtgttattattccctcatgggtttgcatgctcccagcccctcctcattgatggcttcaagtttgatatgcgagtctacgtcctgatcacatcctgtgaccctctccggatcttcacatatgaggagggcctagcccgttttgccaccacgccctatatggagcccagccataacaacctggtaaggggactgggaagcactcttcttttccactgccaaaagtgctgaggttctctagagaaacatggtagagaggtttgtcactgtcaccaaagaacaaggaatgaagccagcaagagctgcagcatctagctgggaggcaagtgtttggtaggtggtgaaggagaaaaggtcagcacccggaggagcccagcacacactcttccccaggatcatctagaatagcagtcctctggtggagagagacaggagacgagagatcctcgggaggggtggggagcaacaaggtaatgaagggctggagaggacggccgcatgcagacagtctgagaccacagggccactctttccacaggacaatgtctgcatgcacctgaccaactatgctatcaacaaacacaatgagaattttgtccgggatggcgctgtgggcagtaagaggtactccctactctgttttctcctgcttcctctgccccttagccccacagtcccagtagcccatgaaaccaagctggctcttgggaggctaattgcccagggaaactcagcctttatagaccctgtcctgtgcctgcactttggagctctaagtgcagccccaaacctcaccctgataactagtccctgctccaaactgctagcagcccttcaaagcccgggcatgcaattagcgttagtgtgagggagcctcctgcctacagcctggcccagtggcctagaaactggccttcctctgagcactgggcctcgcaggaagctgtcgacactcaacatctggctgcaagagcacagctacaaccctggagagctgtggggggacatcgaggacatcatcatcaaaaccatcatctcagcccattctgttctacgccacaactaccgaacctgttttccccagtatctgaatggaggtacatgtgcctgttttgaaatccttggttttgacatcttgctggaccacaagttgaagccctggctgctagaggtgaggattatctcctaggctttgcaaaaccaaggtccagaggcctccttgaataggacacctgggacaggggtacactcaggtggtggaacacagaatgggagatgtgaaagccctggggtgggcaggaatgagcagaaggcataagatctctacccttttgacctgctgagtcaaatcttggtggtttttggcctctaccgtaggaatgcaggtttgggatccccagtgccctaatgtaagtctttagggacacactatctagagaggcaggccagctgatttgctctcactggtctgtgaattggagatctctatggcagagttttgtggccttggaagccagagcatccagcctccccggctgaggccatgggagaggaatatcttagaccctctagttaatgcctgcaagaggccaccacctgctcaggtggtctgggaaaggggtgtataatgactcctcctggcaggtaaaccactctccaagctttaccacggactcatgccttgatcaagaagtaaaggatgcacttctctgtgatgctatgacccttgtcaacctccggggctgtgacaaaaggaaggtgatggaggaggataagcggcgagtcaaggaacggcttttccagtgctaccgacagccacgagaatctaggtgtgctaggtgtctggcatgtgtttagttcttcattattcctgagagtaaaagtcctcctttagatgaagaatgtggcctggggctgatttgctatcaaaaacaactttttgcatagataatatgttcatatttgcattaaaaaaatcacaggaccaggcttggtggctcatatctgtaatcccagcactttgggaggctgaggcaggaggattgcttgagcccta

SEQ ID NO: 721176 - DNA, 2325 bp, Homo sapiens
ggcacctgccaccacgcccagttaacttttgtatttttagtagagacggggtttcaccatcttggccaggctggtcttgaactcctgaactcgtgatccaccctcctcagcctctcaaagcgctgggattacaggcatgagccaccatgcctggcctctcctcatttattaagtgggagtaataacagtaactattttacatggttattgtggaaattcaattagctatgtrtgtgaagcacttagaacagcacatagtaggcacttcaaaagtgttattattccctcatgggtttgcatgctcccagcccctcctcattgatggcttcaagtttgatatgcgagtctacgtcctgatcacatcctgtgaccctctccggatcttcacatatgaggagggcctagcccgttttgccaccacgccctatatggagcccagccataacaacctggtaaggggactgggaagcactcttcttttccactgccaaaagtgctgaggttctctagagaaacatggtagagaggtttgtcactgtcaccaaagaacaaggaatgaagccagcaagagctgcagcatctagctgggaggcaagtgtttggtaggtggtgaaggagaaaaggtcagcacccggaggagcccagcacacactcttccccaggatcatctagaatagcagtcctctggtggagagagacaggagacgagagatcctcgggaggggtggggagcaacaaggtaatgaagggctggagaggacggccgcatgcagacagtctgagaccacagggccactctttccacaggacaatgtctgcatgcacctgaccaactatgctatcaacaaacacaatgagaattttgtccgggatggcgctgtgggcagtaagaggtactccctactctgttttctcctgcttcctctgccccttagccccacagtcccagtagcccatgaaaccaagctggctcttgggaggctaattgcccagggaaactcagcctttatagaccctgtcctgtgcctgcactttggagctctaagtgcagccccaaacctcaccctgataactagtccctgctccaaactgctagcagcccttcaaagcccgggcatgcaattagcgttagtgtgagggagcctcctgcctacagcctggcccagtggcctagaaactggccttcctctgagcactgggcctcgcaggaagctgtcgacactcaacatctggctgcaagagcacagctacaaccctggagagctgtggggggacatcgaggacatcatcatcaaaaccatcatctcagcccattctgttctacgccacaactaccgaacctgttttccccagtatctgaatggaggtacatgtgcctgttttgaaatccttggttttgacatcttgctggaccacaagttgaagccctggctgctagaggtgaggattatctcctaggctttgcaaaaccaaggtccagaggcctccttgaataggacacctgggacaggggtacactcaggtggtggaacacagaatgggagatgtgaaagccctggggtgggcaggaatgagcagaaggcataagatctctacccttttgacctgctgagtcaaatcttggtggtttttggcctctaccgtaggaatgcaggtttgggatccccagtgccctaatgtaagtctttagggacacactatctagagaggcaggccagctgatttgctctcactggtctgtgaattggagatctctatggcagagttttgtggccttggaagccagagcatccagcctccccggctgaggccatgggagaggaatatcttagaccctctagttaatgcctgcaagaggccaccacctgctcaggtggtctgggaaaggggtgtataatgactcctcctggcaggtaaaccactctccaagctttaccacggactcatgccttgatcaagaagtaaaggatgcacttctctgtgatgctatgacccttgtcaacctccggggctgtgacaaaaggaaggtgatggaggaggataagcggcgagtcaaggaacggcttttccagtgctaccgacagccacgagaatctaggtgtgctaggtgtctggcatgtgtttagttcttcattattcctgagagtaaaagtcctcctttagatgaagaatgtggcctggggctgatttgctatcaaaaacaactttttgcatagataatatgttcatatttgcattaaaaaaatcacaggaccaggcttggtggctcatatctgtaatcccagcactttgggaggctgaggcaggaggattgcttgagcccta

SEQ ID NO: 721177 - DNA, 2325 bp, Homo sapiens
ggcacctgccaccacgcccagttaacttttgtatttttagtagagacggggtttcaccatcttggccaggctggtcttgaactcctgaactcgtgatccaccctcctcagcctctcaaagcgctgggattacaggcatgagccaccatgcctggcctctcctcatttattaagtgggagtaataacagtaactattttacatggttattgtggaaattcaattagctatgtgtgtgaagcacttagaacagcacatagtaggcacttcaaaagtgttattattccctcatgggtttgcatgctcccagcccctcctcattgatggcttcaagtttgatatgcgagtstacgtcctgatcacatcctgtgaccctctccggatcttcacatatgaggagggcctagcccgttttgccaccacgccctatatggagcccagccataacaacctggtaaggggactgggaagcactcttcttttccactgccaaaagtgctgaggttctctagagaaacatggtagagaggtttgtcactgtcaccaaagaacaaggaatgaagccagcaagagctgcagcatctagctgggaggcaagtgtttggtaggtggtgaaggagaaaaggtcagcacccggaggagcccagcacacactcttccccaggatcatctagaatagcagtcctctggtggagagagacaggagacgagagatcctcgggaggggtggggagcaacaaggtaatgaagggctggagaggacggccgcatgcagacagtctgagaccacagggccactctttccacaggacaatgtctgcatgcacctgaccaactatgctatcaacaaacacaatgagaattttgtccgggatggcgctgtgggcagtaagaggtactccctactctgttttctcctgcttcctctgccccttagccccacagtcccagtagcccatgaaaccaagctggctcttgggaggctaattgcccagggaaactcagcctttatagaccctgtcctgtgcctgcactttggagctctaagtgcagccccaaacctcaccctgataactagtccctgctccaaactgctagcagcccttcaaagcccgggcatgcaattagcgttagtgtgagggagcctcctgcctacagcctggcccagtggcctagaaactggccttcctctgagcactgggcctcgcaggaagctgtcgacactcaacatctggctgcaagagcacagctacaaccctggagagctgtggggggacatcgaggacatcatcatcaaaaccatcatctcagcccattctgttctacgccacaactaccgaacctgttttccccagtatctgaatggaggtacatgtgcctgttttgaaatccttggttttgacatcttgctggaccacaagttgaagccctggctgctagaggtgaggattatctcctaggctttgcaaaaccaaggtccagaggcctccttgaataggacacctgggacaggggtacactcaggtggtggaacacagaatgggagatgtgaaagccctggggtgggcaggaatgagcagaaggcataagatctctacccttttgacctgctgagtcaaatcttggtggtttttggcctctaccgtaggaatgcaggtttgggatccccagtgccctaatgtaagtctttagggacacactatctagagaggcaggccagctgatttgctctcactggtctgtgaattggagatctctatggcagagttttgtggccttggaagccagagcatccagcctccccggctgaggccatgggagaggaatatcttagaccctctagttaatgcctgcaagaggccaccacctgctcaggtggtctgggaaaggggtgtataatgactcctcctggcaggtaaaccactctccaagctttaccacggactcatgccttgatcaagaagtaaaggatgcacttctctgtgatgctatgacccttgtcaacctccggggctgtgacaaaaggaaggtgatggaggaggataagcggcgagtcaaggaacggcttttccagtgctaccgacagccacgagaatctaggtgtgctaggtgtctggcatgtgtttagttcttcattattcctgagagtaaaagtcctcctttagatgaagaatgtggcctggggctgatttgctatcaaaaacaactttttgcatagataatatgttcatatttgcattaaaaaaatcacaggaccaggcttggtggctcatatctgtaatcccagcactttgggaggctgaggcaggaggattgcttgagcccta

SEQ ID NO: 721178 - DNA, 2325 bp, Homo sapiens
ggcacctgccaccacgcccagttaacttttgtatttttagtagagacggggtttcaccatcttggccaggctggtcttgaactcctgaactcgtgatccaccctcctcagcctctcaaagcgctgggattacaggcatgagccaccatgcctggcctctcctcatttattaagtgggagtaataacagtaactattttacatggttattgtggaaattcaattagctatgtgtgtgaagcacttagaacagcacatagtaggcacttcaaaagtgttattattccctcatgggtttgcatgctcccagcccctcctcattgatggcttcaagtttgatatgcgagtctacgtcctgatcacatcctgtgaccctctccggatcttcayatatgaggagggcctagcccgttttgccaccacgccctatatggagcccagccataacaacctggtaaggggactgggaagcactcttcttttccactgccaaaagtgctgaggttctctagagaaacatggtagagaggtttgtcactgtcaccaaagaacaaggaatgaagccagcaagagctgcagcatctagctgggaggcaagtgtttggtaggtggtgaaggagaaaaggtcagcacccggaggagcccagcacacactcttccccaggatcatctagaatagcagtcctctggtggagagagacaggagacgagagatcctcgggaggggtggggagcaacaaggtaatgaagggctggagaggacggccgcatgcagacagtctgagaccacagggccactctttccacaggacaatgtctgcatgcacctgaccaactatgctatcaacaaacacaatgagaattttgtccgggatggcgctgtgggcagtaagaggtactccctactctgttttctcctgcttcctctgccccttagccccacagtcccagtagcccatgaaaccaagctggctcttgggaggctaattgcccagggaaactcagcctttatagaccctgtcctgtgcctgcactttggagctctaagtgcagccccaaacctcaccctgataactagtccctgctccaaactgctagcagcccttcaaagcccgggcatgcaattagcgttagtgtgagggagcctcctgcctacagcctggcccagtggcctagaaactggccttcctctgagcactgggcctcgcaggaagctgtcgacactcaacatctggctgcaagagcacagctacaaccctggagagctgtggggggacatcgaggacatcatcatcaaaaccatcatctcagcccattctgttctacgccacaactaccgaacctgttttccccagtatctgaatggaggtacatgtgcctgttttgaaatccttggttttgacatcttgctggaccacaagttgaagccctggctgctagaggtgaggattatctcctaggctttgcaaaaccaaggtccagaggcctccttgaataggacacctgggacaggggtacactcaggtggtggaacacagaatgggagatgtgaaagccctggggtgggcaggaatgagcagaaggcataagatctctacccttttgacctgctgagtcaaatcttggtggtttttggcctctaccgtaggaatgcaggtttgggatccccagtgccctaatgtaagtctttagggacacactatctagagaggcaggccagctgatttgctctcactggtctgtgaattggagatctctatggcagagttttgtggccttggaagccagagcatccagcctccccggctgaggccatgggagaggaatatcttagaccctctagttaatgcctgcaagaggccaccacctgctcaggtggtctgggaaaggggtgtataatgactcctcctggcaggtaaaccactctccaagctttaccacggactcatgccttgatcaagaagtaaaggatgcacttctctgtgatgctatgacccttgtcaacctccggggctgtgacaaaaggaaggtgatggaggaggataagcggcgagtcaaggaacggcttttccagtgctaccgacagccacgagaatctaggtgtgctaggtgtctggcatgtgtttagttcttcattattcctgagagtaaaagtcctcctttagatgaagaatgtggcctggggctgatttgctatcaaaaacaactttttgcatagataatatgttcatatttgcattaaaaaaatcacaggaccaggcttggtggctcatatctgtaatcccagcactttgggaggctgaggcaggaggattgcttgagcccta

SEQ ID NO: 721179 - DNA, 1306 bp, Homo sapiens
  misc_feature 328, 329, 330, 331, 332, 333, 334, 335, 336, 337, 338, 339,340, 341, 342, 343, 344, 345, 346, 347, 348, 349, 350, 351,352, 353, 354, 355, 356, 357, 358, 359, 360, 361, 362, 363,364, 365, 366, 367, 368, 369, 370, 371, 372, 373, 374: n = A,T,C or G
  misc_feature 375, 376, 377, 378, 379, 380, 381, 382, 383, 384, 385, 386,387, 388, 389, 390, 391, 392, 393, 394, 395, 396, 397, 398,399, 400, 401, 402, 403, 404, 405, 406, 407, 408, 409, 410,411, 412, 413, 414, 415, 416, 417, 418, 419, 420, 421: n = A,T,C or G
  misc_feature 422, 423, 424, 425, 426, 427: n = A,T,C or G
gtctgctcacaggagatttttctctgtcagtgtcctcgtgtggtttctagtctggggagaacacatcagcacactaacggaagaaaggggagcccgcaaagaccaaagctgctgtgctgggggcgtggattcgagggctcttctccaggctgacagctgggaccctcattttgtcagccctgtggagttcctactagagtgccatgcaaggcagtggggatttggaagatggaagtcctgtcactgtcctcaaaggacttgctgcccagtcgacataagacatattggaagcatttgagcaggatatgattatccgcttagtgaggcnnnnnnnnnnnnnnnnnnnnnnnnnnnnnnnnnnnnnnnnnnnnnnnnnnnnnnnnnnnnnnnnnnnnnnnnnnnnnnnnnnnnnnnnnnnnnnnnnnnnttgcggtacgctcggctcctctcgaccccacaccgccggtcgacatgatccgctgcggcctggcctgcgatgctgccgctggatcctgaccctgctcctactcagcgccatcgccttcgacatcatcgcgctggccggccgcggctggctgcagtcgagcgaccgcgtccagacgtcctcgctgtggtggagatgtttccttccacaggggcggcggcggcggcagcgggtcctaagaggacggctgccacagcctcatggagtacgcgtggggtcgagcagcgctgccatgcttttctggggcgtcagcatcctggtgatctstttcatcctctccttcttcgtcctgtgtgtaccccagatacttgtcttcctaagagtgattggaggtctccttgccttggctgctgtgttccagatcatctccctggtaatttaccccgtgaagtacactcaaccttcaaccttcatgccaagccccgctgtcacttccatctataactgggcctgcggctttgggtgggcagccatgattatcctcattggctgtgctttcttctgctgctgcctccccagctgcgaagatgacctcctgggcaataccaagcccaggtacttctacacatccgcctaacttgggaatgagtgtgggagaaaatcgccactgccaagatggactccagaagaagaaactgtttctctaggctacttcgaacttattttttggcagtgttcatattctcaaactagtcaaaaatgctaaaataatttgggagaaaatatttttaaagtagtgttatagtttcatgttcatcttttattatgttttgtgaagttgtgtcttttcactaattacctatactatgccaatatttcctt

SEQ ID NO: 721180 - DNA, 660 bp, Homo sapiens
ggaaagaaagaaaactagtgtttcatctttcatagtagaaatttgatcagaaatgccaaataaactagcagtacaaatatgtagtttagataatacgtaagtaaacagtatgaattagctaaaagagcttcatgtatttgtgaggaagaagaaatggaggagaggaaactggagtctgctgataatattaggctaactctttaaattcatagagttktaataaaaataaaaccttagtaaatgaggcttcttgccaaaggcctgttgaggatccatggcacttaattgatagatataatgtccaaattatacttcatgctgtcttttcactctgttcacctgcaggttaagtacagattttgttctataattcctatattaataatggtgcataatttccttatactggcaaacagagcctgagttacatagcaacagtgatttggtttccttttattaagtgtttggaggaaaagaatgtggattggaaggaatagagtaccaatactattattttaaagaagagtaagaacatgtaactagatgaatgatgatgtctatatactttacctatgattttatgtttttgaaatccatctcacttggacaattctctgaagcagagggataaccaacaaagttccagggataaatcatctc

SEQ ID NO: 721181 - DNA, 2536 bp, Homo sapiens
tataaatctgtgatattaaggcttcacaatacgtttgtgtcacaaaatatccatttgtttctttatcatcttatgtgaatcactgtgtggatcagacattcaaattttggtatgttcctggtatgtaacacaaataaggtctttctgtggtttgtttcataatggcattttaagttgtgatattttggcagagacattttatttgcatattagacatgcagtattattctttactttcgtgtgttgtagaaacacgtggcccttttggcatactttttattttttttcacattttatagttgtgggtccaaagaaatattctcaataattcaaaaaaaaaaaaaaagataaaccttggcaataaatggctactgatatttggcccttgttgttagtgacaacagtgaatggtggggactgtggtaagttgaagagcccttgtcctattgaaaggggaaaaccactactcttctctagccagttgtttctgtatgacggtttggccaaatactgcccaatctttatattttggggatgggaggtgggggagaaagctgaaatgtctagtttgttatgtgacatctgagttttaaatgttggattacatatttttaatactatagaagctaaacagaaagtatcttcaggcctcatcctgtccaagggctaccagttttaagcctttgaattaagataatagagtttttattgatcaaatggcttacatattaaacttgagctaataataaatggtagtcttcataggataagttacatctgtttttccttccttctggtggaatcaattttgaagaacaaatgccctaaatataaatatgagaaacagaaaggacagagcctgagaaatccacaaaataaatacatatttcctaaataattgaaatttaaccacaatacataggtgtctgaattgcattaagaaatcattggtcagattttcatattgttttctttgcttttaactgcatttgggcttggacatttgaggaagtaggaagaacactaaatgggaaaaagttttagaaatataaatgaaagaaattttaagaagttattccagttttggaagtagtagaattagtcttgttatgcatctaacctagctgttagttctttgaggaagctgttaaaaaaaaatctgtatagaggtattaatatatcagatggctggtcttcaaaagcatcactatttccaatccaaagcagtgattgagtcccataatattatagggtatcccagtgtgtagagaagtgttctgagaaagaagattataattaacagcatgtggagtgcacagtctaactgtataatatatatattttttgaagagtaggcttttttctagagctcaggcattcccaagaaataacttagagactttagaaagctatattaacttttctctgaatattattagayaaatggtctttttcttcctttatttcaaaagctgcagtttgcagcttttaaaacttatcgaataaaaaagacataatcttgagtatttttaagaaacaaatgcgaaacttgtaactatcatcatctttcctctacttcctttttacattttgtctgtcacgagtgtcttaatttgtgaagtgattctttttcttctaatgttcactgaaattatatccttttatgtatgtttggcataattattaaagcgtctttattgttttgtccattatttgctttctcttttccttaaaatttatgtttgaagacttaaatattacatcatctttactgactcagattgtttggtattgatcatgtgtacctagataagtccctgaaacaaaaaataacagctttttgaaactcaggaggcactttctattagcactaataagtgaagtttctttttatatgtatttactatgtagaacatcagtatacaagactctgctaatttataagtaaaatattgagtgacaaatagctttttcctgctgtagtagaaaagttaactgccttggacccaataacttaagccgtatctgtagttaggaagttattgttctttagctgtatgtataaaatgtttaaagtatgcttataaaaaaaaagtactgagagtggtcacaaaaatccaccaacatagtttccctgaagagaatattttcaaattatttattagtctcaaaattgaaacttagaatgtcttgattcagaagcttcctgttcatacagtaaaactcagagcatatccactttttaaacccattaaataaggaataaaacaagtttcctaaacacatgcaagtcatatatgttatgaaaatattcagtaaagtcatttttgtaccatttgctaaagctgtatataattcataatttatcagtttcaaaagttttaaactagctcaagactctatacctctaagctatgagctggatatatacttttgtttccctattggtgaagcagttaatactcaggtaagtgtagaataatctgaatagcaaaagttataattgcttagccaaagaagttgtatcaataatgca

SEQ ID NO: 721182 - DNA, 3155 bp, Homo sapiens
tagctgtgcgtggtggcgggtgcctgtagtcccagctactcgggaggctgaggcaggagaatggagtgaacccgggaggcggagcttgcagtgagccgagattgcgccactgcattccagcctgggcgacagagtgagactctgtttcaaaaaaaaccaaaaaaaaccaaaaaaaacaaaaacaggtttagaaggggagccaggcccaaggagcttgcaggaaagatgaatcagtccaggcaaaaggtacagctcctgaagtttcctggaggaacagcttgagctcgctggcaggataaatgggagtggcccagatgctgagaggggctcgggcctccatatcccagtacaagggaatagcacagatgttcctggaagtgtttcgaacatgctgttataccagaagcttgttcttaaacataatttgaaaggcttgctgggctcccagcttttttcataaacccaccatgtctacatcatggaggttttgagccttggctgcgtggaatgtggattcaatgaagcaacctgtgcttcagtttttacatctgaaaaatggagatgataaagacaactccacaggggtgttaacagaataaaatgaaacaacgtactgaaagcatttggaggcagtaaaaggtagatattgtcatgtatgtttatccttgccaacttgccacctcctgcctagtccccacccacaggtgaaagaaggtgagatagatgctacatagtccctaaaaaaaagttctttgtttcatctgtggcaccactgatttattaattaatatctttggagaagaagctgatgcctgccttttagctgctttgaccattgtatagactctgttagttagttacccaatattcattccctcattcgactttgctaacagaatgcaattttgcttggagtagcaatgtgccagcctcagaggttggatcgagatggatttaagcaatctggccatgtgacccagttttggccaatgagatctatgcagaaagcttctgcttttttgacaaatgagttcacagctggcattgtctctgccaccctcttactgccttgagttgggaaggtgaccggagctgtggcagccactgtgtgatcatgagtaaatggtgaaatctgagacagtggttctgacatgaccgggccactcaatcaataccacaatgtctgtttagagagaagatagatccttaggtgtttagccactgtaatggttttggttataggcagtcaaatgtaatcctgactggttgagcagggttgagcatagactgttcagagccatgagcaccaaacaatgcatcaagtcatgggtatctggggtctagagtcaggttaccaggcaggctcaggaacttagaacccaagtccttgcagtgaggcaaggactggaatacaggggtgctgagtccccttgctcagccagaaacatggaagatgagtttggaggaggaggaagtgcytccatccaacctaataggctggggcatgttgaggacagaggaatgggtctccagcagggacaagaagggctcaaactccctgacatttggctggatctggggttttcactccactgcacgtcctgcccacttgtttcctcaacagattgtagtgtcttgttcctctgattctttctcatgaggccttatttttacaacctccctttgtccacctgtggctcagaataaggtagaaagctgagagggcagcaagcttaaaactccaaggggcggtagccccttctccctggccaccctctccgtgcataaacatttgctgagtgggtgactgaatgcatgaaggagcatatcctgcagattccatgctctcactatctgtgctaatccataataatttctatttgactttggaatgcattacgtaatttgcattctgcaaatttaccttcctaattatgttcttctttgactaacacagaacttaatttgcacagattgagtgatggtcgggggaggtttgctaggtgggatcattaggtggctaatccatacattggcagtcaagagttgtctatattgggaaggtcaactagactgatatttgaagcaggggtggcgtgtgtgtgtatgtgtgggcctggcgtcttgcttctgcctcagccattctgtggaaactgtgttccataaaaacactgcctaccagcttggtcttggcttaggctttctggcctatcctgccactgttctgagagtgacatggtagtccatggctttaaaggcccagcattgaattagatttacacctggccttgctcagacttcaggacctcaatgctagcaactaggttcccaggtgagtatcctgggtacagggatactgcattctccctccacttgcccaatgcataaaagaatgaatgaatggttggatggctggatggctggatgggtggatgaactctttatacaacaggttcccagtctcgaatctcagttctttagaaatgaatgctgtttattgactcttgtaccatccacccacctggatcttcactgactgaaccttctgttagggctgggtctgaagttcacctggaccttgattaactggctctactttgccctggaaaggatcccaagctctcaatctggttggagattttaggccttatgtgccagggcctgggatggctggttcctggtcttgttctaatgtttagatgtcgatggggcctggcctggccatgtgcctttgagctggcaggtctcaacccagctgcacagccagcattcagtacaaatgaaccactgatactcaactcattcatagtctttgtcctgaaccattcgcttcaacgtagctagcttggattttgttcctactgccttctaggtatcttggctcccacccctatattaacccccggactgatttatgattccacaccattggctgtgatctcatggttccctcctggacaatgggtcacacctcacttcctaacccacaatcctgtcactgggctctgcctttgctcctcgatgacggttcacggcaatttctttgagtacatcacccatagctgcttttgattaacattggccaaatccaggaccctatatccatggcatcttgtagccttctctctcctgggtctatctgacttcaggaaata

SEQ ID NO: 721183 - DNA, 3155 bp, Homo sapiens
tagctgtgcgtggtggcgggtgcctgtagtcccagctactcgggaggctgaggcaggagaatggagtgaacccgggaggcggagcttgcagtgagccgagattgcgccactgcattccagcctgggcgacagagtgagactctgtttcaaaaaaaaccaaaaaaaaccaaaaaaaacaaaaacaggtttagaaggggagccaggcccaaggagcttgcaggaaagatgaatcagtccaggcaaaaggtacagctcctgaagtttcctggaggaacagcttgagctcgctggcaggataaatgggagtggcccagatgctgagaggggctcgggcctccatatcccagtacaagggaatagcacagatgttcctggaagtgtttcgaacatgctgttataccagaagcttgttcttaaacataatttgaaaggcttgctgggctcccagcttttttcataaacccaccatgtctacatcatggaggttttgagccttggctgcgtggaatgtggattcaatgaagcaacctgtgcttcagtttttacatctgaaaaatggagatgataaagacaactccacaggggtgttaacagaataaaatgaaacaacgtactgaaagcatttggaggcagtaaaaggtagatattgtcatgtatgtttatccttgccaacttgccacctcctgcctagtccccacccacaggtgaaagaaggtgagatagatgctacatagtccctaaaaaaaagttctttgtttcatctgtggcaccactgatttattaattaatatctttggagaagaagctgatgcctgccttttagctgctttgaccattgtatagactctgttagttagttacccaatattcattccctcattcgactttgctaacagaatgcaattttgcttggagtagcaatgtgccagcctcagaggttggatcgagatggatttaagcaatctggccatgtgacccagttttggccaatgagatctatgcagaaagcttctgcttttttgacaaatgagttcacagctggcattgtctctgccaccctcttactgccttgagttgggaaggtgaccggagctgtggcagccactgtgtgatcatgagtaaatggtgaaatctgagacagtggttctgacatgaccgggccactcaatcaataccacaatgtctgtttagagagaagatagatccttaggtgtttagccactgtaatggttttggttataggcagtcaaatgtaatcctgactggttgagcagggttgagcatagactgttcagagccatgagcaccaaacaatgcatcaagtcatgggtatctggggtctagagtcaggttaccaggcaggctcaggaacttagaacccaagtccttgcagtgaggcaaggactggaatacaggggtgctgagtccccttgctcagccagaaacatggaagatgagtttggaggaggaggaagtgcttccatccaacctaataggctggggcatgttgaggacagaggaatgggtctccagcagggacaagaagggctcaaactccctgacatttggctggatctggggttttcactccactgcacgtcctgcccacttgtttcctcaacagattgtagtgtcttgttcctctgattctttctcatgaggccttatttttacaacctccctttgtccacytgtggctcagaataaggtagaaagctgagagggcagcaagcttaaaactccaaggggcggtagccccttctccctggccaccctctccgtgcataaacatttgctgagtgggtgactgaatgcatgaaggagcatatcctgcagattccatgctctcactatctgtgctaatccataataatttctatttgactttggaatgcattacgtaatttgcattctgcaaatttaccttcctaattatgttcttctttgactaacacagaacttaatttgcacagattgagtgatggtcgggggaggtttgctaggtgggatcattaggtggctaatccatacattggcagtcaagagttgtctatattgggaaggtcaactagactgatatttgaagcaggggtggcgtgtgtgtgtatgtgtgggcctggcgtcttgcttctgcctcagccattctgtggaaactgtgttccataaaaacactgcctaccagcttggtcttggcttaggctttctggcctatcctgccactgttctgagagtgacatggtagtccatggctttaaaggcccagcattgaattagatttacacctggccttgctcagacttcaggacctcaatgctagcaactaggttcccaggtgagtatcctgggtacagggatactgcattctccctccacttgcccaatgcataaaagaatgaatgaatggttggatggctggatggctggatgggtggatgaactctttatacaacaggttcccagtctcgaatctcagttctttagaaatgaatgctgtttattgactcttgtaccatccacccacctggatcttcactgactgaaccttctgttagggctgggtctgaagttcacctggaccttgattaactggctctactttgccctggaaaggatcccaagctctcaatctggttggagattttaggccttatgtgccagggcctgggatggctggttcctggtcttgttctaatgtttagatgtcgatggggcctggcctggccatgtgcctttgagctggcaggtctcaacccagctgcacagccagcattcagtacaaatgaaccactgatactcaactcattcatagtctttgtcctgaaccattcgcttcaacgtagctagcttggattttgttcctactgccttctaggtatcttggctcccacccctatattaacccccggactgatttatgattccacaccattggctgtgatctcatggttccctcctggacaatgggtcacacctcacttcctaacccacaatcctgtcactgggctctgcctttgctcctcgatgacggttcacggcaatttctttgagtacatcacccatagctgcttttgattaacattggccaaatccaggaccctatatccatggcatcttgtagccttctctctcctgggtctatctgacttcaggaaata

SEQ ID NO: 721184 - DNA, 3155 bp, Homo sapiens
tagctgtgcgtggtggcgggtgcctgtagtcccagctactcgggaggctgaggcaggagaatggagtgaacccgggaggcggagcttgcagtgagccgagattgcgccactgcattccagcctgggcgacagagtgagactctgtttcaaaaaaaaccaaaaaaaaccaaaaaaaacaaaaacaggtttagaaggggagccaggcccaaggagcttgcaggaaagatgaatcagtccaggcaaaaggtacagctcctgaagtttcctggaggaacagcttgagctcgctggcaggataaatgggagtggcccagatgctgagaggggctcgggcctccatatcccagtacaagggaatagcacagatgttcctggaagtgtttcgaacatgctgttataccagaagcttgttcttaaacataatttgaaaggcttgctgggctcccagcttttttcataaacccaccatgtctacatcatggaggttttgagccttggctgcgtggaatgtggattcaatgaagcaacctgtgcttcagtttttacatctgaaaaatggagatgataaagacaactccacaggggtgttaacagaataaaatgaaacaacgtactgaaagcatttggaggcagtaaaaggtagatattgtcatgtatgtttatccttgccaacttgccacctcctgcctagtccccacccacaggtgaaagaaggtgagatagatgctacatagtccctaaaaaaaagttctttgtttcatctgtggcaccactgatttattaattaatatctttggagaagaagctgatgcctgccttttagctgctttgaccattgtatagactctgttagttagttacccaatattcattccctcattcgactttgctaacagaatgcaattttgcttggagtagcaatgtgccagcctcagaggttggatcgagatggatttaagcaatctggccatgtgacccagttttggccaatgagatctatgcagaaagcttctgcttttttgacaaatgagttcacagctggcattgtctctgccaccctcttactgccttgagttgggaaggtgaccggagctgtggcagccactgtgtgatcatgagtaaatggtgaaatctgagacagtggttctgacatgaccgggccactcaatcaataccacaatgtctgtttagagagaagatagatccttaggtgtttagccactgtaatggttttggttataggcagtcaaatgtaatcctgactggttgagcagggttgagcatagactgttcagagccatgagcaccaaacaatgcatcaagtcatgggtatctggggtctagagtcaggttaccaggcaggctcaggaacttagaacccaagtccttgcagtgaggcaaggactggaatacaggggtgctgagtccccttgctcagccagaaacatggaagatgagtttggaggaggaggaagtgcttccatccaacctaataggctggggcatgttgaggacagaggaatgggtctccagcagggacaagaagggctcaaactccctgacatttggctggatctggggttttcactccactgcacgtcctgcccacttgtttcctcaacagattgtagtgtcttgttcctctgattctttctcatgaggccttatttttacaacctccctttgtccacctgtggctcagaataaggtagaaagctgagagggcagcaagcttaaaactccaaggggcggtagccccttctccctggccaccctctccgtgcataaacatttgctgagtgggtgactgaatgcatgaaggagcatatcctgcagattccatgctctcactatctgtgctaatccataataatttctatttgactttggaatgcattacgtaatttgcattctgcaaatttaccttcctaattatgttcttctttgactaacacagaacttaatttgcacagattgagtgatggtcgggggaggtttgctaggtgggatcattaggtggctaatccatacattggcagtcaagagttgtctatattgggaaggtcaactagactgatatttgaagcaggggtggcgtgtgtgtgtatgtgtgggcctggcgtcttgcttctgcctcagccattctgtggaaactgtgttccataaaaacactgcctaccagcttggtcttggcttaggctttctggcctatcctgccactgttctgagagtgacatggtagtccatggctttaaaggcccagcattgaattagatttacacctggccttgctcagacttcaggacctcaatgctagcaactaggttcccaggtgagtatcctgggtacagggatactgcattctccctccacttgcccaatgcataaaagaatgaatgaatggttggatggctggatggctggatgggtggatgaactctttatacaacaggttcccagtctcgaatctcagttctttagaaatgaatgctgtttattgactcttgtaccatccacccacctggatcttcactgactgaaccttctgttagggctgggtctgaagttcacctggaccttgattaactggctctactttgccctggaaaggatcccaagctctcaatctggttggagattttaggccttatgtgccagggcctgggatggctggttcctggtcttgttctaatgtttagatgtcgatggggcctggcctggccatgtgcctttgagctggcaggtctcamcccagctgcacagccagcattcagtacaaatgaaccactgatactcaactcattcatagtctttgtcctgaaccattcgcttcaacgtagctagcttggattttgttcctactgccttctaggtatcttggctcccacccctatattaacccccggactgatttatgattccacaccattggctgtgatctcatggttccctcctggacaatgggtcacacctcacttcctaacccacaatcctgtcactgggctctgcctttgctcctcgatgacggttcacggcaatttctttgagtacatcacccatagctgcttttgattaacattggccaaatccaggaccctatatccatggcatcttgtagccttctctctcctgggtctatctgacttcaggaaata

SEQ ID NO: 721185 - DNA, 601 bp, Homo sapiens
tgaatactggactgggttataagttatgtaaatcacaggttcagggaacacccactgtgggagaaagtgccaagtgggagagcacaattggaaagggtcttcagaatatgaagtataaattgtggcacaggatcttgtggcctggggcccaaagcaagcaagatcttccttcttagtgccttgagaagcatgttttaccctttctctccacctcaaactgtgggcctatggacactaatataaaaaacattggtcctccaagaaagaacatgcagactttgccacacacctcagtaggcttaattatttttcctctctctctctctgtctctctctctctctcttttgcatctgcccataktacacagaaatttgacattatatgaacatgtaggtaaatggaaaatatgaaataaaatgtattttcagtcaggtaccattatgttgacacaggacatgtccttttaatgaatacttacattcatttaattcagaatagatttctataaagtaggactttgtttcttggtagtaacagcttggccctgaattattaaaataattagccttaattctatattattatgatatggacaaaaat

SEQ ID NO: 721186 - DNA, 856 bp, Homo sapiens
catttgtgaaaaatcattttaaggtattaacgaaaattattaaaaaggccactggtatacagatgttaatcatcactctgtttataattaaaattttatcttaatagataacgataagaaataaacatttcatgacataatcattgatcacttagttatcaactataaaaatgtaactatgaaacctatgatataaataaaaaaaagagacaccacatttcctataaaaatgcaggatactttttagacaagcatataccaggaatacataacataggttgatatcgcattaaggtatctagattgtcagaattttttaaagtatactttctacaatattcatattacttcttttttttttttttttttgagacagagtctcgcttggtcgcccaggttggagtgcagtggcacaatcttggcttactgcaacctctgcttcccaggtttaagcgattttcctgcctcagcctcccaagtagctgggactacaagtgcccgccaccatgcccagctaatttttgtatttttagtagaggcagggtttcaccatgttggccaggctggtcttgaacccctgacctcagatgatccacccacctctgcctcccaaagtgctgggattacagggtgagacatgtgcccggcctcatattacttctttacattttaaactaatgatttaatatatttaaagaaaagcaagtctttgtctcaaagcaaggaaactttattaccttctcaawtttctgattttctatactcacaccttccaaaaggtttctagagtcattttatacccaaggaatacatgtgtaatgtcctaaaacagaactgtcaatttaaaaatatttaa

SEQ ID NO: 721187 - DNA, 1276 bp, Homo sapiens
agagaagaaaagaaaagaaaaaagaaataaagggagagaagaggaagagggacgaagaagtgttcctcttcctgcctttggtgtatggaagtgatacttggagctataatagccatcttatggtcatgagaggtcaagcctgaaaacaaaaaatcaacatgctgtggctggcaaaacagaaatgtgaaaagcacctgtattcataatgacattgaaatgccactgaattaaccaaccacaaaaarccctagctacagacttctttatgagtgaggaaatctttaaaatctattttgtttaggttgggcattatgctacttgcaatcagaagcattctaaattccataagaagatgctgtccttctattaaagtgtttagggaagaattaatgaaatgtacatgcaaaactaagtatcccccaaagacaagaaaattattaatttcaggcaaaacaaaaaaactgtacaaaaatttcagtaaaatatatatgaactgcagaaagcgtgtacataataataaaataatcattaaataaagccaaagcaagaacaaaaacgaacaaaaaaagtgtttgcctacagtacccaaggatggctggattttgcccaagtgccaaaatgctaatttctaggtgtctgtaattgttggaagatggagagttttggaaaagcaagtctcctaattatctgaagcattgatatttaagcactagaacgttaaaatttctaataattttacggataaatatttgtcaaatttaccgcgtatgtgaatatatttttaatactacagaggactgattattatctttagtatttatagctattcatagatttaaatctttttctttcatggggctatggtttatagaactgccattattttattgtttctgatttttatgtaaccttcattgctgcctagcgatcattttgtttgacatggaactatatgaataactttgtcctcctgaggagaagaaatctggtttttcacatttctgtatttgtcactcacgttggtctagcacttcttgatgtttagtaagctctttaatttcccttaacaatcagtattgcttgtctttagcagcaactgttttagcccttgcttatttgttttaatttctgagagtttggaaatcagacaaccatgcttgctcacttttgtgactcttcattaattgttctgagttacgtctctgtgagatatgggcctatctgctctttcctcattctctacaagcttacttttatgtttgttactttttctttg

SEQ ID NO: 721188 - DNA, 1276 bp, Homo sapiens
agagaagaaaagaaaagaaaaaagaaataaagggagagaagaggaagagggacgaagaagtgttcctcttcctgcctttggtgtatggaagtgatacttggagctataatagccatcttatggtcatgagaggtcaagcctgaaaacaaaaaatcaacatgctgtggctggcaaaacagaaatgtgaaaagcacctgtattcataatgacattgaaatgccactgaattaaccaaccacaaaaagccctagctacagacttctttatgagtgaggaaatctttaaaatctattttgtttaggttgggcattatgctacttgcaatcagaagcattctaaattccataagaagatgctgtccttctattaaagtgtttagggaagaattaatgaaatgtacatgcaaaactaagtatcccccaaagacaagaaaattattaatttcaggcaaaacaaaaaaactgtacaaaaatttcagtaaaatatatatgaactgcagaaagcgtgtacataataataaaataatcattaaataaagccaaagcaagaacaaaaacgaacaaaaaaagtgtttgcctacagtacccaagratggctggattttgcccaagtgccaaaatgctaatttctaggtgtctgtaattgttggaagatggagagttttggaaaagcaagtctcctaattatctgaagcattgatatttaagcactagaacgttaaaatttctaataattttacggataaatatttgtcaaatttaccgcgtatgtgaatatatttttaatactacagaggactgattattatctttagtatttatagctattcatagatttaaatctttttctttcatggggctatggtttatagaactgccattattttattgtttctgatttttatgtaaccttcattgctgcctagcgatcattttgtttgacatggaactatatgaataactttgtcctcctgaggagaagaaatctggtttttcacatttctgtatttgtcactcacgttggtctagcacttcttgatgtttagtaagctctttaatttcccttaacaatcagtattgcttgtctttagcagcaactgttttagcccttgcttatttgttttaatttctgagagtttggaaatcagacaaccatgcttgctcacttttgtgactcttcattaattgttctgagttacgtctctgtgagatatgggcctatctgctctttcctcattctctacaagcttacttttatgtttgttactttttctttg

SEQ ID NO: 721189 - DNA, 917 bp, Homo sapiens
atctcagtttgcaaggaaagaaaattgaatgtcaacagaatgataaccaaattgctgtatcaatattatatattatcttaactctggctcaatatttggaagaagatgatagcatctcctcttcctaatcttcctaatgtgatgtgctgtcrtagttgccatatgtccatgatattgggataaagattataaagctaatagtcaaggctaatgagcaaaattatacttaaaagatcaagtgtattatgtttatgtctgtattttattggcatatactgaaaaatcccagaaactttggaaggtaagattaaactcttaaatgttccccataaaataaatgttttgtattaatagttattttccatattaaaaataattcttttgaatcattccttacaaaatatctacaagtattgttgggatggctaagacaaggaccttaaataataaaatcttgacatacttcatgctatggaagcaataaatttgaaatttaacatttgaagtaatcatacaaataataaaaatgttataagcaataaaattattgtttctttttcctaagatgtaatagtgaaacatactgtttttacaaacaaattttcacaagcaactgattttgtaaaccaatttgactttcttttaatcagtattaacccttgccaatagtaatcatattaaaattttctcagtctctccccaataggaaataagtaggagggacatcaagaatgaagggtttatttattaaaagggtgctaactcattccatttggagacaatgacagtcgtagaagaaccagcttggttaagagaagaagacatctgaccagaacatagaggagaaaccccctgtctaaggtatctattcagggaagaatttgggacatagagttttcttttaggatctgggattt

SEQ ID NO: 721190 - DNA, 917 bp, Homo sapiens
atctcagtttgcaaggaaagaaaattgaatgtcaacagaatgataaccaaattgctgtatcaatattatatattatcttaactctggctcaatatttggaagaagatgatagcatctcctcttcctaatcttcctaatgtgatgtgctgtcatagttgccatrtgtccatgatattgggataaagattataaagctaatagtcaaggctaatgagcaaaattatacttaaaagatcaagtgtattatgtttatgtctgtattttattggcatatactgaaaaatcccagaaactttggaaggtaagattaaactcttaaatgttccccataaaataaatgttttgtattaatagttattttccatattaaaaataattcttttgaatcattccttacaaaatatctacaagtattgttgggatggctaagacaaggaccttaaataataaaatcttgacatacttcatgctatggaagcaataaatttgaaatttaacatttgaagtaatcatacaaataataaaaatgttataagcaataaaattattgtttctttttcctaagatgtaatagtgaaacatactgtttttacaaacaaattttcacaagcaactgattttgtaaaccaatttgactttcttttaatcagtattaacccttgccaatagtaatcatattaaaattttctcagtctctccccaataggaaataagtaggagggacatcaagaatgaagggtttatttattaaaagggtgctaactcattccatttggagacaatgacagtcgtagaagaaccagcttggttaagagaagaagacatctgaccagaacatagaggagaaaccccctgtctaaggtatctattcagggaagaatttgggacatagagttttcttttaggatctgggattt

SEQ ID NO: 721191 - DNA, 917 bp, Homo sapiens
atctcagtttgcaaggaaagaaaattgaatgtcaacagaatgataaccaaattgctgtatcaatattatatattatcttaactctggctcaatatttggaagaagatgatagcatctcctcttcctaatcttcctaatgtgatgtgctgtcatagttgccatatgtccatgatattgggataaagattataaagctaatagtcaaggctaatgagcaaaattatacttaaaagatcaagtgtattatgtttatgtctgtattttattggcatatactgaaaaatcccagaaactttggaaggtaagattaaactcttaaatgttccccataaaataaatgttttgtattaatagttattttccatattaaaaataattcttttgaatcattcsttacaaaatatctacaagtattgttgggatggctaagacaaggaccttaaataataaaatcttgacatacttcatgctatggaagcaataaatttgaaatttaacatttgaagtaatcatacaaataataaaaatgttataagcaataaaattattgtttctttttcctaagatgtaatagtgaaacatactgtttttacaaacaaattttcacaagcaactgattttgtaaaccaatttgactttcttttaatcagtattaacccttgccaatagtaatcatattaaaattttctcagtctctccccaataggaaataagtaggagggacatcaagaatgaagggtttatttattaaaagggtgctaactcattccatttggagacaatgacagtcgtagaagaaccagcttggttaagagaagaagacatctgaccagaacatagaggagaaaccccctgtctaaggtatctattcagggaagaatttgggacatagagttttcttttaggatctgggattt

SEQ ID NO: 721192 - DNA, 917 bp, Homo sapiens
atctcagtttgcaaggaaagaaaattgaatgtcaacagaatgataaccaaattgctgtatcaatattatatattatcttaactctggctcaatatttggaagaagatgatagcatctcctcttcctaatcttcctaatgtgatgtgctgtcatagttgccatatgtccatgatattgggataaagattataaagctaatagtcaaggctaatgagcaaaattatacttaaaagatcaagtgtattatgtttatgtctgtattttattggcatatactgaaaaatcccagaaactttggaaggtaagattaaactcttaaatgttccccataaaataaatgttttgtattaatagttattttccatattaaaaataattcttttgaatcattccttacaaaatatctacaagtattgttgggatggctaagacaaggaccttaaataataaaatcttgacatacttcatgctatggaagcaataaatttgaaatttaacatttgaagtaatcatacaaataataaaaaygttataagcaataaaattattgtttctttttcctaagatgtaatagtgaaacatactgtttttacaaacaaattttcacaagcaactgattttgtaaaccaatttgactttcttttaatcagtattaacccttgccaatagtaatcatattaaaattttctcagtctctccccaataggaaataagtaggagggacatcaagaatgaagggtttatttattaaaagggtgctaactcattccatttggagacaatgacagtcgtagaagaaccagcttggttaagagaagaagacatctgaccagaacatagaggagaaaccccctgtctaaggtatctattcagggaagaatttgggacatagagttttcttttaggatctgggattt

SEQ ID NO: 721193 - DNA, 624 bp, Homo sapiens
cttctgtgggatgcyggcactgccactgaaatggcctcattgtctggagaaacacctgaggttcattgtctcatggccacaaagaacaaggacatatacacacaaagagtgatgttgaaagcaaaagtttaataggcgaaattaaactaaattaaacattctaattaaattagaaagagaatagctctatgcggcagagaggggtgccaggaaaatatgttgacggattcatggtgaaatgaactgggttttacagatgagctggtgaggaggcagtgtcttatttacatagggtgtaaaagactggttgaaccaggtgtaccatttgcatagggcgcaaatctctggtatccctcatcctaatctttttttttttttaattttgcaggcgtgcaggcaggttctctgcctgagctgctccatgttggccatttcttcggtcctgtacacgtgataacaaaaaacgggaaatggagcctccatgttggattgttggatatgcctgacccctgacccccaggtagccatttttttttttcttttcctagactgagtttcgctcttgttgcccaggctggagcgcagtggcgctatctcggctccctgcaacctccgcctcctggg

SEQ ID NO: 721194 - DNA, 624 bp, Homo sapiens
cttctgtgggatgctggcactgccactgaaatggcctcattgtctggagaaacacctgaggttcattgtctcatggccacaaagaacaaggacatakacacacaaagagtgatgttgaaagcaaaagtttaataggcgaaattaaactaaattaaacattctaattaaattagaaagagaatagctctatgcggcagagaggggtgccaggaaaatatgttgacggattcatggtgaaatgaactgggttttacagatgagctggtgaggaggcagtgtcttatttacatagggtgtaaaagactggttgaaccaggtgtaccatttgcatagggcgcaaatctctggtatccctcatcctaatctttttttttttttaattttgcaggcgtgcaggcaggttctctgcctgagctgctccatgttggccatttcttcggtcctgtacacgtgataacaaaaaacgggaaatggagcctccatgttggattgttggatatgcctgacccctgacccccaggtagccatttttttttttcttttcctagactgagtttcgctcttgttgcccaggctggagcgcagtggcgctatctcggctccctgcaacctccgcctcctggg

SEQ ID NO: 721195 - DNA, 624 bp, Homo sapiens
cttctgtgggatgctggcactgccactgaaatggcctcattgtctggagaaacacctgaggttcattgtctcatggccacaaagaacaaggacatatacacacaaagagtgatgttgaaagcaaaagtttmataggcgaaattaaactaaattaaacattctaattaaattagaaagagaatagctctatgcggcagagaggggtgccaggaaaatatgttgacggattcatggtgaaatgaactgggttttacagatgagctggtgaggaggcagtgtcttatttacatagggtgtaaaagactggttgaaccaggtgtaccatttgcatagggcgcaaatctctggtatccctcatcctaatctttttttttttttaattttgcaggcgtgcaggcaggttctctgcctgagctgctccatgttggccatttcttcggtcctgtacacgtgataacaaaaaacgggaaatggagcctccatgttggattgttggatatgcctgacccctgacccccaggtagccatttttttttttcttttcctagactgagtttcgctcttgttgcccaggctggagcgcagtggcgctatctcggctccctgcaacctccgcctcctggg

SEQ ID NO: 721196 - DNA, 624 bp, Homo sapiens
cttctgtgggatgctggcactgccactgaaatggcctcattgtctggagaaacacctgaggttcattgtctcatggccacaaagaacaaggacatatacacacaaagagtgatgttgaaagcaaaagtttaataggcgaaattaaactaaattaaacattctaattaaattagaaagagaatagctctatgcggcagagaggggtgccaggaaaatatgttgacggattcatggtgaaatgaactgggttttacagatgagctggtgaggaggcagtgtcttatttacatagggtgtaaaagactggttgaaccaggtgtaccatttgcatagggcgcaaatctctggtatccctcatcctaatctttttttttttttaattttgcaggcgtgcaggcaggttctctgcctgagctgctccatgttggccatttcttyggtcctgtacacgtgataacaaaaaacgggaaatggagcctccatgttggattgttggatatgcctgacccctgacccccaggtagccatttttttttttcttttcctagactgagtttcgctcttgttgcccaggctggagcgcagtggcgctatctcggctccctgcaacctccgcctcctggg

SEQ ID NO: 721197 - DNA, 263 bp, Homo sapiens
taatgtrttttctggctccctctcaggactgtcatcaaaacagtggagaagccgtttcccacctcccacattaattccaccatcatcagaacatagttttaaatgtgcctttgccaaattggaatttgtggaattatgagcagaaatgagtgtgctgtcagctgctggggtttcagagtaagaggtgtgtgtcattttggcaagacagcctagggatccctgggtttccacctaactggaaaatggccaaaggctaaaatttt

SEQ ID NO: 721198 - DNA, 263 bp, Homo sapiens
taatgtatttwctggctccctctcaggactgtcatcaaaacagtggagaagccgtttcccacctcccacattaattccaccatcatcagaacatagttttaaatgtgcctttgccaaattggaatttgtggaattatgagcagaaatgagtgtgctgtcagctgctggggtttcagagtaagaggtgtgtgtcattttggcaagacagcctagggatccctgggtttccacctaactggaaaatggccaaaggctaaaatttt

SEQ ID NO: 721199 - DNA, 1842 bp, Homo sapiens
agctctgccctggagctgggcatttcctccctctggggcctcagtttcctcacatattaaatgagggggtggacttagctgaatctgaagtcctttccagctctcacatgctttgagcctataaaacaccattcacactagaaaagtgtcttcatgcctctctctctctctgtctctctctcctaacatcccaaggccaaaggggtttcatttatctggcaatagcaggttccacactgaggaacaatttttactggtgaaattgtatcgagaaccgtgaaaaagaagtgaacatcacatacactcaaaggtgccagttcatcccgattccatttcccccagaaattgacctaatgtccaaaaccatttcagttaatggctacatgtctattgcttgctctccagcgaaagcaaataacgatccctggatttgttcttaactgagtcctgaaaggtctgaacaggcccaggcaaaacatcggagtaactgtggaaaactgcattgctaataacttactttcattgcaggaagaatgcagcatgagagaggaaacagagccctgtggctttcctggactagattcaagtcctgctatcgtagtcacctcaggctgccataaaaaaatatcaaagactgggagccttaaacagcagatacttatttctcacagtgttggagtcttcaaagttcaagatcaaggtataggcagctttggttcctggtgagggtccacttcctggcttacagatggttgccttcttgctgtgtcctcgatacggtggaaagagagggagcccaggtctcttgtcctcttcctgtaagaataccaagcccatcgtgaggcccccacaatcacgacctcatctaaatctagttacctcccaaaggcctcgcctctaaataccactgctttggggattagagcttcatgtgaatttgggaggtgatgcaaacaatgggtccatggcacttgcttctctcctcctaactgtgcctcagtttacatgtcacttcttcaaggagtctttctagaacatctccttcattctaatctcaaaacccttgtattttccttatgttatttcttacaacataactgtttcctgggtgatagtatttatgtagctccctcaacaggacgtaagctccatgaaggcaagagcatgtacatctcatgaagattgtcacccagaacccgatacaatggggcacagtggtgtttattaaatctaagataaagagttaatagcccagcgtgaccgacgcagaagacgggtgatttctgcatttccatctgaggtaccgggttcatctcactagggagtgccagacagtgggcgcaggccagtgggtgtgcacacggtgagcgagccgaagcagggcgaggcattgcctcacctgggaagcacaaggggtcagggagttccctttccsagtcaaagaaaggggtgacggacgcacctggaaaatcgggtcactcccacccgagtattgcgcttttcagaccaccttaaaaaacggcgcaccacgagactatatcccacacctggctcggagggtcctacgcccacggaatctcgctgattgctagcacagcagtctgagatcaaactgcaaggcggcagcgaggctgggggaggggcgcccgccattgcccaggcttgcttatgtaaacaaagcagccaggaagctcgaactgggtggagcccaccacagctcaaggaggcctgcctgcctctgtagcctccacctctgggggcagggcacagacaaacaaaaagacagcagtaacctctgcagacttaaatgtccctgtctgacagctttgaagggagtagtgg

SEQ ID NO: 721200 - DNA, 917 bp, Homo sapiens
aagtgtcatctctatgtcttcatccaacttgctgatggagatatttaatgatacaggacacagccagtgtcctaggtgtcctagcagcctgccgcttgacattgatcagttagttgttcagcacctgttagctatagttgttcatctacttactaatacacttaattttactggtattcagtgtaaacttctttgtcattgcaataaagctattacaaaaggctttgtaaaatgccttcctgaaataccaattcactacatttccctggagaatactgtcaaagtaggaaatgaggtttgtctgacatgacttaatcttaataaatctaagacagtaggaaatcactattaatccatactgcacactgtaagagtctgaagaaaattccatggctttagagcattggttttgaagctgcatcctgcagagacttagatttccttagaggtactgcagacaccaccgcgggatatgaaggagaaacagagcaggcacaaytctagccactttcgttccaagaaatgttactattttatatattataataatgtcctattttagatccttcttgaaaaagtgaaatgcaaaatacaatttgaaaactactgctttagaggaaggaagcaatctgcctgtctggagttgtatttgattgtgctatattgactggttcttgggacactcactttgttaataaaatcaagacaccattatccacatttgctctgtgcctcacagaagtgctataagagttgatagatagcctcaggacagagcgactaagtaagtccattactgaaatgcacacatctaaatgccccaaagaatccttgtcatttttttcaagctatctgctcagaggatgttttccccatcctcaaatatttattgatgccttctagctacaaggtatgtt

SEQ ID NO: 721201 - DNA, 658 bp, Homo sapiens
tcccttgcacattggaaattatgggattcggaaagttcagtgacagattcaatgaatataacgtcttcaatcaggagtgagagataaatctacaggttgcaataggctggaagagtagaagatggtaaacaggtcgtttgttagacaggtagcctttgaacacatccccatatctctaatgactaaaccatattaaaggatctctgagaagagttcagaactgacatctgccttctgaaccacgaggtacaccaacagccaacagccactgaatgtggacagctttcaaaagtattaattggggattaatatgggggaaagcatttcatgggaaaatcactgagcttcttaagataaataccacatgaatacagcatattcagatgactctgggggtaacctagatttcaaagcatagactcttatgtatcatagaattgcaggaacaactttgaatttaaattgtccactccatgatctgtgaaaaataataatcttggcaaataattacatattgcttattatatgtcagacggggcacttgacatgtgttaactcatttaatcctcacaactaccttaagtggtaggtacagttatgatttgcattttacagatgaagaaactgaagcacagaaaggctragtcaattaagcaag

SEQ ID NO: 721202 - DNA, 1337 bp, Homo sapiens
taatgagtccatctgcctgcttctccctttccttctctgcacatcagtaattccagagtttgtcagtgacactttcataattgacttgttcttcacttggtaatcttaatttgttcctaaaaatcctcccacaaagtaaaatgccattatgtgaaaaagcgtttttatgaatttgaatttaaaaatttaggaagcattttatcccaacccaacatacccaaagcatttttatagataggaaaatattttaactgaacaatagaaatatttttcaattgtcatgacattatataagtaatgaacatcaaattgaaaataaaatagagtttgttcataaaatgtaataacatgaaggtttatgtgatggtgagtgctggttggtgggggagtgttaaaggcagttgttctttgtaaggtatattttgctctctgaacaattttgtttatgaatgttttcaaccatttggaggatcatggttaacttgcacttacagcacacttaacatttaaagttatagcagagaagacaatttcagtcaaaataatagctgaagatgagagcacttggaaagatgtgaaaatttatttagtacacagagacagaaaaattacaaaagatgttacctcatcatccctctctctagtcatacttagacaaaatgaaatactttcagtttatccaaacacggcactcagttcaaatttgttctgatattcaatgattaagaactgatgactaagaactgttagaataaaaatagcatattttcccaaaagctgcagtgtcaaaatatcatgcttatttactttatatgttttagagtatctatctatctatctrtctgtgtgtgtgtgtgtgtgtgtgtatatatatatatatatgtattttaaaagaagttgtttggaaaagggtaacttctcaagagactttatggcaaaaggttgttaactaaataggttctgtgggtgtaagtctgtgtttaccagtctttttatcaaggtttctaattctttgttaggtggtgtaggacactgctggcttgtgtataacccaggaatcagaacatagggcagaatgtccacctaacacagttcatgttatttcttgagttccagttatacaccacgtatcctgataaaacaagtcatacaagaaaagggctattatcaccctcaaggagtcctcagcctagttggggaggcagtagggcggatgtataaactctataatattatgagtactgcaatacagagtgttctggggcagacaggagggagtccctaattatccccagggtagggtggaattgtcaaggggcaacatagaagaagaaaca

SEQ ID NO: 721203 - DNA, 1337 bp, Homo sapiens
taatgagtccatctgcctgcttctccctttccttctctgcacatcagtaattccagagtttgtcagtgacactttcataattgacttgttcttcacttggtaatcttaatttgttcctaaaaatcctcccacaaagtaaaatgccattatgtgaaaaagcgtttttatgaatttgaatttaaaaatttaggaagcattttatcccaacccaacatacccaaagcatttttatagataggaaaatattttaactgaacaatagaaatatttttcaattgtcatgacattatataagtaatgaacatcaaattgaaaataaaatagagtttgttcataaaatgtaataacatgaaggtttatgtgatggtgagtgctggttggtgggggagtgttaaaggcagttgttctttgtaaggtatattttgctctctgaacaattttgtttatgaatgttttcaaccatttggaggatcatggttaacttgcacttacagcacacttaacatttaaagttatagcagagaagacaatttcagtcaaaataatagctgaagatgagagcacttggaaagatgtgaaaatttatttagtacacagagacagaaaaattacaaaagatgttacctcatcatccctctctctagtcatacttagacaaaatgaaatactttcagtttatccaaacacggcactcagttcaaatttgttctgatattcaatgattaagaactgatgactaagaactgttagaataaaaatagcatattttcccaaaagctgcagtgtcaaaatatcatgcttatttactttatatgttttagagtatctatctatctatctatstgtgtgtgtgtgtgtgtgtgtgtatatatatatatatatgtattttaaaagaagttgtttggaaaagggtaacttctcaagagactttatggcaaaaggttgttaactaaataggttctgtgggtgtaagtctgtgtttaccagtctttttatcaaggtttctaattctttgttaggtggtgtaggacactgctggcttgtgtataacccaggaatcagaacatagggcagaatgtccacctaacacagttcatgttatttcttgagttccagttatacaccacgtatcctgataaaacaagtcatacaagaaaagggctattatcaccctcaaggagtcctcagcctagttggggaggcagtagggcggatgtataaactctataatattatgagtactgcaatacagagtgttctggggcagacaggagggagtccctaattatccccagggtagggtggaattgtcaaggggcaacatagaagaagaaaca

SEQ ID NO: 721204 - DNA, 1337 bp, Homo sapiens
taatgagtccatctgcctgcttctccctttccttctctgcacatcagtaattccagagtttgtcagtgacactttcataattgacttgttcttcacttggtaatcttaatttgttcctaaaaatcctcccacaaagtaaaatgccattatgtgaaaaagcgtttttatgaatttgaatttaaaaatttaggaagcattttatcccaacccaacatacccaaagcatttttatagataggaaaatattttaactgaacaatagaaatatttttcaattgtcatgacattatataagtaatgaacatcaaattgaaaataaaatagagtttgttcataaaatgtaataacatgaaggtttatgtgatggtgagtgctggttggtgggggagtgttaaaggcagttgttctttgtaaggtatattttgctctctgaacaattttgtttatgaatgttttcaaccatttggaggatcatggttaacttgcacttacagcacacttaacatttaaagttatagcagagaagacaatttcagtcaaaataatagctgaagatgagagcacttggaaagatgtgaaaatttatttagtacacagagacagaaaaattacaaaagatgttacctcatcatccctctctctagtcatacttagacaaaatgaaatactttcagtttatccaaacacggcactcagttcaaatttgttctgatattcaatgattaagaactgatgactaagaactgttagaataaaaatagcatattttcccaaaagctgcagtgtcaaaatatcatgcttatttactttatatgttttagagtatctatctatctatctatctgtgtgtgtgtgtgtgtgtgtgtrtatatatatatatatgtattttaaaagaagttgtttggaaaagggtaacttctcaagagactttatggcaaaaggttgttaactaaataggttctgtgggtgtaagtctgtgtttaccagtctttttatcaaggtttctaattctttgttaggtggtgtaggacactgctggcttgtgtataacccaggaatcagaacatagggcagaatgtccacctaacacagttcatgttatttcttgagttccagttatacaccacgtatcctgataaaacaagtcatacaagaaaagggctattatcaccctcaaggagtcctcagcctagttggggaggcagtagggcggatgtataaactctataatattatgagtactgcaatacagagtgttctggggcagacaggagggagtccctaattatccccagggtagggtggaattgtcaaggggcaacatagaagaagaaaca

SEQ ID NO: 721205 - DNA, 1337 bp, Homo sapiens
taatgagtccatctgcctgcttctccctttccttctctgcacatcagtaattccagagtttgtcagtgacactttcataattgacttgttcttcacttggtaatcttaatttgttcctaaaaatcctcccacaaagtaaaatgccattatgtgaaaaagcgtttttatgaatttgaatttaaaaatttaggaagcattttatcccaacccaacatacccaaagcatttttatagataggaaaatattttaactgaacaatagaaatatttttcaattgtcatgacattatataagtaatgaacatcaaattgaaaataaaatagagtttgttcataaaatgtaataacatgaaggtttatgtgatggtgagtgctggttggtgggggagtgttaaaggcagttgttctttgtaaggtatattttgctctctgaacaattttgtttatgaatgttttcaaccatttggaggatcatggttaacttgcacttacagcacacttaacatttaaagttatagcagagaagacaatttcagtcaaaataatagctgaagatgagagcacttggaaagatgtgaaaatttatttagtacacagagacagaaaaattacaaaagatgttacctcatcatccctctctctagtcatacttagacaaaatgaaatactttcagtttatccaaacacggcactcagttcaaatttgttctgatattcaatgattaagaactgatgactaagaactgttagaataaaaatagcatattttcccaaaagctgcagtgtcaaaatatcatgcttatttactttatatgttttagagtatctatctatctatctatctgtgtgtgtgtgtgtgtgtgtgtatatatatatatatatgtattttaraagaagttgtttggaaaagggtaacttctcaagagactttatggcaaaaggttgttaactaaataggttctgtgggtgtaagtctgtgtttaccagtctttttatcaaggtttctaattctttgttaggtggtgtaggacactgctggcttgtgtataacccaggaatcagaacatagggcagaatgtccacctaacacagttcatgttatttcttgagttccagttatacaccacgtatcctgataaaacaagtcatacaagaaaagggctattatcaccctcaaggagtcctcagcctagttggggaggcagtagggcggatgtataaactctataatattatgagtactgcaatacagagtgttctggggcagacaggagggagtccctaattatccccagggtagggtggaattgtcaaggggcaacatagaagaagaaaca

SEQ ID NO: 721206 - DNA, 1435 bp, Homo sapiens
tgaggaatcgccacactgtcttccacaatggttgaactatttcttacttattttcttaacagcattgcccaagacctactttgctgaagaatagtggtgatagtgggaaactttgtcttgtttcacatcttgaagggaataagtatgatgcttcatcattaagtacaatgtctactgtaggttctttgtatcttatcaaattaaggaagtccttttttattcttggtgtttgaaaagttgtaatgataactaaatcttatcaatattttcaatgcattaattgagatatgcaattttttcttagttgataatgtgttgagtaaggttaatagaatttatgttgctatttaattcatacttgctttattaatttttaaatactgaaagattcagtcagtataatttaaaggattttttcatctgtgttcattagtaaaattaacctgtattttttgttatttttattgttttatctcattgtgtaagtttataatcgtttgataaaatgagctagatagcttttactcttgctttttttctgaaaaaacttttacaaaatagaactacatcttccttacaagtttgaacaaaattacctgcaaaatcatctgggacagaatcttttttgggagttgagattttttattgctgtttcaatgtctttactgtctttgctcttttcacatttgctctttgctttttcctcctcccccttcttgcctttctgtttctccttcatttgctataaactcacatcagctttacttagattgtaaagaccaattattcttttattctaaatggctaataaaacttcctagaaaaatattatggctaaggcatgactttgctgattttaatgagcatatagttcttcataatactcttaccatttttaatttctatcatggctagttgtttctccattttcactctgtattttgttaatttatcttttttaaaatcggttttaccagaggtctaccttattaaactttgcattcagttcaattaagcttctctatttttatttttctcctcattttatttattttggcccatatttttattatttctttatgtttgtactgctactttataacttcttgtgctgaatgatttgcttatttattttcaacttttatttcctaataaatatgcttaaatgaaataatatatttaaatgtagacraagctttaatttgaagccagcaaacttagaaatgattatgggtattttcatttaattttacacattttgtccttttccttatattttcctttctaaattcaggagttattagtattgttaaataattttatatattatgtggttttatctattcttcattcatttctttgagatgtaagcttgttaagtagggaaatgagggcataagagcatacagggcagttaaaggtggtagaaaaatgg

SEQ ID NO: 721207 - DNA, 814 bp, Homo sapiens
tttgctttctttgattttacctacacatccctacccccatttccttctgctcttctaatctgacattctggaacgtcatctttattagcttgttgataatgttgtactgctaactaaatggcacttttactcatttctgtcagggtccaatcagcatggttagggtgatatttagggatcataatgatatgttagcagtgaataattttaacatattaactgtttattcctctggttgtcaggccctgaaaaaacagatgacagtacccttggttgattttacatttcttttggctgagatcactagtatattgaagtgttaaaatgtcacttctcacatttttctttgcaattaaagttggttcatctcacatttgtaattttttatttgtaaagaaagtaattggaaagtaagccctcttgttcattcagtttccccattagggaactttcatattaatgttataaatattcttaattattgtagtagcaccttcagcaaaatcaattgccatatcaagttgataatatyatacaatatacatatttacataaatcctcgaagctattattctattttttttccataagttattggggtacaggtggtatttggttacatgaataagttctttagtggagatttgtgagatcctggtgcacccatcacccaagcagtatacactgcaccatatttgtagtcttttaatcctcacctccacttccactcttccccccaagtccccaaagtccattgtatcattcttatgcctttgtgtcctcatagcttagttcccacatatcagtgagaaca

SEQ ID NO: 721208 - DNA, 552 bp, Homo sapiens
cctgacagctttgtgctctctcatgctgactctctgtaagtagtaatccacttcatgtaactggttgtgcatgggtgttctgtctcactagatttgggtaagttggcaaccagtgcacagcaaaccttcttggcaaaattggtgcagtgagaaggtttgatttgagagaacyatggcttatggtgaagttggaggaacaatactctccagtacctggcccaggacagagatatcagcctggagatgcaagggctggacatgcagatggatgtttaatgaggagggaggataaacaggacatttgtcctcctcccattaatatggatcagctggctgactgaattgagacatagaaaaaagaatgtggaaataggaatggggtacacaattttctagttgttagacagttgcatgattgctcattcctgaggcaagagagctcaagacatgggtaatcagatggaccctgagtcacccaagatgacacaagaaagataatctcaatggtccctgaagcatctgataaggaaccaaaatgaacaacaatggcca

SEQ ID NO: 721209 - DNA, 643 bp, Homo sapiens
aaatgtcagactttaaaaaagacttagtaaggggaggagattctctatagaatgcaaatttcccccacaactggcagctttgcagaaccacttcagaatatgatgaagaaatatttttaaggtaaaatatttagattttcttcagggcctattatctgtcatgttggaatatggtatcttaatgctacaaagcgtctgttttgtcagcccaaagatctctgttgtaatgacaatgttggtcagttgtgtctgaactccaaagtataatgaggcacatctaaacccacctgccagtcatggcctaacctagtttttcaaatttctttgaagtgctctttacaaaagaggagtccattcagcaggttggtggcttacaacttaatttttggttttaacacacasaaaaacaaaatcagttcacaaattgaatgtaaaacagattggtaaaaaaaaaaaaaaaaattaagtgcctcctgaatattcctacatgtcaaagaaaaagaaattatcagaattcagatgagaaatacccctcttacaaaagattaacaatttttttttttaactatcttagtttgggtccaccctcaatgaggatccctgtttaggcagcaaatttacactgggaggaaaggaggaaagt

SEQ ID NO: 721210 - DNA, 1377 bp, Homo sapiens
tttctgtgttaggccattttcacattgctataaagaaatacctgagacttggtaatttacccagaaaagaagtttaattggctcacggttcttctggctatataagcatggctcctgcacctgcctggcttctggtgagggcctcatgaagccgacaaccatggcagaagttgaatggggagtggtcaggtcccggagtaagagcaggagcaggagagtagagtgggggagatgccacagacttttaaacaaccagatctcacgtgaagtaactgagcaaaaactcccttatcaccaacgggatggggcaaatcactcaccatatatattagaaataacttcatgtacatacaaatgcgtatgacatttaacttaaaatataaaacacgtgttttatatcggctgacatgtttgtaaaaggtactatayagtcatgaactttgaggacactgagattatagctacttacaactaacacattagccagccatagttcatggatgccagccaaagacaggagactctcggcccagacacaagtgacattgtcagtcacagcagcagcagagccagagtgtaagcacctgtgcaggttccccaggactcgccatggtagacaggatagcaaccctccccaaaacgcgtgctttccttggagacatttatctaaaatctatctgagcaagacatttggctaataggaagaacaagaattctctggagatctgaaggccaagggtgctccttttgatgaaatccactttctctgcttcctagaacatcacctgcacccactcgagggctcacctgtctcatcccttcttttgcctggcacccatgggacaacacaatctgggcccaaaaggggtacgtcaggaaagcaggggtctgggaaactgagctcagctcttgacagtgacgtggagggtatcacccagtggatcccccggataggtccccaggccatgctgcccatgccagcccttcctgtccctgcaactgccgtgtagctcagaggactctcccttgctggctggtcactttcccgtcatgtccatgttctgcagagcccagcctgtggggagctcagttcaggagagcctggaaaggtgcttcaaccaccccacaagccacagtctgctctgttcatctgctgctatttcccaggggccccagccatgggtcattccgaatgcagacagtttgcagcccagcccagggctgcatgttactttaagacctcagcttcagaacataagcaaggtattaataggtgacactttcaggctcttaattgcagcaaaatatctgaaaatcaaactcaaattagggaaactttgactctagctggtttcgcattcttaatgtgaagagccc

SEQ ID NO: 721211 - DNA, 1294 bp, Homo sapiens
ttagatatagtctagaatcctcatattttcttcttttttaattccaggaaagttgtacgttactaaccacaatctactttctgaaataagtacagaagccaaaaaaaaaaagagagaataaaaacaaaaacaaaaaaacagactatataagaaaaaataagcttactaatactaatacatcttattattcatgacccttgagggagaaaactagacctacagaagtcagtgaattttctcaaagtcacataggtcttttgcggcagagctgggactggatctggtctttctattaccactccctgaaacacacaggtctgcaaaatatgaaggaaaaggctgttgggaaaaagaccacactgttcccactggttagcactggagactgggatgactgccctgggcaggagtagacttttcttttatgcccatctgtgtagttggaatttcttccagttatacgcaacacagaagacaggattacctgaaaatcctgccacttcaagacctttacagtgctgtttagtatattacaaacatccctttcaaggctgagctgagcttgcaggaataaaaggggaaagtaatcaggtgctaagaattaaaggggtgctgaaaaccagagcggttttgcctgttgccacagctgccttgggggcagaggctggaggaataagtgagctctctcacacaagccaggcttggggagggccgaattcacccaggaggagatcaaggacatgcatggtttctgctgaggctctggagaggaaaaaaaaaaaaaatctccctagagaacttgcaacttgtaatttattaaagtagaaattgtagtttactcagtaaaattagaaattagtcacaaaggtataactttttwaaaaaaatcccctatgttggatatcctatgctctcactgataagtgggagctaagctacgaggatgcaaaggcctaagaaggacacaatggactttggggactcaagggagagggtgggaagggggtgagggataaaagactacaaattgggttcagtgtgtactgtccggggtatgggtgcaccaaaatctcacaaatcaccactaaacaacttactcttgtaaccaaacaccacctgttccccaaaaacctacagaaataaaaaatttaaaaaatcctctatgtgtgaagatgaacaacttattaagtaagtcttggttttaaggggaaatcaagtaaattaatagatgcttatagttaaaggataatgataacatttatgtcaaaatatgtggaaccgtattttaagtaat

SEQ ID NO: 721212 - DNA, 1198 bp, Homo sapiens
taatcaaactgaacttgtttcaccaaaaagcgtgaatggggtaaattctctattaaaacatgaagtgtcacattaggaaggaacagaaacaaaatctagttatatattgtttgcaagagtcagaaaaaactaaagggatgggtgagatttctatttctgaaatttatgatggactggattcctggaaaaaccctcctgatgaaaataacaacaaacttgtttttatatgaatctcacaatttgaaaataagaattccacagaggcctaaaacaagaggaaaacaacagccttaggcagtggggctgaacgctggagagcttaaagagccatctgagggctcctgcaggccaataaccccagagcctccctgagatcagaagtcctaaaggagattcctgtataaagcaggggccagggaccttaaaaggctacattctccgtgtaatgctgaagaataaacctattatgcagtacgcaagaggaaggagcttgcctctcttgatcttgattctcattggaagcaaacaaacaaacaaaatcttcctggtaattcacaactgcaagccagccttccacggtttgagacctgaattcatggtctccaatatgctgaaatgaaataagagtaagcctgaaattctacatccattgatgactgcagggtgagattccactgagaaccatacgattgtcaactttaatgatgtaagagttctaggccgggcacggtggctcacgcttgtaattctagtactttgggaggccaaggtgggtggatcgcgaggtcaggagatggagaccatcctggctaacatggtgaaaccccatctctactaaaaatacaaaaaattagccagatgtggtggcgggcgcctgtcgtcccagctactcgggaggctgaggcaggagaatggcgtgaacccggaaggcggaggttgcagtgagccgagatcgcgccactgcactccagcctgggygacagagcgagactctgtctcaaaaacaaaagaaaagagttataaaacttagacaaccctgggaagagaaagactccaaattaacaaagattaagattctgctccctggtagaaaggaggcttggtatggaaattcagttgacttatttttaaaatcattatatttcttacatgcctgagttgtggattcagatttatatctgctgctttatttaaaaag

SEQ ID NO: 721213 - DNA, 771 bp, Homo sapiens
ggataaaattgcttccagagatattgtcccattttgcattccaatcagtggatctcaccttcagtattttgtgcaattaaaaaaaataatgtttctccttttaaagattatatttaaaatagcttttaaatatgaaaaatttgtatctacaaataagagatagtgacaaaaaataaataataaaataaacacaagagcagaaagtagattgaaacattaaaattcaaatcacagrcctctgttatggagaagacagctgcaatagcttttctgttcttttatctacattggtaggttcttcttttaattaatttttaccccaacttaagtgctggctggtttggcaatttgttgctgggatggaaagaagaaatgtgcaccttgtcttttgcaggttatgagagccttgtctgtccttgtggttgtgtgggtgtctgttagattattgtgaatactgagctttgaaaataacctaacagtcaatcaattgctgagcttctattaccagtagtgggacataatgtacatcatgtagataggcaggcttgtcactgacaagggggctgacccctggaaaaccagcacagagccagctcttctgtgtgaatccactctctccagaatataccataagtcatggaaagaaataagagtctcaggaaatgagactcttaccgcgatgagaggtgaaccttgaaatctattttagcaattaggaagagaagtcccatttcgcatcccaaatcaagtagaggcctgctagtccaaaca

SEQ ID NO: 721214 - DNA, 771 bp, Homo sapiens
ggataaaattgcttccagagatattgtcccattttgcattccaatcagtggatctcaccttcagtattttgtgcaattaaaaaaaataatgtttctccttttaaagattatatttaaaatagcttttaaatatgaaaaatttgtatctacaaataagagatagtgacaaaaaataaataataaaataaacacaagagcagaaagtagattgaaacattaaaattcaaatcacaggcctctgttatggagaagacagctgcaatagcttttctgttcttttatctacattggtagrttcttcttttaattaatttttaccccaacttaagtgctggctggtttggcaatttgttgctgggatggaaagaagaaatgtgcaccttgtcttttgcaggttatgagagccttgtctgtccttgtggttgtgtgggtgtctgttagattattgtgaatactgagctttgaaaataacctaacagtcaatcaattgctgagcttctattaccagtagtgggacataatgtacatcatgtagataggcaggcttgtcactgacaagggggctgacccctggaaaaccagcacagagccagctcttctgtgtgaatccactctctccagaatataccataagtcatggaaagaaataagagtctcaggaaatgagactcttaccgcgatgagaggtgaaccttgaaatctattttagcaattaggaagagaagtcccatttcgcatcccaaatcaagtagaggcctgctagtccaaaca

SEQ ID NO: 721215 - DNA, 771 bp, Homo sapiens
ggataaaattgcttccagagatattgtcccattttgcattccaatcagtggatctcaccttcagtattttgtgcaattaaaaaaaataatgtttctccttttaaagattatatttaaaatagcttttaaatatgaaaaatttgtatctacaaataagagatagtgacaaaaaataaataataaaataaacacaagagcagaaagtagattgaaacattaaaattcaaatcacaggcctctgttatggagaagacagctgcaatagcttttctgttcttttatctacattggtaggktcttcttttaattaatttttaccccaacttaagtgctggctggtttggcaatttgttgctgggatggaaagaagaaatgtgcaccttgtcttttgcaggttatgagagccttgtctgtccttgtggttgtgtgggtgtctgttagattattgtgaatactgagctttgaaaataacctaacagtcaatcaattgctgagcttctattaccagtagtgggacataatgtacatcatgtagataggcaggcttgtcactgacaagggggctgacccctggaaaaccagcacagagccagctcttctgtgtgaatccactctctccagaatataccataagtcatggaaagaaataagagtctcaggaaatgagactcttaccgcgatgagaggtgaaccttgaaatctattttagcaattaggaagagaagtcccatttcgcatcccaaatcaagtagaggcctgctagtccaaaca

SEQ ID NO: 721216 - DNA, 771 bp, Homo sapiens
ggataaaattgcttccagagatattgtcccattttgcattccaatcagtggatctcaccttcagtattttgtgcaattaaaaaaaataatgtttctccttttaaagattatatttaaaatagcttttaaatatgaaaaatttgtatctacaaataagagatagtgacaaaaaataaataataaaataaacacaagagcagaaagtagattgaaacattaaaattcaaatcacaggcctctgttatggagaagacagctgcaatagcttttctgttcttttatctacattggtaggttcttcttttaattaatttttaccccaacttaagtgctggctggkttggcaatttgttgctgggatggaaagaagaaatgtgcaccttgtcttttgcaggttatgagagccttgtctgtccttgtggttgtgtgggtgtctgttagattattgtgaatactgagctttgaaaataacctaacagtcaatcaattgctgagcttctattaccagtagtgggacataatgtacatcatgtagataggcaggcttgtcactgacaagggggctgacccctggaaaaccagcacagagccagctcttctgtgtgaatccactctctccagaatataccataagtcatggaaagaaataagagtctcaggaaatgagactcttaccgcgatgagaggtgaaccttgaaatctattttagcaattaggaagagaagtcccatttcgcatcccaaatcaagtagaggcctgctagtccaaaca

SEQ ID NO: 721217 - DNA, 771 bp, Homo sapiens
ggataaaattgcttccagagatattgtcccattttgcattccaatcagtggatctcaccttcagtattttgtgcaattaaaaaaaataatgtttctccttttaaagattatatttaaaatagcttttaaatatgaaaaatttgtatctacaaataagagatagtgacaaaaaataaataataaaataaacacaagagcagaaagtagattgaaacattaaaattcaaatcacaggcctctgttatggagaagacagctgcaatagcttttctgttcttttatctacattggtaggttcttcttttaattaatttttaccccaacttaagtgctggctggtttggcaatttgttgctgggatggaaagaagaaatgtgcaccttgtcttttgcaggttatgagagccttgtctgtccttgtggttgtgtgggtgtctgytagattattgtgaatactgagctttgaaaataacctaacagtcaatcaattgctgagcttctattaccagtagtgggacataatgtacatcatgtagataggcaggcttgtcactgacaagggggctgacccctggaaaaccagcacagagccagctcttctgtgtgaatccactctctccagaatataccataagtcatggaaagaaataagagtctcaggaaatgagactcttaccgcgatgagaggtgaaccttgaaatctattttagcaattaggaagagaagtcccatttcgcatcccaaatcaagtagaggcctgctagtccaaaca

SEQ ID NO: 721218 - DNA, 1065 bp, Homo sapiens
agtttggttcaggtagttttagagtggcagtgagttagtcccctgcatcagccagaaatcagacaaaaagcaagacaagttagaagtaccaatgggtgcaggattctttacctcaggacttttaagacctttatccttagagatcccaatattgttcatttcatccaagtataacacctatgcatggcataaaaaagagtatcacatctttgatttttctgattagttatttgggtcttgaaatgtccagtttagcagaaagccttgtactgtcttctggggactgtctcctacatactccttgaatttttcaagaaccaaaggggttcactaaatccaaggaagacagtcccttttatcaagtcagaaggaggagagaaaaaaggacattccaatcattctgttgtttccattgtttctgttgctgcattgttgccactcaaactgcttctgctgcctggtaattgttgacctttgacaccaaggtgcccttactgattcagatccctcaagtcttcatggggattcacacagtgactttgaagttacaacattttttagttcccttacctatgcttataygctcagccattgttcccaaagcaccagcaccctgctctggccgctgggcatcctgactttatccgcacacaaagtgagcaaattgacccttcctcctgtattcagaacctaatgtggaacccacatcttagctaagaattagctgagaccttcatggtaagagatcctttcaggccgttgttggtcttttctctagcagatatgaggtgggcttgttataaagggtcagaggggttcaaataatgtggcagaaagagatcagtgtttgtttcttcttctttgctaccagatctacacagtgaggcacctttatatcctgtgtagaaccttaggcagtagaaagtcccatatgagccttccccaagcagtggctcccagctgtggttggccccttgagtgatctgatttacatgataatgaaaatcgtccaagctacttccatctctagctcaagattttaaaatattttcaaattgtacctca

SEQ ID NO: 721219 - DNA, 1263 bp, Homo sapiens
gggtatactaaaaatatccatccatggaggctggttagataactctggtatatccatcttacggctataaaaaagactgaaaagctctctacatattagcatggaaaacacttcagaattctatttagtaagagcaaataaagaatgtattcatgagatatatactacatagaacatatgtaactaaaatatatactttacatacactcacatatttgttaagcagttataggggttaatttttgtcatatactgatttgtcattcaaaattataatacatggtttttcattttaaatttatatagtgaattacatccctaaattttcaaaaattgaaaattatttcattattgaaataaactactttttgttgagatttatagtattgcgaattagggtttaattactaatataatggtgtaacactcaggtgagtaatacatatgttatttattttctttaaatctatttaatttttactccctgtcctcatcccaagttccccctatcacctcccctaagtagattaaagggctcgaagatttacagaggaccaagtctttgagggggagggtggttaagtaccagttatcacactgtcctgtatgctcctgccatgcctggcagtggttctgctcctcctctgccatgtttaatgtgtagaacaatgacaagaccagatactatgcaggtgtccctcagggccaggaacaggtgcaggtctctgctgttcacagagcccacagagctccacttccctctcccaagcctcagcctccccttaacagtagagtctatgagaaagcctgtcacatccatgtctctcagatgccctctcctccacctccaagacacatctcctaacatatctcctcaacgggctccagcttttagagaccagacccagaaagaaagtgtcttgcaggcaactttgactttccttattgccacaaatttctccagaggcaaagtagtatagcactcagtacctgctctatggcaaaggggaaaatgaagaagaaaaayaaattgaaagtaaaaatttaaaaatccaataaaatcaaatatttgaagtcttcagtcacagtaatgtattggtatagatgttcataagggagactcatctagagtttccttaaatgtaccatctttgtatagtctgggtagcattgctataacagcttttaaaaaaaatttagaagcatccctactatctctggacttagtaatttaaatagaactggaattacaaattccttgaa

SEQ ID NO: 721220 - DNA, 2203 bp, Homo sapiens
gaaaattagaagctagcctgcactgatggcttatgtttgtaatcccacaactttgggaagactaggtaggcagattatttgaggccaggagttcaagaccatcctgggcaacatggcaaaaccccgtctytaatgaaaatacaaaaattagtctggtgcagtgttgtgagcctgtaaccccggatacttgggaggctgaggcacaggaatcacttggacccgggaggtgggaggcggaggtcgcagtaagcagaggtcgcagtaagcagcctgggtgacagagggagaatctgtctaaaaaaaaaaaaaaaaaaaaagtcaattattaacaaaaaataggagttttccatgtacttccttggaaagtgctaggatctgattttagttacccatcttgtaaattatcattaactttactaaggaaaatgagtcaacacttttcaatccacaaagaaacattctggaaagacagaggatggtcattgaaagctgttctttgtgctttaaggtttagtaaacttccatattgctgtaaataatattatcctaatgaaaaagagcattgtcttcccccaaacaatgccctaatattcacatcagtgagcaagcaaagttacaaactcaactaacacaacctgtggaatcaaatttgaaattttgttttcagtactcaaacatcaatctataaaaataatatgtaatcaagaccatcacagaatatttgagtgtttcaatttctgcactgagaagcaaacacataaatataatattctggtacaagattttgttttccagagattccactggcctccagcagacatagaatataaagtagaatttgatttcatagatactagacgtgtgccatcaattgtttagaagcttacagtttctcttagctattattttctcaccttctcattaagacatgcccttcagttctattacagcttaataggatgaatagggcacaatctacatgaattcttagctctactcaccccaaatcagactgtattctttgtcatccattccaaatcttaagggaatataacattctactaataatctaattctgggtcaagtggctcaattgctcaaggttatacagattaaatttctttgagatgagaaattaagtatttgaatttgtcattctcttggattgaattatgaccaattatccagacacagccattttagcaagatctcagagtgttttattttaatagttaactgctttgccaaaagacttatcccctgtttccatgcatgtgcagctgtcagtgaatttagttatttcaccacagatttctataggtctggtgctggaatatgaatgcctccctccccttcctgctaataaactacttccaaatactatattttcctgccctttcattgcctgcaagcccttctcaagaaacaatttctttatcagttagtattctttgttaaaaattggcaaaacaaacctggatattgttggcagtaatgaaatttaccataagagtactaagagtttataaaaatgagaagatggcaattttgaaaatggagcaaaacagagggagttctggtgtgctactcaaactaaactgtgggaaaagtcatactatcagcaacattaggacatttatgcttagataaacaagtattaacggcttcttctagtcttgaatcatctgcttaagattccaagcccgaggagaggtcatttggctggtagagttaagaatatgttactatccagggccaggagcagtggcttacgcctgtaaccccagcactttgggaagccaaggcaggcggatcacaaggtcaggagatcgagaccatcctggctaacacggtgaaaccccatctctactaaaaatacaaaaaattagccaggcgtggtggcagacacctgtagtcccagctactcaggaggctgatgctggagaatggcgtgaacccgggaggtggagtttgcagtgagctgagatcgcgccactgcactccagcctgggcgaaaaagcgagactccctttccaaaaaaaaaaaaaaaaaaaaaaaaaaaaaaagaatatgttactatatgttactatccaatggctcttttggcatgatcagtaagcaaagccaaagagcttctggggaggcacaggccaccagaaaggatggcaggccctaggctataatatctcactgaaaattacaa

SEQ ID NO: 721221 - DNA, 2203 bp, Homo sapiens
gaaaattagaagctagcctgcactgatggcttatgtttgtaatcccacaactttgggaagactaggtaggcagattatttgaggccaggagttcaagaccatcctgggcaacatggcaaaaccccgtctttaatgaaaatacaaaaattagtctggtgcagtgttgtgagcctgtaaccccggatacttgggaggctgaggcacaggaatcacttggacccgggaggtgggaggcggaggtcgcagtaagcagaggtcgcagtaagcagcctgggtgacagagggagaatctgtctaaaaaaaaaaaaaaaaaaaaagtcaattattaacaaaaaataggagttttccatgtacttccttggaaagtgctaggatctgattttagttaccyatcttgtaaattatcattaactttactaaggaaaatgagtcaacacttttcaatccacaaagaaacattctggaaagacagaggatggtcattgaaagctgttctttgtgctttaaggtttagtaaacttccatattgctgtaaataatattatcctaatgaaaaagagcattgtcttcccccaaacaatgccctaatattcacatcagtgagcaagcaaagttacaaactcaactaacacaacctgtggaatcaaatttgaaattttgttttcagtactcaaacatcaatctataaaaataatatgtaatcaagaccatcacagaatatttgagtgtttcaatttctgcactgagaagcaaacacataaatataatattctggtacaagattttgttttccagagattccactggcctccagcagacatagaatataaagtagaatttgatttcatagatactagacgtgtgccatcaattgtttagaagcttacagtttctcttagctattattttctcaccttctcattaagacatgcccttcagttctattacagcttaataggatgaatagggcacaatctacatgaattcttagctctactcaccccaaatcagactgtattctttgtcatccattccaaatcttaagggaatataacattctactaataatctaattctgggtcaagtggctcaattgctcaaggttatacagattaaatttctttgagatgagaaattaagtatttgaatttgtcattctcttggattgaattatgaccaattatccagacacagccattttagcaagatctcagagtgttttattttaatagttaactgctttgccaaaagacttatcccctgtttccatgcatgtgcagctgtcagtgaatttagttatttcaccacagatttctataggtctggtgctggaatatgaatgcctccctccccttcctgctaataaactacttccaaatactatattttcctgccctttcattgcctgcaagcccttctcaagaaacaatttctttatcagttagtattctttgttaaaaattggcaaaacaaacctggatattgttggcagtaatgaaatttaccataagagtactaagagtttataaaaatgagaagatggcaattttgaaaatggagcaaaacagagggagttctggtgtgctactcaaactaaactgtgggaaaagtcatactatcagcaacattaggacatttatgcttagataaacaagtattaacggcttcttctagtcttgaatcatctgcttaagattccaagcccgaggagaggtcatttggctggtagagttaagaatatgttactatccagggccaggagcagtggcttacgcctgtaaccccagcactttgggaagccaaggcaggcggatcacaaggtcaggagatcgagaccatcctggctaacacggtgaaaccccatctctactaaaaatacaaaaaattagccaggcgtggtggcagacacctgtagtcccagctactcaggaggctgatgctggagaatggcgtgaacccgggaggtggagtttgcagtgagctgagatcgcgccactgcactccagcctgggcgaaaaagcgagactccctttccaaaaaaaaaaaaaaaaaaaaaaaaaaaaaaagaatatgttactatatgttactatccaatggctcttttggcatgatcagtaagcaaagccaaagagcttctggggaggcacaggccaccagaaaggatggcaggccctaggctataatatctcactgaaaattacaa

SEQ ID NO: 721222 - DNA, 455 bp, Homo sapiens
tttttttttttttttttgagacagaggctcattctgttgccctggctggagtgcagtggagctatcttagctcactgcaagctctgcctcccaggttcacagtattctcctgcctcagcctcccgagtagctgggactacaggtgccaccaccacgcccagctaattttttgtatttttagtagagacggcgtttcaccatgttagccaggatggtctcgatctcctgacctcgtgatccgtcctgctcrgcctcctaaagtgctgagattacaagcataagccaccgtgcccggccactatttgtactcttaaatgatgtatgtgcatgtaagaaaggataattatatatgtacacacatataaatatcacacacacacatgcataaattaaatcggtatgtctggatggttggctatgtattagatttattgccttcttggtattttcagtag

SEQ ID NO: 721223 - DNA, 2616 bp, Homo sapiens
  misc_feature 1363, 1364, 1365, 1366, 1367, 1368, 1369, 1370, 1371, 1372,1373, 1374, 1375, 1376, 1377, 1378, 1379, 1380, 1381, 1382,1383, 1384, 1385, 1386, 1387, 1388, 1389, 1390, 1391, 1392,1393, 1394, 1395, 1396, 1397, 1398, 1399, 1400, 1401: n = A,T,C or G
  misc_feature 1402, 1403, 1404, 1405, 1406, 1407, 1408, 1409, 1410, 1411,1412, 1413, 1414, 1415, 1416, 1417, 1418, 1419, 1420, 1421,1422, 1423, 1424, 1425, 1426, 1427, 1428, 1429, 1430, 1431,1432, 1433, 1434, 1435, 1436, 1437, 1438, 1439, 1440: n = A,T,C or G
  misc_feature 1441, 1442, 1443, 1444, 1445, 1446, 1447, 1448, 1449, 1450,1451, 1452, 1453, 1454, 1455, 1456, 1457, 1458, 1459, 1460,1461, 1462: n = A,T,C or G
ttcagctttgtattttagcaagtgtggatacagttagttgctgtcatgttgtggatatatcacaatatatttaataatgaaacaaatagtttcctaaacaggagccctgaatgtatttacaaagattttcatttgcttttctctcctcaggttaggctagccatgaaaaatcaatatttgtcatcagtcattaccaggtaatactggttgtgatggtgtcagcgttttaaagcagaaagattctggaaaagggtttcaaaagtgatttaaaaaaaaaagacgtctttgttctgtctaattaaaattcccttctcgttgctcatgaaactcatacttaaaattttaaatgatttgccccctgtgcatccaaatcaataagggccccaaggggctgctctcatgctgcccactgaacttacctagagctgagtgttaaatggaaaactgatcttggggatgccattataatccattttcagagatcttcccacaacatacaggcagggccaaggagagaagccgtgggcctgtcctgtgctccctgccagagcttcttggtgtgtggtcatgacagccactttgtgatctctcagtaccctttcgctcactatctaaattatagctcttgatgacaaggagtttccttcatctctgcatcaatgcctaatacaatgcctgatacacagtatgtgcccccagattgttttgccgattgaataattaagcaaattgtcttgtcagatagtcatctagcctcctcttacatcctctcaatggcagacactccttacattctaagacggtctcttccttccatgttcttctctgttaatgctattcagtgtgacaatgtccatgtcacctaaatgtcattaagccatgcaaggttttgtcttgcagactttttattgtccaaacgctatctgtgctctcctacattaacgggattttatctgcatgtagttcccatttcatgcttccctgctctgtttcattataatactgcttggtttctgatacacacacacagattatcatatactaaatcaatgggttaattgtaaattaatgtaattaactgtaattgttatattaatatataatacaagtgttaattaatgtttgtgtaagaaaatatagtagtatatatttaaccaatctgagtgctatcatacatccactcttagtcaatgaatccccattctcctgagttaaatttgttcaacaacatttgattaaagttaaaattgtttggcaatatttttgtgctgctctgggctcactttctgccatttgtggtctgttctggtgaacaattctaagccgtaatgcctggtaagtgacaatgctgcataagctacannnnnnnnnnnnnnnnnnnnnnnnnnnnnnnnnnnnnnnnnnnnnnnnnnnnnnnnnnnnnnnnnnnnnnnnnnnnnnnnnnnnnnnnnnnnnnnnnnnnctgccaccaggatttgttgatctacttattcctctgtattgattaggtcaagagtagtcttagtgctatttatcatgtttggatttgatacttctgaatctcaatttcaaaaaccaatttaggaatcagttaatgacttcctcaaagaagactggaataaaaaatgatttttttctattttgtttatatcccttgatatgttatgagactggagatattaaatagttccactgatccttcagcttatttttttagcaaatttgaagctcttaacttttattactttggtctcttacaagagtgttctcgattctgagctacataatttttgattcatctgcactaccactccttaagatcttttcaattccaatcacttgacaaatttctgactttcaaaaatataggttttattaagatagtctctttggacagttaggtatgaaaaatttttatttaatcatttgatctgtgccaagcctcatctatttccttagtggtcattatattatcccaaaaccttacctctacagctcaatggaagaaacttcacttaattaatacayaacatattgaaatcccttcctattacaacctgctctaattttggactttcttaaaagttgtccattatgttactctttaggcttatttctattttcagcttttaaagaatattttattatttaatttagggtattttaacctttagaaattttgtaatatttctcttgttatgaaagatttttaaagtcactcagacacactctcagacggtctattacctttgcttcaggcaaacaaggcaacatgcagctgagctcccgtggccatcaaaggcctgactgtcactgctccttaggaaagcatctccctctatcaatatcagcctgtgatattcccatcatgtcacgcctgtctgatgagtggtgtaaggtagagacctgcagcagcaagcaaggctcactttctgcctctgctcctattctgtttctctgaattgaaaagatggtctggtgatgagtgtgtttgctagaagacccttgttctgggtgtatataaagcactgtacttgtctccatttctttatcttccatctgtttttccaaccaccgcagtcatcctgccctaccccaaccactccactgaaactg

SEQ ID NO: 721224 - DNA, 2616 bp, Homo sapiens
  misc_feature 1363, 1364, 1365, 1366, 1367, 1368, 1369, 1370, 1371, 1372,1373, 1374, 1375, 1376, 1377, 1378, 1379, 1380, 1381, 1382,1383, 1384, 1385, 1386, 1387, 1388, 1389, 1390, 1391, 1392,1393, 1394, 1395, 1396, 1397, 1398, 1399, 1400, 1401: n = A,T,C or G
  misc_feature 1402, 1403, 1404, 1405, 1406, 1407, 1408, 1409, 1410, 1411,1412, 1413, 1414, 1415, 1416, 1417, 1418, 1419, 1420, 1421,1422, 1423, 1424, 1425, 1426, 1427, 1428, 1429, 1430, 1431,1432, 1433, 1434, 1435, 1436, 1437, 1438, 1439, 1440: n = A,T,C or G
  misc_feature 1441, 1442, 1443, 1444, 1445, 1446, 1447, 1448, 1449, 1450,1451, 1452, 1453, 1454, 1455, 1456, 1457, 1458, 1459, 1460,1461, 1462: n = A,T,C or G
ttcagctttgtattttagcaagtgtggatacagttagttgctgtcatgttgtggatatatcacaatatatttaataatgaaacaaatagtttcctaaacaggagccctgaatgtatttacaaagattttcatttgcttttctctcctcaggttaggctagccatgaaaaatcaatatttgtcatcagtcattaccaggtaatactggttgtgatggtgtcagcgttttaaagcagaaagattctggaaaagggtttcaaaagtgatttaaaaaaaaaagacgtctttgttctgtctaattaaaattcccttctcgttgctcatgaaactcatacttaaaattttaaatgatttgccccctgtgcatccaaatcaataagggccccaaggggctgctctcatgctgcccactgaacttacctagagctgagtgttaaatggaaaactgatcttggggatgccattataatccattttcagagatcttcccacaacatacaggcagggccaaggagagaagccgtgggcctgtcctgtgctccctgccagagcttcttggtgtgtggtcatgacagccactttgtgatctctcagtaccctttcgctcactatctaaattatagctcttgatgacaaggagtttccttcatctctgcatcaatgcctaatacaatgcctgatacacagtatgtgcccccagattgttttgccgattgaataattaagcaaattgtcttgtcagatagtcatctagcctcctcttacatcctctcaatggcagacactccttacattctaagacggtctcttccttccatgttcttctctgttaatgctattcagtgtgacaatgtccatgtcacctaaatgtcattaagccatgcaaggttttgtcttgcagactttttattgtccaaacgctatctgtgctctcctacattaacgggattttatctgcatgtagttcccatttcatgcttccctgctctgtttcattataatactgcttggtttctgatacacacacacagattatcatatactaaatcaatgggttaattgtaaattaatgtaattaactgtaattgttatattaatatataatacaagtgttaattaatgtttgtgtaagaaaatatagtagtatatatttaaccaatctgagtgctatcatacatccactcttagtcaatgaatccccattctcctgagttaaatttgttcaacaacatttgattaaagttaaaattgtttggcaatatttttgtgctgctctgggctcactttctgccatttgtggtctgttctggtgaacaattctaagccgtaatgcctggtaagtgacaatgctgcataagctacannnnnnnnnnnnnnnnnnnnnnnnnnnnnnnnnnnnnnnnnnnnnnnnnnnnnnnnnnnnnnnnnnnnnnnnnnnnnnnnnnnnnnnnnnnnnnnnnnnnctgccaccaggatttgttgatctacttattcctctgtattgattaggtcaagagtagtcttagtgctatttatcatgtttggatttgatacttctgaatctcaatttcaaaaaccaatttaggaatcagttaatgacttcctcaaagaagactggaataaaaaatgatttttttctattttgtttatatcccttgatatgttatgagactggagatattaaatagttccactgatccttcagcttatttttttagcaaatttgaagctcttaacttttattactttggtctcttacaagagtgttctcgattctgagctacataatttttgattcatctgcactaccactccttaagatcttttcaattccaatcacttgacaaatttctgactttcaaaaatataggttttattaagatagtctctttggacagttaggtatgaaaaatttttatttaatcatttgatctgtgccaagcctcatctatttccttagtggtcattatattatcccaaaaccttacctctacagctcaatggaagaaacttcacttaattaatacataacatattgaaatcccttcctattacaacctgctctaattttggactttcttmaaagttgtccattatgttactctttaggcttatttctattttcagcttttaaagaatattttattatttaatttagggtattttaacctttagaaattttgtaatatttctcttgttatgaaagatttttaaagtcactcagacacactctcagacggtctattacctttgcttcaggcaaacaaggcaacatgcagctgagctcccgtggccatcaaaggcctgactgtcactgctccttaggaaagcatctccctctatcaatatcagcctgtgatattcccatcatgtcacgcctgtctgatgagtggtgtaaggtagagacctgcagcagcaagcaaggctcactttctgcctctgctcctattctgtttctctgaattgaaaagatggtctggtgatgagtgtgtttgctagaagacccttgttctgggtgtatataaagcactgtacttgtctccatttctttatcttccatctgtttttccaaccaccgcagtcatcctgccctaccccaaccactccactgaaactg

SEQ ID NO: 721225 - DNA, 2616 bp, Homo sapiens
  misc_feature 1363, 1364, 1365, 1366, 1367, 1368, 1369, 1370, 1371, 1372,1373, 1374, 1375, 1376, 1377, 1378, 1379, 1380, 1381, 1382,1383, 1384, 1385, 1386, 1387, 1388, 1389, 1390, 1391, 1392,1393, 1394, 1395, 1396, 1397, 1398, 1399, 1400, 1401: n = A,T,C or G
  misc_feature 1402, 1403, 1404, 1405, 1406, 1407, 1408, 1409, 1410, 1411,1412, 1413, 1414, 1415, 1416, 1417, 1418, 1419, 1420, 1421,1422, 1423, 1424, 1425, 1426, 1427, 1428, 1429, 1430, 1431,1432, 1433, 1434, 1435, 1436, 1437, 1438, 1439, 1440: n = A,T,C or G
  misc_feature 1441, 1442, 1443, 1444, 1445, 1446, 1447, 1448, 1449, 1450,1451, 1452, 1453, 1454, 1455, 1456, 1457, 1458, 1459, 1460,1461, 1462: n = A,T,C or G
ttcagctttgtattttagcaagtgtggatacagttagttgctgtcatgttgtggatatatcacaatatatttaataatgaaacaaatagtttcctaaacaggagccctgaatgtatttacaaagattttcatttgcttttctctcctcaggttaggctagccatgaaaaatcaatatttgtcatcagtcattaccaggtaatactggttgtgatggtgtcagcgttttaaagcagaaagattctggaaaagggtttcaaaagtgatttaaaaaaaaaagacgtctttgttctgtctaattaaaattcccttctcgttgctcatgaaactcatacttaaaattttaaatgatttgccccctgtgcatccaaatcaataagggccccaaggggctgctctcatgctgcccactgaacttacctagagctgagtgttaaatggaaaactgatcttggggatgccattataatccattttcagagatcttcccacaacatacaggcagggccaaggagagaagccgtgggcctgtcctgtgctccctgccagagcttcttggtgtgtggtcatgacagccactttgtgatctctcagtaccctttcgctcactatctaaattatagctcttgatgacaaggagtttccttcatctctgcatcaatgcctaatacaatgcctgatacacagtatgtgcccccagattgttttgccgattgaataattaagcaaattgtcttgtcagatagtcatctagcctcctcttacatcctctcaatggcagacactccttacattctaagacggtctcttccttccatgttcttctctgttaatgctattcagtgtgacaatgtccatgtcacctaaatgtcattaagccatgcaaggttttgtcttgcagactttttattgtccaaacgctatctgtgctctcctacattaacgggattttatctgcatgtagttcccatttcatgcttccctgctctgtttcattataatactgcttggtttctgatacacacacacagattatcatatactaaatcaatgggttaattgtaaattaatgtaattaactgtaattgttatattaatatataatacaagtgttaattaatgtttgtgtaagaaaatatagtagtatatatttaaccaatctgagtgctatcatacatccactcttagtcaatgaatccccattctcctgagttaaatttgttcaacaacatttgattaaagttaaaattgtttggcaatatttttgtgctgctctgggctcactttctgccatttgtggtctgttctggtgaacaattctaagccgtaatgcctggtaagtgacaatgctgcataagctacannnnnnnnnnnnnnnnnnnnnnnnnnnnnnnnnnnnnnnnnnnnnnnnnnnnnnnnnnnnnnnnnnnnnnnnnnnnnnnnnnnnnnnnnnnnnnnnnnnnctgccaccaggatttgttgatctacttattcctctgtattgattaggtcaagagtagtcttagtgctatttatcatgtttggatttgatacttctgaatctcaatttcaaaaaccaatttaggaatcagttaatgacttcctcaaagaagactggaataaaaaatgatttttttctattttgtttatatcccttgatatgttatgagactggagatattaaatagttccactgatccttcagcttatttttttagcaaatttgaagctcttaacttttattactttggtctcttacaagagtgttctcgattctgagctacataatttttgattcatctgcactaccactccttaagatcttttcaattccaatcacttgacaaatttctgactttcaaaaatataggttttattaagatagtctctttggacagttaggtatgaaaaatttttatttaatcatttgatctgtgccaagcctcatctatttccttagtggtcattatattatcccaaaaccttacctctacagctcaatggaagaaacttcacttaattaatacataacatattgaaatcccttcctattacaacctgctctaattttggactttcttaaaagttgtccattatgttactctttaggcttatttctattttcagcttttaaagaatattttattatttaatttagggtattttaacctttagaaattttgtaatatttctcttgttatgaaagatttttaaagtcactcagacacactctcagacggtctattacctttgcttcaggcaaacaaggcaacatgcagctgagctcccgtggccatcaaaggcctgactgtcactgctccttaggaaagcatctccctctatcaatatcagcctgtgatattcccatcatgtcacgcctgtctgatgagtggtgtaaggtagagacctgcagcagcaagcaaggctcactttctgcctctgctcctattctgtttctctgaattgaaaagatggtctggtgatgagtgtgtttgctagaagacccttgttctgggtgtatataaagcactgtacttgtctccatttctttatcttccatctgtttttccaaccaccrcagtcatcctgccctaccccaaccactccactgaaactg

SEQ ID NO: 721226 - DNA, 2068 bp, Homo sapiens
taagaataagaaacatttctaaataatgatcttgataacagcatagcatttagggcacataatgtgcwaattttgctttgaaaattggattgaaagaagttggtcttacatttggctctcagtatgtaagttttcaaaacatctttaatatctgtggttagcgttttgtctgtcttgtagataatattaatcatctctatactttattagaagttacaagcaaaagtgtccttgtgactttacgtttcctggtaaattaactgcttgatagaacaatttttgcttatctacacatgcctatgcatgttttctttctttctttctttctttttatttatttatttatttatttatttatttatttattttgcagtggatattactctgcctcataatgaagccaacagtcatatcttccgacgtggagatttgagaagcatttgtattggatgtgaccgtcaaaatgcgccccatatcactgcaacacctacaagttttcttgcatggggtgctcagactttcacctctggcaaatattactgggaggtccatgtgggggactcttggaattgggcctttggtgtctgtaataagtattggaaagggacgaatcagaatggcaatatacatggagaggagggactctttagtcttgggtgtgttaagaatgacattcagtgcagcctctttaccacctccccacttacactgcagtatgtcccaagacctaccaaccatgtaggattattcctggattgtgaagctagaactgtgagcttcgttgatgttaatcaaagctcccctatacacaccatccctaattgctccttctcacctcctctcaggcctatcttttgctgtgttcacctctgaccagagacaaatcagatatgtgttcatctgctgtgggaacccctttatcccagaaagccctcttccttgtgccttatcaaacaggacaaatacgttctgttttatgtcttgaattgcattctaatgttattaaaactcatttattgtgttactattaaatgtggtaaaaacactaaaagtgtgtgtactggttattaattaatttttgaaaaatcattattcatgatcatggcatgaaatatattctctgtttttttttctttatttctgactgccactgagtgaaataatagttgacagacatgtctgaatggagttaaaatcagtggaagagagtcgggatcttttgcttcatgcaaaaacttggagtgaagcgttaatgataactgggaaatgctgtttttctttctctttatctaactgtgttgcacttatccatcatgtttcattgtactaatctatcctttgagttaatatcatttgaccttccatgctgggcttcattttggaattctcaccacatatataaataatcccgcattattagtgtgctcttctacattgaaatacacaaggtggtcagaacaatgctggattaattgaattttttttaaaaaagtaactaaatattgactcctacctcaaaacacacacagtcatttccaaatagattcaagtcctgaagattcaagtcctgatacaatattctcataaggatttcttaaccaggacaaaaattaacaattaaaaaaaattagttggtttatattcatgaggacttctgtgtttcaaaaaacatgatacaagaattgaaatgcaaacaattagtggagaaagatattcacccgaacatatataaaataaaatacaatacatgtgcatgatgaatacttaaaatgtattctaagtatttttccagattcttccagagtggcctagaataaactcggatggcagagtcaatgatgagattagctgtggaaatgggaaaccgttttttggaggacagtagtaatgctgtgaacttatgaaaacaaccaagtattcagtagcaactaaaatgtgtctccataacgttattttacaggtgcgtatctgaaatctgaaatttgggagaacattctactagtgttctctagtgagaaaatacagctggaaggaagaagggagggaagatgaaggagagagaaacaga

SEQ ID NO: 721227 - DNA, 2068 bp, Homo sapiens
taagaataagaaacatttctaaataatgatcttgataacagcatagcatttagggcacataatgtgctaattttgctttgaaaattggattgaaagaagttggtcttacatttggctctcagtatgtaagttttcaaaacatctttaatatctgtggttagcgttttgtctgtcttgtagataatattaatcatctctatactttattagaagttacaagcaaaagtgtccttgtgactttacgtttcctggtaaattaactgcttgatagaacaatttttgcttatctacacatgcctatgcatgttttctttctttctttctttctttttatttatttatttatttatttatttatttatttattttgcagtggatattactctgcctcataatgaagccaacagtcatatcttccgacgtggagatttgagaagcatttgtattggatgtgaccgtcaaaatgcgccccatatcactgcaacacctacaagttttcttgcatggggtgctcagactttcacctctggcaaatattactgggaggtccatgtgggggactcttggaattgggcctttggtgtctgtaataagtattggaaagggacgaatcagaatggcaatatacatggagaggagggactctttagtcttgggtgtgttaagaatgacattcagtgcagcctctttaccacctccccacttacactgcagtatgtcccaagacctaccaaccatgtaggattattcctggattgtgaagctagaactgtgagcttcgttgatgttaatcaaagctcccctatacacaccatccctaattgctccttctcacctcctctcaggcctatcttttgctgtgttcacctctgaccagagacaaatcagatatgtgttcatctgctgtgggaacccctttatcccagaaagccctcttccttgtgccttatcaaacaggacaaatacgttctgttttatgtcttgaattgcattctaatgttattaaaactcatttattgtgttactattaaatgtggtaaaaacactaaaagtrtgtgtactggttattaattaatttttgaaaaatcattattcatgatcatggcatgaaatatattctctgtttttttttctttatttctgactgccactgagtgaaataatagttgacagacatgtctgaatggagttaaaatcagtggaagagagtcgggatcttttgcttcatgcaaaaacttggagtgaagcgttaatgataactgggaaatgctgtttttctttctctttatctaactgtgttgcacttatccatcatgtttcattgtactaatctatcctttgagttaatatcatttgaccttccatgctgggcttcattttggaattctcaccacatatataaataatcccgcattattagtgtgctcttctacattgaaatacacaaggtggtcagaacaatgctggattaattgaattttttttaaaaaagtaactaaatattgactcctacctcaaaacacacacagtcatttccaaatagattcaagtcctgaagattcaagtcctgatacaatattctcataaggatttcttaaccaggacaaaaattaacaattaaaaaaaattagttggtttatattcatgaggacttctgtgtttcaaaaaacatgatacaagaattgaaatgcaaacaattagtggagaaagatattcacccgaacatatataaaataaaatacaatacatgtgcatgatgaatacttaaaatgtattctaagtatttttccagattcttccagagtggcctagaataaactcggatggcagagtcaatgatgagattagctgtggaaatgggaaaccgttttttggaggacagtagtaatgctgtgaacttatgaaaacaaccaagtattcagtagcaactaaaatgtgtctccataacgttattttacaggtgcgtatctgaaatctgaaatttgggagaacattctactagtgttctctagtgagaaaatacagctggaaggaagaagggagggaagatgaaggagagagaaacaga

SEQ ID NO: 721228 - DNA, 2284 bp, Homo sapiens
tctgagctaccagctgattgaatggtgcccactcacattgagggatgatggtcccactcagctcaccaactcacatgtctctctcctctggaaacaccttcacagactcacccagaaacaatgctgcaccagttccctaggtattggttaatccagtcacactgatacctaaaattcgccatcacaccatagagatgtaattacacctctctgagtttaacmaaaatcctactatatgttagttcagagtttgggtatccctaggagaagttaatataatccacgagaaaataaaaaggccccatatctttaattatgtttttctcttctattaaaccaaaattggtttaattgctgtttttttgtttatttggttggttgattggtttttctattttgttttggtttggttttttattttactttaatttcatattattttaagtcctaagataaatgtgcaggacatgcaggcttgttacacaggtaaacatgtgccatggtggtttgctgccccactgttgtgtctctaaaaatatgccataggaccctctagccatcttctcatatttccttggccaaggcagtttttcccagtctttcatactcagcagttacatgaaagaagaataggaacaactacaatttattctaggccacttagaatcaaacccaatttccagatcaacattcagaaaacgggaaattgaatagattggtattgtgttacagacaggaaataaaagtataaagggttgtgagtcatctagtcagtaatatctactgtaaagccgagagactctctctgtgtgagatttttatttttgttacagaataaatagtgtgctgtgttttaatgaatactgtcaagagaagaaaatagggctatcaggtatctccacatgttccgaaacttttcatcgacccagaccccaaaatgacatgttgctctttcttcctcagaaacatgaattctggaatctcgcaagacttccagatggaaattacctgccccatctgcatgaattacttcatagacccagtcaccatagactgtgggcacagcttttgcaggccctgtttctacttcaactggcaagacatcccaattcttactcagtgctttgaatgcatgaagacaacatggcagagaaacctgaaaactaacattcatttgaagcagatggcttcccttgccagaaaagccagtctctggctattcctgagctctgaggagcaaatgtgtggcactcacagggagacaaagaagatattctgtgaagtggacaggagcctgctctgtttgctgtgctccagctctcaggagcaccggtatcacagacaccgtcccattgagtgggctgctgaggaacaccgggtaagtgatgcctctgaagatctatttctataaatgacacatgaaattcctgtgggtctattttcttggagattgggtaaagccaaacctgagtccctttaagcagctcacttttgggctttcttagcttcaaacctctgagatttgacgaagaagaagggaaatagaagaaatgccatttcctagggacttacttgtctctcattctcagcccgctccctatgaaacggtctgcatgttactttattgttttcactggtgattcaatttatggctcttttgcaggagaagcttttaaagaaaatgcagtctttatgggaaaaagcttgtgaaaatcagagaaacctgaatgtggaaaccaccagaatcagccactggaaggttagttctgtactactctaccttctaccttctccaggaacttatggtgggcaaatgggtgactcttaaaataggaacttgttatcaaactctaatgtttctgggagtcaataaaaaaaaaaaaagaaaacactgagaaaaagtgacctcatttcttatatagaatagtatgactgttagaaaggatttctaagaaaactactgaagtcacccaaagcatgctggtttgttttcatacaaacctgtagctatacaccaacagataccagaaactgggccatctcacagcattctatatgtgctggttggataaatgctgggcacaagattcatttggcagtcatggaaagctcaagtgaaccttctgagcctgggtcagcattaatctgaatgctggtggacaagtagtatttggaattgtatggaaaatttgaggcagaaagagtgacaggggaaatctagggcaaccatgaaattaagaatctcaactaattaatattgaatactacataacatatgatgaga

SEQ ID NO: 721229 - DNA, 1694 bp, Homo sapiens
gttgaattagaatttttttttttcacagtgaatgaactaaggaattttgtgcaactgtgtaatttaaaaagacagcttttttaacttgcaaaaacacattatgatagaggttataaagtttattattatttttattttcagtaaatacctttctatccagatgtaagtctttatcttaagtgaagtcacattaattcacaatcaataattatacctaataatagaaaaacacatggtaaaactaaatgccattaatttataacatgttcctttaaaaagccatcctttgaagtttgtttcagaattaaaataggattacaaagaaaaggcaaaaaagaaatattcaaagttgaaactcaggcctggcactgtggctcatgcctataatcccagcactttgggaggacaagacgggaggacggtttgagcccaggagcctgagacaagcccaggcaacaacatggtgagaccctgttgctgcaaagaataaaaaaattagctaggcatgggagtgcatgcctgtggtcccagctgctcgggagactctgaggtgggaggcttgcttgaacctgggaggtcgaggctgcagtaagccatgattgtgtcactgcactccagcctgggtgacggagcaagatcctctctcaaagaataaaataaaataaaataaaatataaaaaatggaaactcaatgaaatcttttgtctccattgataacactttgcaagagccacttttagaaaaacattggcaatttaatgttygaatttgtggaaatccattcattatgcaattaaatatttttgacttttcaaaaaatgtttttcactacaaagtttgaattatctgtgggaaataaatgatatgtacttgaaattcatagattatcaaaaccaataattttaattttctttcatatgaaatctttagaaaaataaattgaaaaaatttaatattaaacttactttcttatctaaccctgtacggttgtcataaaattaaaagagataatgcaatatgaacccaagtgttttactcaagttgataataaattgtagtgaaaaaaaaagttgcggttaaataaattagggaaattctggattgagtaaaattagacaggcttttctttttaaaatattgcagaggttttaaaatgctaatagacagtaaatgaatatctaagagataaacaaaacatatttcccaacaggtgttatttgattatagaatatttattctcagagtatctgtcaggtctagcaccctacgcatattatatagctattttttttttaatttagaaatctgtgaacaagaaaaaagggacctagatgacatacaaactgttaaatacataatcattgtcaagtgtggtggtccttagtgccacttataaatatccagttctcctctctctcccaagatatcaaatactgaatttcctagctgatgagttttgagtggaagtcatgtgagtcacttctaggctgtagcatttacatgccaaggcacactccttagagctctttttcccttgaccaccacttttggtggtgatattccaggtggtggctacttgtcagcctgggtcccagagtgaggagaccagatcaccacagcagactcttaactggcatacagtagaagcaagggggaaatcttgattgttttaagtgctgagttttggggctgtt

SEQ ID NO: 721230 - DNA, 633 bp, Homo sapiens
tatctttctttttgttgtctagtttacccttctttctgatagaaagtaaaaacagtggagcatggaaatatatatttttaaaggtctaacagcttaactagtagtcatgctcatatttttattttctttttattgtcttgctctgactgagcattaggacagaaattaattgatttcgcaaagtggcgtatgccaccaccacccaccaccccaaagcaacaacaaaaacaaaattttttcataggcttgtgccactggttttgaatagagttcattagcaaatgtaaactttgtcttacagtcatatttaaccattgccttataaattaaaaccaagacattattaaattcttrgaaaaaaagatataaaccatttgcttagttaatagttccccctttccttcccaagataaaaaacaaaaaccaaacatttttgtgttgctataaattgcaccagtgcatcccttttgatggtgttgtgttgcataatatgtaactacagaaactaattttgcaaacatgcaagaatgggatatttgcaaatagctctgttctggatattaagcacaaagtgaattaagttattgaattccgtttaagcagcattaaccttgttttaagccttttactttc

SEQ ID NO: 721231 - DNA, 647 bp, Homo sapiens
tgataatcatgtaagaaagcatcagaatcagaatatctcttcagaatctcatctgatggatacctgaatccaaactgcaaatacgtacttttctgcttagtgactagttgaatggctttcaagattgatgtgycttattactgagtggacaatcctaaacccaaaagcacaaacaggtggtattttactctgcccaaattcaaagctaagtatcagtgtgaatcattctgtactgcaggcaggaacactgagagagcatttctgtcctctgaataccaaaggtgatactcagggaaagcagagttaaaggtgaaggctttactgataacatagcatgttggatacataaagggtgggcaatacttgagagtgagtgcttttcaagtaaaaacaagaaaatggggaaaacagtcaaaaaaagaataaattatcagagaagtggcatgcatagcaaaacacaagtgtcagacaaatgtcaaaaatatgtggtgctgattgagtctgccagtggtgagagatggagttaacaattacgttgggaacaggttatgtacaaaattctgtgtaattataattagtgttcagggtatttactatcacttcattccaatgcttaaaactgttcaatggttccccctgactcattt

SEQ ID NO: 721232 - DNA, 647 bp, Homo sapiens
tgataatcatgtaagaaagcatcagaatcagaatatctcttcagaatctcatctgatggatacctgaatccaaactgcaaatacgtacttttctgcttagtgactagttgaatggctttcaagattgatgtgccttattactgagtggacaatcctaaacccaaaagcacaaacaggtggtattttactctgcccaaattcraagctaagtatcagtgtgaatcattctgtactgcaggcaggaacactgagagagcatttctgtcctctgaataccaaaggtgatactcagggaaagcagagttaaaggtgaaggctttactgataacatagcatgttggatacataaagggtgggcaatacttgagagtgagtgcttttcaagtaaaaacaagaaaatggggaaaacagtcaaaaaaagaataaattatcagagaagtggcatgcatagcaaaacacaagtgtcagacaaatgtcaaaaatatgtggtgctgattgagtctgccagtggtgagagatggagttaacaattacgttgggaacaggttatgtacaaaattctgtgtaattataattagtgttcagggtatttactatcacttcattccaatgcttaaaactgttcaatggttccccctgactcattt

SEQ ID NO: 721233 - DNA, 1168 bp, Homo sapiens
tggctctatcatgaagggtggggccgtggctgctgatggacgcatcgagccaggagatatgttgttacaggtatcagtgcccatcctaggcggtggtgtggatagagggcagggaggtgtcctaccatctgtaccctgctccttcagaggccccttcttggttgggggaagactccctgacctaccaagttgagttcccttttcatcctccccagcacagctgtttatcccactcctggtcctttcccaggtaaacgagatcaactttgagaacatgagtaatgacgatgcagtccgggtactgcgggagattgtgcacaaaccggggtatggatggaatggggcactgggcaaggggcttggtctggcctatacgcatcctgccttcactaggacacccttgttttcaggcccatcaccctgactgtagccaagtgctgggacccaagtccacgtggttgcttcacattgcccaggagtaagtggatgggagactcagtcctaaagctggtgcttacatacatgagcactgtctctcctttcttctctcacccagaacccccatatctatcctgttgggcccagcagtgggtggggtgggtagcccatgactcctcatcctccctgcaggcgagcccatccggcccattgaccctgcggcctgggtctcccacactgcagccatgaccggcaccttccctgcatacggcatgagcccctccctgagcaccatcacctccaccagctcctccatcaccagttccatccctgacacagagcgtgagtgtcccaccctgtctcctgggcccagcagacagggccaggtggggggactgatgagggtccatgtggagactcttgcttgagcatcagagagggctggagatggggctcggctcattccagcaaccycacactgcaactcccccacagcgggcactccaaccctcactaaacagtgtttgcttctgaacttgtatgagcacccagggcgcctcagtttcctcttacaaaatgggactcacgatataaactttaccaggttcctgtgggtttaatgagaggatataagtgaagcaccattgcgatgtgtggtgtaaagtaagcattcagtaaacggcagccatttcgattatcatcacatgcacatcgtacactggccaagcac

SEQ ID NO: 721234 - DNA, 628 bp, Homo sapiens
gtaacatagcatgaccccatctctataaaaaaaatcttaaaaaaattagctgggtgtggtggtgcacacccgtaatcctagctgcttgggaggctgagcagggaggatggcttgagctcagggtttgaagckgtagtgagctatgactgcaccactgcactctagcttgggcaacacagtgagaccctgtcccttaaaaacaaacaaacaaaaaacaaagcaatgcaggaattctacacacaaatgaacaccaatgaaccactgtgacataaatgaatctcacagacacagtgctgagcaaaagacaccatttatacaaacaggcgaagccaccctttggtgttagaagttagagaggcttcccttggaaggggagtggggaattgtgggcgtggctacaggaagggttcaggctgttgctcctgctctattaatatttcttgagtgttggttactcaggtgtgttcattttgtgctaactcattgagctgtacacttatgatttatgcactcgcctgtattgatgttattttcaataaaaagaggtgttttctatttttttttaagagcaatgtgaagtgtttccattatggagatttcttattgacatatgagctggacaagaaaa

SEQ ID NO: 721235 - DNA, 628 bp, Homo sapiens
gtaacatagcatgaccccatctctataaaaaaaatcttaaaaaaattagctgggtgtggtggtgcacacccgtaatcctagctgcttgggaggctgagcagggaggatggcttgagctcagggtttgaagctgtagtgagctatgactgcaccactgcactctagcttgggcaacacagtgagaccctgtcccttaaaaacaaacaaacaaaaaacaaagcaatgcaggaattctacacacaaatgaacaccaatgaaccactgtgacataaatgaatctcacagacacagtgctgagcaaaagacaccatttatacaaacaggcgaagccaccctttggtgttagaagttagagaggcttccctyggaaggggagtggggaattgtgggcgtggctacaggaagggttcaggctgttgctcctgctctattaatatttcttgagtgttggttactcaggtgtgttcattttgtgctaactcattgagctgtacacttatgatttatgcactcgcctgtattgatgttattttcaataaaaagaggtgttttctatttttttttaagagcaatgtgaagtgtttccattatggagatttcttattgacatatgagctggacaagaaaa

SEQ ID NO: 721236 - DNA, 654 bp, Homo sapiens
cccactggtgtgcagaagtaactggcatgaaagtacgttagaattcaccacccacctgaggtaagcgaggcatttaaaaatgcatacctatttcaagtaaaaacagatgccycattgtcatttctgtgactctcacagtgattttgtcttcaagctgtctttttttcctctaaggaactgaaggcacaatgacctgggattgtcagtgttctctactgtgtccaaactggatgctgttcagagaagggctcatcatccggggcccagcagtcttctcccccgacaactccagcttttctgcactgcccattctctgcccttttttgcactcaccttaaattgtattccaatatccttacacgtgattttatatgttcttatatcacggtgtgtatgtgtgtttcggcttatgaaagacagagatacagatacagagaacgaggaagggagagaaggaatgagagagaaagagcatgagagagagaataagagagagaatgagagagagaatgagggagaaaatgaattagaccacaaaagcagggcatagaccacgaggatgtttatttgcctgctggctaaggcacctatattttctagggcagaataacttttcatgtgttttgagcgggggagggaggcagtgaacagtag

SEQ ID NO: 721237 - DNA, 730 bp, Homo sapiens
taatcccagcactttgggaggccaaggtgggtggatcaccttaggtcaagagtttgagaccagcctgaccaacatggtaaatccccatctctactaaaaatacaaaattaggcctgtaatcccagctacttgggaggctgaggcaggagaatcgattgagcccaggaaccggatgttgcagtgagtagaaatcccgccactgcactccagcctgggctacggggcgaaattccatttcaaaaaaaaaaaaaaaaagagagagacttccacatgaaactgggtttatatcctggccacatgatgatggtcatataatctaacctaacttccctaagcctcactgtgaaatgggaataatacaatactattccatgaggattattattctgaggattaaatgatctaatatgtataatttgttactatactcccatgacattatcacattatttgttctttttttgtatgtcttggcaacttacaggkcactgtcaaaatttttgccaaatatatccaaaatcaaagaattataatgcattccatccaaggaccaataacagtcctccactggcacaagtaagtgagaactaacattctctaaagaatatagcacgtgatgggaaatgtagcttaccagcttatgtttgctccttcctcaaaatattactgggttatctgtcaggaatgggcataggctaccttggtcccaaaaatgtcaatcttaacatta

SEQ ID NO: 721238 - DNA, 809 bp, Homo sapiens
tgtgtgatgaggtccaaaaccaaaggtagcagtgatgtggatcctgaagacagtctctcttctctggcagtgtgatggggaaagaacaaaggaaccagcttgtccctgtctcttgtgggggaggcagygtccccagagtgagaggtcgaggggcactcctcatcactccattccccagagctgccccttccctgtccctgggaagctccagccagctacaagccagctgctgtccagaggcacggcactgccacatggtggacactggtggtactgaggtccagccttccaattaggaaccctgtcgcctagatctaatagtctctcttgacagcccccatcatctaaacagaggggagatgagcaaagtggagtaaagacacatttccaaatcacacccacttcccccacagctttctccccatcaagcttcttggagaaattggggcataaggagaaaagctagcatgaggcccaccttcatgaattcaatgtggaggggtctgggtccccccccatttaaagccagtgaggactgggtgtggtggctcatgtctataatcctagcgccttgggacgctgaggtgagaggatcgcttgagcccaggagcttgagaccaccctgggcaacacagcaagaccctgtctctacaaaagaataaaaaataaattagcctgtgtggtgtggtgtggtgtggttggtgtggtggcacgcacctgtagacttagctactctggaagctgaggtggaagaatcacttaacccaggaggtcaaggctgcagtgagctgtgatcaggccaccacact

SEQ ID NO: 721239 - DNA, 617 bp, Homo sapiens
agaagagcacaaaaagcatctgctacatgaggtatgtatgtatcaggtccagtcaaaagacagaaaccacacagtaacttgaacaggaagtgcttaaaataaataattattattatggaacataggtttctaagaaaagatgaaagaacatcctgtggtggagaaagggtacccaaggaaggaataaatttggaaagtttccaaggctaggatacagactttctgaaaaaggggtagacatagcccaatragaggtttgctgggttgcctggataagaagtggtccattgtcactggactgaggccagagggaaatgcatgctgggcaaacagcaaatccacccagaggttcaagtggaccaaggttggtgtgagaaatggctctggtgttcaacacaccactggtcactctgtaccacaggagccaatcaaagaagcaggacacagaacccacgaaaaaagccctttcctctgcagtgtctctccagcaccctctactgacaaagaggaaatatttacaagatccagttcagtatcacaagcagtagtatcacaagcagagcaatgaagggtagattctgaccactgacacaaggaaatactatttacataagatc

SEQ ID NO: 721240 - DNA, 1595 bp, Homo sapiens
caagtggcctgattaataagatgttgctcatatacaatcacaacctatcttattaaactaatcaaacggctacatcaaatacaattatacatcctaattaggaagcccacaattcacgtatctactgaaagcaaagactatggccttctcttacagatgtctacttctccttgtaccctttacagcctacgaacagacttcaactgtatataaaattatcttaaaggaatctgctttaaattgcatgtattgctgactctcctgtgtgctttatttaaaaggaagcaagacttggactgacaaagtttctagtcttttacaatcaggattgctttggactggactggagaaagtgaatacctttcagtaatgctgccactactgccttgtgcatgagcaaaacgtttacatgataatgaaggtcctactaaccacagaagccatctccaaattccttttcaacctaacacttcaaatatcactgccaagcgctaaaatatgacacataaagaaaaacttattagttttgaatttaatgtcaccaaatacccctttctggctcttaaattcggttttaatttatttcaaatcttcatagcttcttttagataaatgacatttcttattttttttttttttttgaggcagagtctctctctgttgcccaggctggagtgcagtggtgcgatctcggctcactgcaagctccgcctcctgggttcaygccattcttctgcctcagcctcccgagtagctgggactacaggcacccaccaccacgcctggctaatttttgtatttttagtagagacagggtttcactatattggccaggctggtctcgaactttgggaggccgaggtgggcggatcatgacgtttctacttcaagctaatccttgaaacaaatttagatttaacttaaataagcttctcaagcacttttcaaattgctactaaaacactcatgaaaagatgtggaaatattcctgtctggctcaccttgcatctgtttttcttaaattataactattaataccttctatcccaatcttttaactagttatctggcaactgaataatcatttcaatctgggaccatacattccctagttatcaactcatcctattagagaaaaatatcttaaaaacttagctgtactttcctaaatagctcctcaccatctcaattattctgaaaagggaaggaggagtgttttaagtgtgattgttcatatataaattttgtctgtctgccttagagtagcaaaaatgtatagtctaatagatcatgatctgaagaaaatgtacaaaaagagataattgccagcttcagttttataggtaagtacagaggttggcaaactacacccatgagccaaatgcagctgaccacctgcttttgtaaataatgctttattggaacacagccatgcttataattttctacacaatgcctatgactattttcacatttcaagagcggagttaagtagcaacaacagagacaaaatgactcacagtgtaaaatatttacagtgtgggcttttacagaaaaagtttgctgactcctggtttacaacaggaaaagtcaat

SEQ ID NO: 721241 - DNA, 1595 bp, Homo sapiens
caagtggcctgattaataagatgttgctcatatacaatcacaacctatcttattaaactaatcaaacggctacatcaaatacaattatacatcctaattaggaagcccacaattcacgtatctactgaaagcaaagactatggccttctcttacagatgtctacttctccttgtaccctttacagcctacgaacagacttcaactgtatataaaattatcttaaaggaatctgctttaaattgcatgtattgctgactctcctgtgtgctttatttaaaaggaagcaagacttggactgacaaagtttctagtcttttacaatcaggattgctttggactggactggagaaagtgaatacctttcagtaatgctgccactactgccttgtgcatgagcaaaacgtttacatgataatgaaggtcctactaaccacagaagccatctccaaattccttttcaacctaacacttcaaatatcactgccaagcgctaaaatatgacacataaagaaaaacttattagttttgaatttaatgtcaccaaatacccctttctggctcttaaattcggttttaatttatttcaaatcttcatagcttcttttagataaatgacatttcttattttttttttttttttgaggcagagtctctctctgttgcccaggctggagtgcagtggtgcgatctcggctcactgcaagctccgcctcctgggttcatgccattcttctgcctcagcctcccgagtagctgggactacaggcacccaccaccacgcctggctaatttttgtatttttagtagagacagggtttcactatattggccaggctggtctcgaactttgggaggccgaggtgggyggatcatgacgtttctacttcaagctaatccttgaaacaaatttagatttaacttaaataagcttctcaagcacttttcaaattgctactaaaacactcatgaaaagatgtggaaatattcctgtctggctcaccttgcatctgtttttcttaaattataactattaataccttctatcccaatcttttaactagttatctggcaactgaataatcatttcaatctgggaccatacattccctagttatcaactcatcctattagagaaaaatatcttaaaaacttagctgtactttcctaaatagctcctcaccatctcaattattctgaaaagggaaggaggagtgttttaagtgtgattgttcatatataaattttgtctgtctgccttagagtagcaaaaatgtatagtctaatagatcatgatctgaagaaaatgtacaaaaagagataattgccagcttcagttttataggtaagtacagaggttggcaaactacacccatgagccaaatgcagctgaccacctgcttttgtaaataatgctttattggaacacagccatgcttataattttctacacaatgcctatgactattttcacatttcaagagcggagttaagtagcaacaacagagacaaaatgactcacagtgtaaaatatttacagtgtgggcttttacagaaaaagtttgctgactcctggtttacaacaggaaaagtcaat

SEQ ID NO: 721242 - DNA, 578 bp, Homo sapiens
tgataaaactatgtaatraaaaactgctattattacaccatattaatattacactgacactgagaactgaatcaagagcacttcaatcagttagaaataaacatttatcagatctgcatatttttaaattatgaacaagtcaaaattctaatacttcttattaatttttctttattttctttattgatttaatgaatcacatattcacatttcacaaacatttactgaatgcctactctaggccaggctgcactgcagtgaacaagtctaagcatggcaggcatgttttaaacagacattttcaaccaagttcagatctaacccagcatggagggtagaagcatcagaagaggatgcctggaagaggtgacgttcaacagtaagaattggcttgttccagggctctggctcccaggggtctaacagagataaacatcattagcttttctcctctaagaggtaaacggagtctgtctctgatgctatgtcaaagaccgtgaaattgggtcaaagtgaaaccactttctaggctagctgtaaggactgacaaacagggtggagcacaggtgatgggcaaa

SEQ ID NO: 721243 - DNA, 2157 bp, Homo sapiens
gccttcagcaagaaacctgtcaagcagtttagccagaatcccccatagccttaatgttttctcttagtaatccactgacccccaccctaaacctactccttagctatrcattttcacttgtccttgttgttttcagagttgaacctgatctctctcccctactgaaaagcccccattgcagtagtcctttttgaataaagtcttccatattgtctctaacaaatgttatgaaaaaattttaacagggtagaggtcccttcttctgaacacactgggatggagatcctgccttcaaagctataccaggtcagcattgccttttcagagctatgccagttggagatcctattcccagagctctgccaggtaggggtcatgaccccaaggcttctggtagctgtgccccaatagctttgtcaccccaaaccgtggggctgtctgacatgttgaaactgaggagatggtcccactactttgaaactgtggaggcagtcctgattatctctgaattatcttcagtataaatcttatcttattttcaaacactgcacgtttgtggccatagtattccatagttctgtcttataaaattaaggcatttgacagtctttcttcattctgtcctatctccttccccttcagttaaaactggcagtgtttctgctgagtggctgattaggatagtggttcacacatgcagtaatctgcttattaaatgatcacgaagcccacactcttagagttcttttccgaacatgtgttctcattttttaaaatacagataggctgagaattttccaagtctttaagttctggtttctttttgcttaacaattccttatccctctacccccctctccccaaacaaatattcgaagatcaattccatcttcaattcatttggcttctttcatttaacaataagctgttaggaggaactaagccaccacttaaacactttgcttagaaatctcctcagctaattataaaatttcattattcccaaatttcacctttcacaaaacattagaacatgaacaattcagccaacttctttgctactttataaaaaaggatcaccattccttcagtttccaataacatgttgcttatttttgtctgagaatggctttgactatccatatttctaccaatattttattcatgagtatttatatattctcaaagaaaatagagacttttatttccagctgtgttttctttccaagccttcacaagaacagcctttaaaacttccttcatggcaatattgactttttccagcatgtacctccaaattcatccagcctctactcatttcccagttccaaaaccgcttgcacatttttaggtgtttgttatagcagcaccctacctgtcagtaccaatttctgtcttagtttgggctgctataaaaattaccatagactgacaaacatttatttctcatgattctgaaggctggaagtctgatgtcagggtgccacatggtcaggttcttagggagggccctcttcctggttatatcctgacttgacctttccttagtaagtgcacatagacaaaggggatcttgtgtctccttttcataagggtgttaattccatcaagggagctctaccttatgatatctaacaatatcgacctcccaatggccctgcctccaaataccaccacatgacgattagggtttcaacataggaattttggggaatgtatctgatccataagttacctttcaaatatgagctctagactcctgctgtttgtattccatatctggcttgttacaatttactcatttgttttgtctcatacagaaatagcaaaagtaggatttgttctcttaagagcaaggtttgtgtatttcctactgagaagtttgccagcttcctcctcgttcagttttatccccaaaatgggtgaaaaccagataataaaaactggccactcttgaacagggtattcagagttcccgaagaaaaatgttttgcatcccaacgagcctgtgatcacagacaaatctagacccaggctttagaatcaatccacacaataaggagagctgactcaatgattttgcacttactatatgtcaacctgctcttccttactatgtcaatatctactaatttgaggtttatcaactcccctttt

SEQ ID NO: 721244 - DNA, 669 bp, Homo sapiens
caagatggtgaaaccccgtctcaactaaaaatacaaaaattagttgggcatgctggcggatgcctgtaattccagctacttgggaggctgaggcaggagaatcacttgaatccaggaggtggaggtcacagtgagccgagatcgcgccactgcacactctagcctgggcgacaaagcaagactccatctcaaaaaaaaaaaaaaatgcattttttaggtagaaactacaactaggtttagggttttgctgaaaaacagtagcatgtggagttcacaaactatggcctttttttctgctaaaatggccaggagattgaaaagtttgaggatcacatgtacaaaaccaaaccataaaaatctatgaacatgccaaatgcagtcgggcgcagtggctcacgcctgtaatcccaacactttgggaggctaaggtgggcagatcacttgaggtcaggagttcaagaccagcctggccaacatggtgaaaccccatctctactaaaaaatacaaaaattagctgggcatggtggcmtatgtccataatcccagctacttgggaggctgaggtaggagaatcacttgtacccgggaggcggaggttgcagtgagctgagatcacgccaccgcactccagcctgggtgacagagtgagactccgtctcaaaaaaaaa

SEQ ID NO: 721245 - DNA, 988 bp, Homo sapiens
tgacgagaaaagcccagaataataacgtgacggtattattacatgtttcttaaagaaataagaaaatgacaaaaagtacaaaagctaattcaaaagtctttatactttgacaaaaagtacaaaagacacactatgtgtgtctctgggttttatgaatatctacattgtttatgaataaaataagaaaattctttgctttcattgaacccttttggtgtgacctgctattctttcataagtttgggttcagttttcttttgtattttartattcctcttccctatggatgtatgattccgaatttgatatgtggaagaaagaatcacgcagatgtctagaattcttatctcttctcccagtaggtttgtttttaattcactctcccacacttgtacttctaacctccttaataaaaatgaaatccctttttattcattagcattttaatagaaaaagaagactacaataatagtatagtctatgtccatatgctatgttaaataggacagagcattccataattcccagaagaaaagtttcatgcagactaaatacagcattttgattgtatcagcactggatatgatactactttctatccacaaagcaattatggttaagacacctaaatttctaaaattaacatgtgattattttccctatgttgtaagactatatggcatttccaaaattctttgaactattatgaggcataattgaaatataactattttagatctaatgaaatcttaaagtaaaacagccattgcagttctccctcaggctatacagggctgtgtcagccaacccaacaacgctccaaatgtattaccttggaaaagctaatatattaacgtgtttcaaaatctgtctttctctttgaaaagcatatgtatggaaagcttcttgtcaaacacattgtagtttacaatggccatcatgagtcaaataaattgttcaactatgatccattcaatgatcctctaag

SEQ ID NO: 721246 - DNA, 625 bp, Homo sapiens
ttaaatgcagtaagccaaacacagaaagatcaatactgcttgttttcactcacatgtgggagcttaaaaattggatctcatgaaggtagagcatagattggtggtaccagaggccaggaagggtggcaggaggtggcatgaaaggatagaaagagtataaatataattattaccactgaactatacacttaaaaatgacaaagatgattacttttgtatgtatattttacctcaataaattttttagaaagcatactattgcaaaatcttaatagataagatgaatttatgaagtgtgtcaaaatgaatacttatacttttaaaatcttgaatttgtaacatttttttgaagagaaaaaggagcaaatcttctttcttaggtttttggggttttgctaatctgtagagcaatagcctcaacactcctacataaaaagggggttggggagggggaggggagaactgcttcaaattaaattctcccttcagagttacatggtacaaattagtatattagcagctctgagaagacttacaatraaagtatctttaactttgttcaacccagtttgttgaattctatagacacaatatagagtttgatgtactaaggtttttttttata

SEQ ID NO: 721247 - DNA, 768 bp, Homo sapiens
attcatgcctgtaatcccagtactttgggaggccaaggaaggcgaattgcttgagcccaggagttaaagaccagcttgggcaacatgtcaaaacctcttccctactaaaaatacagaaaattagtcaggtgtggtggtgtgtgccagtagtcccaggtacttcggaggctgaagtgggaggatcacttgagcctggggaggttgaggctgcggtgagccatgtttgcaccactgcactccagccagggcaataaagtgagacccctgtctcaaaaaagaacaagaatgaaagaaaagaaagttaacaaagatactcatttgataatgtggtaaaatatgcttataatagttacctcagttgactccagttcctctccttccttctttcctttctttctttttttctctttatatatatatrtatgtgtgtgtgtgtgtgtgtgtgtgtgtgtgtatgtatgcatatgcgatgtatcatatcacacacacacatatacagttgtcccttggtatccatgtgggattggttccaggacctctcttgggtaccaaaatgtgtggattctcaagtccttgatataaaatagtgtatttgcatataacctgttatcctcccatatactttaaatcatctgtagtttacttagtgcaatgtaaagtctacataaatagcttttatattgtattgtttaggaaataatgacaaggtctgcgtacatgtttagtgcagatggaattttttagtatttcaatttgtagttagttgaa

SEQ ID NO: 721248 - DNA, 768 bp, Homo sapiens
attcatgcctgtaatcccagtactttgggaggccaaggaaggcgaattgcttgagcccaggagttaaagaccagcttgggcaacatgtcaaaacctcttccctactaaaaatacagaaaattagtcaggtgtggtggtgtgtgccagtagtcccaggtacttcggaggctgaagtgggaggatcacttgagcctggggaggttgaggctgcggtgagccatgtttgcaccactgcactccagccagggcaataaagtgagacccctgtctcaaaaaagaacaagaatgaaagaaaagaaagttaacaaagatactcatttgataatgtggtaaaatatgcttataatagttacctcagttgactccagttcctctccttccttctttcctttctttctttttttctctttatatatatatatrtgtgtgtgtgtgtgtgtgtgtgtgtgtgtgtatgtatgcatatgcgatgtatcatatcacacacacacatatacagttgtcccttggtatccatgtgggattggttccaggacctctcttgggtaccaaaatgtgtggattctcaagtccttgatataaaatagtgtatttgcatataacctgttatcctcccatatactttaaatcatctgtagtttacttagtgcaatgtaaagtctacataaatagcttttatattgtattgtttaggaaataatgacaaggtctgcgtacatgtttagtgcagatggaattttttagtatttcaatttgtagttagttgaa

SEQ ID NO: 721249 - DNA, 1007 bp, Homo sapiens
ttccttttcttcattacgggtcatattttcctgattctatctgcctggtaatttctggctggtagtgtgaagtggagtgtaacctggcatggggagtgatgctgggggaggccctctgggatcagagtcctgggagaatcctggacagacggctttcttcatgtgccccccttggtgctccttgtcctgtgcggtaccatctgtgtcagatcagtgtcaccactgtgccctgctctgtctcatgtaaacggcacacacttctccccggtggcacatggtgttcttccgtcttttcttccgcccgagcccaccttctttaaggcctccccatgaatccctcagagcttctggcacaaygggacacacggtgtgccccaaaggtgcttgggaaatgaggggaggtcccaggctcgcccttccgctgggcccagcctgagtgggctccgatccttctcaaactcttaagtgtgtcctgagggccggctggcggcagcagggggatgctgagaacactgggggagtggctggcttctgtctgcacctctgaacctctgagcaggctctgcgatcttcacaggtggacccgtctgtacaccatgtgcaccccgatctgcacaatggcaagccccaggagtcacagggacggctgggggctgcaggaggcactcatcatgtgggggcggagccccggaggaccaccagcaacacgaggagggggcggagcagacatcatggtgggcggagccccggaggaccaccagcaacacgaggagggggcggagcagacatcatggtgggcggagcttcggaggaccatcaccaacacagaggggcatgcacacattgtagggggtgcacacatcatgggggggtaggggtggagatccggaggaccgccagcaacatccatggccagacgtggggaggggaagggagtagaggaatgacccctcaaaaacacagggaactttcatctctgggaagttatcgccagggtaacgatggaa

SEQ ID NO: 721250 - DNA, 1137 bp, Homo sapiens
cgatgccccagtcatccaaggggtgtttatggggcaggtgctgcgctgggtgctaggagagtgaccacagacagtagggaccacctcacccatccttcatgtggcctgggagacagacattaaacaaatgaccgccccatcaccatgcctaaacacacagaccctgggagcccctgacctggcctcgctgcaggcctcggaggttttccctccccccaggagaagatgcacaggacacagctgggcagcgggtcctggaggtgacgtgagggggttaccgcgttgcaggtggagaggctggaaaagcccgggtgtctgaggatgcacrggctaccagtatgactgaggtcagtgatgggggaggggccggatagggaaaggccccgctgacggcatgcagagaggtcagtttgttttgagatccagaagccaccagccgacgttaagcagcagtgactggtccagtgtgctcgctttggggacaggcctggcaagaggctggaagtcggggaggcgagtggaagggggtgggtttgaccagggtgccaatacggagatggggaggaggagactgcagcactggccagaggctgagagaagaaggggtgaaggaaagcaaactctagaaaagaaggtttgggatgagtttgaaaaccctcaagagaggcaggggaaagggacgaggaggccagtgagggtggaggatcgggggaggggagaggagatggcggccacctgggtcaagctcctgggggtcggccagcacgacttccacggaggagccaccgagtcaggagcatgggccctggggagccgtggagagggaggagcttccctgtggtgggagaagagcactggcaggaggatgagggggacagggaaggtcacaggtggcagcaagaggaggtggctagccaggctggaggggcagatggggtatggaggggatcccagcatgtccagccttgggggcagagaaagagcagtgggaatgtggcctcacttcccttctatgtgcccggagccagctcccacgctgggttcaccatggacccaggagtggcaggttccccgtgctggtgatgctgagagtctctgattaagaggctgggaaaggaacgtgggactgctcgcagg

SEQ ID NO: 721251 - DNA, 1137 bp, Homo sapiens
cgatgccccagtcatccaaggggtgtttatggggcaggtgctgcgctgggtgctaggagagtgaccacagacagtagggaccacctcacccatccttcatgtggcctgggagacagacattaaacaaatgaccgccccatcaccatgcctaaacacacagaccctgggagcccctgacctggcctcgctgcaggcctcggaggttttccctccccccaggagaagatgcacaggacacagctgggcagcgggtcctggaggtgacgtgagggggttaccgcgttgcaggtggagaggctggaaaagcccgggtgtctgaggatgcacgggctaccagtatgactgaggtcagtgatgggggaggggccggatagggaaaggccccgcygacggcatgcagagaggtcagtttgttttgagatccagaagccaccagccgacgttaagcagcagtgactggtccagtgtgctcgctttggggacaggcctggcaagaggctggaagtcggggaggcgagtggaagggggtgggtttgaccagggtgccaatacggagatggggaggaggagactgcagcactggccagaggctgagagaagaaggggtgaaggaaagcaaactctagaaaagaaggtttgggatgagtttgaaaaccctcaagagaggcaggggaaagggacgaggaggccagtgagggtggaggatcgggggaggggagaggagatggcggccacctgggtcaagctcctgggggtcggccagcacgacttccacggaggagccaccgagtcaggagcatgggccctggggagccgtggagagggaggagcttccctgtggtgggagaagagcactggcaggaggatgagggggacagggaaggtcacaggtggcagcaagaggaggtggctagccaggctggaggggcagatggggtatggaggggatcccagcatgtccagccttgggggcagagaaagagcagtgggaatgtggcctcacttcccttctatgtgcccggagccagctcccacgctgggttcaccatggacccaggagtggcaggttccccgtgctggtgatgctgagagtctctgattaagaggctgggaaaggaacgtgggactgctcgcagg

SEQ ID NO: 721252 - DNA, 588 bp, Homo sapiens
cacgcatggactctgaaggtggggagccgacaggaagggctgagctgacaggtgaaagtatgagtccaggcaaagctgcctccctttcgaggaaggctgctcagccccagccagggagcaggaggacagacaatggctttgacaagcgaccggtcagaggacctgggaagcctggccagtgtggagcccgtggccactaatgtggcctcsccgtctgtgtgctgctggggagccctcagggggaaggggtcacatgacaacaccagccaagctcatcttgcaaaagctgagagagaggggagctcccacacccctggctgagcacctctgccagaccctctgatgggttctgcatgaatatcctaaagaaggccagtgcgtgtgtgtgttgctgtcagagcccagctccattcaggaagggcaggaagggtccaacgcaaaggagagctctttgctgtgtgccaggcagcagcctccagagcgaggcccgccatctccagcaggatgtgcggcctccaagggaggcccccgtacgcagcaggatgtgcggcctccgagggaggcccccgtacgcagcaggatgtgcgg

SEQ ID NO: 721253 - DNA, 588 bp, Homo sapiens
cacgcatggactctgaaggtggggagccgacaggaagggctgagctgacaggtgaaagtatgagtccaggcaaagctgcctccctttcgaggaaggctgctcagccccagccagggagcaggaggacagacaatggctttgacaagcgaccggtcagaggacctgggaagcctggccagtgtggagcccgtggccactaatgtggcctccccgtctgtgtgctgctggggagccctcagggggaaggggtcacatgacaacaccagccaagmtcatcttgcaaaagctgagagagaggggagctcccacacccctggctgagcacctctgccagaccctctgatgggttctgcatgaatatcctaaagaaggccagtgcgtgtgtgtgttgctgtcagagcccagctccattcaggaagggcaggaagggtccaacgcaaaggagagctctttgctgtgtgccaggcagcagcctccagagcgaggcccgccatctccagcaggatgtgcggcctccaagggaggcccccgtacgcagcaggatgtgcggcctccgagggaggcccccgtacgcagcaggatgtgcgg

SEQ ID NO: 721254 - DNA, 588 bp, Homo sapiens
cacgcatggactctgaaggtggggagccgacaggaagggctgagctgacaggtgaaagtatgagtccaggcaaagctgcctccctttcgaggaaggctgctcagccccagccagggagcaggaggacagacaatggctttgacaagcgaccggtcagaggacctgggaagcctggccagtgtggagcccgtggccactaatgtggcctccccgtctgtgtgctgctggggagccctcagggggaaggggtcacatgacaacaccagccaagctcatcttgcaaaagctgagagagaggggagctcccacacccctggctgagcacctctgccagaccctctgatgggttctgcatgaatatcctaaagaaggccagtgcgtgtgtgtgttgctgtcagagcccagctccattcaggaagggcaggaagggtccaacgcaaaggagagctctttgctgtgtgccaggcagcagcctccagagcgaggcccrccatctccagcaggatgtgcggcctccaagggaggcccccgtacgcagcaggatgtgcggcctccgagggaggcccccgtacgcagcaggatgtgcgg

SEQ ID NO: 721255 - DNA, 1867 bp, Homo sapiens
cttttcagctcccagcactgagggcagggccctgtctgcctccgcctctgggttgaagcctggcagtaaactggcactcctggtgcccgcaggcaggggaggcagcgcctggccccgctctgccctccacgctcagcgcctctggtcctcggcccagcccttgctggacatgcagcctctaccaggattgctgcttcccttctcggcctctctgggtccagcgtggcgtggacaacagttcggcaatgcctgctccatcagcctcctccctggcctcagccaatgctgactgtgccaggagcccacatagcccgtgcctgcccccccttctggtttccaagtgctcacagcctccaccccacaatctctgattggctcctgcaggcttccgtcaggtatcccccaaggctccgcgtccccatcacctccgtgttttattgttcaatgtcttagatcttgtttgtgctaccccctctcgctccacccctcctttgcccagagaatgatcctccttcccttcaaagcccagctccttcgtgcctcttccaccaggccttcctggccttcacttcctagcccactgctgacagaaggagtcactctcgctccttcctgcatctccctgaggccgcacgctgtcgtggacgtagcatggctcaaaggtttgatgggtgtgcgttcacatccttcatcctctgggcctcaccttccttggcgacgctgggggtaacacctgcctgtaggattgctggggaattaaataggaccgagcagccgcaccgacgaatcctcaccgacgaagcctcagcacttccctccatgcccacgactcaccagtgttatttataaatgagtctgagtccctgctgggtcctgccttgtctgtctttgtatccgagtatgcagcacagaaccttgcattgagtgttgggtgagtcgggagaggcttagggacaaaagtcacagcacatcaacctttcgtgaagtcctagcatctcagagcagggccagtgcctggaggtggacaggaagcacgtggaggtgggcaggaagcactccctgggtcacagtgcacagcagcacgtgctgaacttggtgcagtgcagacgtccatgccacatgcaccactacccatgggctgcggcagctcctagaaatctaggatgtgacatcagacgctcctccgggagtgtggtcatgccctccgatccrctgaggcatttcaaggaaagttacaccctttccaacgcagttttccttttagaaagatttggcctcagtagatgaatccatgtgatcaagcctagtgatcagctaggattcttgaatctcgggacccgttgccagaataacaaaatgggggcttcctgtaacctcggctctttaaagcaacacttctgataccagggttagggtttcagaaaatgcagccgccttaggagcctcattggcagctactttccactaaaacatcttccatttctctctctcaggagtttcctttaacagtgtttacactcagatttggagagtcctgctgcacctggctgctgacccctatccagaggtctcggacgtggccatgaaagtactcaacagcatcgcctacaaggtacgtgccgggcgctccccaccgcgctccagctgctggttctcggttacgagtatgcatgccaggaactccaggtatgcccgggtccacaccacggtttagaaagtaacgaaacgagcttcagcaaatatcttaaatctggagatgtacacagtacaccccaaactgtgtctgtgcagctcccacgtgggcagagggtgctggatttactgatgcctgtcaaagcaattaggggaggactgccattatctttca

SEQ ID NO: 721256 - DNA, 592 bp, Homo sapiens
atctgtgactgagagggtagggtgagttgttctcaaaaagtagtttctgaaaatattgcaatccagagagctcagtttcttttaaaaacttcttttttcatggttttgtacagatttggatgggctccaggccacagagtctgtaccgtgaatgtaccttacggttaaagaagggcccctggaccttcagaccacgcctctgagggacactgaattaccgacctgtgtttggtatggagagcgcaacttctgycctgttcagtgaggacagccctccagctttaccgtactctttcatcaaagtcctacataccctgttttgaaaaaaccccaagaagttggcctgttacatgtgtcccattggtagtgggtgacagtcagtactgcagctctagggggaaacacgtgttctctgacaccgggagaagatgtggaagggacgtctaaaggtgcagtgtagaccgcggtgtaattccctggtgtttgcttgtcttcagtggcatcccttctctgagaagcgggcgcccggtagggcctccaggcgctgttgacacgcgctgaggagaaaggcgaggggtgccagtgttttcca

SEQ ID NO: 721257 - DNA, 607 bp, Homo sapiens
tcccgattttaaaagaaagtaaggcattattgtgggcccaagtgtcatgggctccagacactgcgcctgctagagaagtcagtcctggctcccaggcaacctcccgccttccctggagcacatccgactctgccagccaacatatcctgccattgcagattttttgacacctctcagcactgcaggagcccccasagtgcccacgggccagattctgaaagtaggggatgctgccctctccctgtgtcatgctaagcctggcctggttcctgcagccctgctcatgacattgacccagtagatagatgcagcctgtcttcaagctgagcccaccctctaaggcccatagctttgatcctaggccaggcttgtttgcctggcttctttctcatttagaactgtttcctccagagggtttcctattcaaagaggctgtccagcatcagggctgaatcccaggtgggccaggcaaacactacaccatgagcaatctcttttctttcactgttgcccatggaccactttgggggcagctcagatccccgcttggacagcaagcacagagcacagaaagccccaatttgtgcatttgtcaatgttcctggct

SEQ ID NO: 721258 - DNA, 599 bp, Homo sapiens
taaacaaragagctgtcacggagtctctctttctccccatcacctcattattaattcatctggcttcaggatctcagttctaatcagggagttggctcctgcagcttcacttacaatcagctcaatgccaaaacggcctcatgcaatcacccttctcaaatctacagatgactcctagtgaagaaaattatttgaaaggaaacgggtatgctaagacccagtgtgcaatctctagtggctggagtttggaggctcacaccagctttcctcttctcagatgtccagccttgatccaggggaaggtcaaggaaagtagaaagaagggaaactcaaagagacttccagagagtatctgaggcaacagcctagaccaaaggccaagcctggccacccaaggactgaatgcaatccacagacacgttactttccctctcccttcctcttactggtacatagcatagtgttttatgagtggctaacatttaaatattagaagcatttacgtaaaactccagggtgccagcttcttctgaaagtgaagtaaaggaggcctgtattctggcatgttaaaaattggtcaattctgaatggaggtgacc

SEQ ID NO: 721259 - DNA, 1262 bp, Homo sapiens
gggagtgctttcagaagaaagggagtgaaagaaacaagatgaggtagtgaatgaactcaacaaagatattttctcaattggagactaacttcagtctcaacccatgcaatttctgggattatggctctaccacagagttagcttttcccttgaggagagtgctccaggcttttgtatctggctgaaagtcagttactgagggaacacagactccatgtagaggaagctcccagttaggtgaggggaattcacagagaaaacaggagttggtgttagccaacagtcaacagcgtctagggaacaggtgagctgcaagtaaaagacaggggcacaaatttccactacaatagctatgcattctgattcttattttttatttttcagataggctgggaaaatggacacttgcaacttttttagtcatgatacttcctaaaagatatctataaatgttaacttcagtatgaaatgggtgttgaagagacacaaatatattgcgggatggraaacacaaaattgatcacttaataaatattaattgaggaacttttgtatgcaagcatttactaattatttttaaaaatgcaaagatgttttatgttttaaaaaatcccttcaactcacattcaagagaaaaaattctttcaggtattctctcattgtcacaaatttttaaaataacagtcttaagtatgtacaaacttaaattaggcctatctctccctctctttgaatatttttgattaaaaatgagaggcaatagtcttgaaatactaatggactagaatatgcttatattaattatttgcatatggtataccatacaaattacatattacctaatgaaaatttttatagctgtcttcggttactggattcttgtttgtataatcttaggtaatagcatgtgtccattaggtttactttgaatatgacagtccattgagttaacatttgctttcctattgaagactgttggctggctactaataagctaaatcctaaatgtttctgggttttcactatttaggaaattcatttaatttcttcctattttgacactaatattaggtcagcccacctctgaaaacattgtgctgaaatggctgtcttcatatattccttattgttgtactttggtgaaattgtcactttcgagtcaaattagggatcattcaaccagagccacagcagcagtggtaatcagcctcaggttatttcttccacttgagaattttcaaggcagccactcatagttcgtt

SEQ ID NO: 721260 - DNA, 875 bp, Homo sapiens
gggagaagatctgggttaaattagacttactcctatctagaacctagctacaaaggaatctgaaagttttaatatttagcttctgacctctgtagtacagaagacatgctagaacaaggttggaacagattgagcttgtcattccactagattcacaagctgacttatattaaagataattattaaactctttctcccctgattgactgtgagccccttgaagatatctcagtttgttctctagcacagccctgtatttatattaggcaatcaataaatgggtcttatgatgtggatgccatagatgttttggtttcaacccatttaggtagcatatgcttaaacttctgtraaaccactgcctttttgtggtctggttttacagagcagcagcccaggttaggacttctccctgactttagaaagaaatagtattttgttttcaccaaacgccttgttattcctcaaatactttattgtggttacatcaacagcacctagcaacagtcagaatgtgcatagcaaaagaaagtgtggaatgacattttactatgggggaaaaaacatgtagacaacgagttgagtgatgtacagagtgcctggcataagcttgtcagtttcagaacggagttcggttagcggaatcataggccacacctaaggtaagcagaatatgatgacccgatagatactctggccagaatagtaggaagatcaggaagcagtaataagccgaggctctcctggcctgctaacagctttaagaagagtgagctgcaagcagtagagaccaggcatctgattctagggacttttaagatgatgcatcaacaatagaagtggggagtgtaaaaaagaaaacaaaatgactttca

SEQ ID NO: 721261 - DNA, 658 bp, Homo sapiens
cgggaagcggagcttgcagtgagccgagattgcgccactgcagtccgcagtccagcctgggcgacagagcgagactccgtctcaaaaaaaaaaaaaaaaaaaaaaagaattatgtctattcctgtatttgtttttgtttgtatgacaaagattaatggcaaaacttaaccaagtgtttttgggtggacattaaaaagagagggttcccagcgaatggaaagtgtatttatttctcatcttttatattttaraatcttggactttaatatcatttgtaatcagaaaaatagcataaacttacaaaatttaaaaatcactaaaatgtattaaaagctgacagcccgtatgtaattactccactggccatcaaattgtagaggcctttggaataccagcatttgcattttacttttagatactaaagagtgatatgtcacctcatatcttagcgaccactttgtggggttgtaatacactctgtattacacaatacaccagaataaggaagcttactctggtgtattgtggtgttgagagcaaacaagagtggggagagtatcacgaaggagttcaggcaggtttaacaagacctggcaggtccccaaaactaatcagtaagtttttgggcgaggtgggtagcaggggaaatggaaaggtt

SEQ ID NO: 721262 - DNA, 1807 bp, Homo sapiens
atttctacattttgtcgtttgtaaatatttagatgattctgtttyggctattaggaacagtgcgattatttgtgtacatgtcttttgttgaccatgtgaacccatttctgcttgaatatacttaagagttgaggtgtgttgagagtgaaacggctgggtcacaggagattctgccaaattattttcctagggaatttgaccatgggcacttccacaatgtcacgtgaaagttctaattttcccacaactttgccttctgtcttctctgtagccatttggcaggtatgccggtgagacctcattcaggttttcctttgcatcttcccaatgtaactaagaagattgagcactatttaacacatttacgtgttattttgatttcctctattgtgtttgtaactttttctcattttcaactttgtttttggccttttttttaaaagttatgagtcatttatataatctatacatgaaatactgcaaaaatatttagcatagatatatttattttcaaaacacctgcaaatagaagtaattcagcagtttgaattacagtcttgccagtctgtagcttggcttttcacaatcttaatgatttttttttaatgatcatatggttcctaattctagtaaagttaactttttcattcacttctccttcatggttagtgtccctttaagaaaattcccttaacccgtggccatgaggatattctcctatgtttacatttaagagatttattatcttatccttcactgatatttagatctccaaaccatctgaaaaggatttttcttcatggtgtaaggtagggaaatttttctgtcagtgctaaatctctcttatttccagcatttaaaaaaaatccaatatttgttcactaaactgaagtggacgcttgttgaaaatcacatcaccatagttgcaaggatctgtttctatactctgttccattgatttcatctgtctttgtaagtacagtgttgaatatcttgatttgaggggtggagggagtttgtatctgcaatttcaagtgctttaaaaatgttgacacaattcaaattattaatttttttgatatagtagactttttccttatttctatttacattttttaaaatttttattcactttaattttattttgagacagggtctcactctgtcccccaggcagaagtccagtggcaggatcacaactcactgcagcctccacctcctgggcacaaaggatccttccatctctgagcccccaaatggctgggaatatggatgggcaccaccatgcctagctatttatttatttatttatttgtatagatggtgtctcgttatgttgcctaggctagtattgtacatgtcttgtgatgaacatttacttaaattttaaaattgttggcacaaatgtgacattatatctgccaatttttttaccatctgtaggaactgtaatacagtaaacttacattcctggtgttggacacttgtaccttttcttcaattttgttctcaggtaatcagacttgatggagtatatcaattttataaatttatgaaataaaaaatttatggcttattactaacaaatctacttttgttatccactctgaattttcaccctccatttttatttatttaattatttgagacagagtctcactgtgttgcccaggctggagtgcagtagcatgatctcagctcactgcaacctctgcctcctggattcaagtgattttcctgtctcagcctcccaagtagctgggattataggcacgcaccaccatgcctggctagtttttgtattttt

SEQ ID NO: 721263 - DNA, 1807 bp, Homo sapiens
atttctacattttgtcgtttgtaaatatttagatgattctgttttggctattaggaacagtgcgattatttgtgtacatgtcttttgttgaccatgtgaacccatttctgcttgaatatacttaagagttgaggtgtgttgagagtgaaacrgctgggtcacaggagattctgccaaattattttcctagggaatttgaccatgggcacttccacaatgtcacgtgaaagttctaattttcccacaactttgccttctgtcttctctgtagccatttggcaggtatgccggtgagacctcattcaggttttcctttgcatcttcccaatgtaactaagaagattgagcactatttaacacatttacgtgttattttgatttcctctattgtgtttgtaactttttctcattttcaactttgtttttggccttttttttaaaagttatgagtcatttatataatctatacatgaaatactgcaaaaatatttagcatagatatatttattttcaaaacacctgcaaatagaagtaattcagcagtttgaattacagtcttgccagtctgtagcttggcttttcacaatcttaatgatttttttttaatgatcatatggttcctaattctagtaaagttaactttttcattcacttctccttcatggttagtgtccctttaagaaaattcccttaacccgtggccatgaggatattctcctatgtttacatttaagagatttattatcttatccttcactgatatttagatctccaaaccatctgaaaaggatttttcttcatggtgtaaggtagggaaatttttctgtcagtgctaaatctctcttatttccagcatttaaaaaaaatccaatatttgttcactaaactgaagtggacgcttgttgaaaatcacatcaccatagttgcaaggatctgtttctatactctgttccattgatttcatctgtctttgtaagtacagtgttgaatatcttgatttgaggggtggagggagtttgtatctgcaatttcaagtgctttaaaaatgttgacacaattcaaattattaatttttttgatatagtagactttttccttatttctatttacattttttaaaatttttattcactttaattttattttgagacagggtctcactctgtcccccaggcagaagtccagtggcaggatcacaactcactgcagcctccacctcctgggcacaaaggatccttccatctctgagcccccaaatggctgggaatatggatgggcaccaccatgcctagctatttatttatttatttatttgtatagatggtgtctcgttatgttgcctaggctagtattgtacatgtcttgtgatgaacatttacttaaattttaaaattgttggcacaaatgtgacattatatctgccaatttttttaccatctgtaggaactgtaatacagtaaacttacattcctggtgttggacacttgtaccttttcttcaattttgttctcaggtaatcagacttgatggagtatatcaattttataaatttatgaaataaaaaatttatggcttattactaacaaatctacttttgttatccactctgaattttcaccctccatttttatttatttaattatttgagacagagtctcactgtgttgcccaggctggagtgcagtagcatgatctcagctcactgcaacctctgcctcctggattcaagtgattttcctgtctcagcctcccaagtagctgggattataggcacgcaccaccatgcctggctagtttttgtattttt

SEQ ID NO: 721264 - DNA, 1807 bp, Homo sapiens
atttctacattttgtcgtttgtaaatatttagatgattctgttttggctattaggaacagtgcgattatttgtgtacatgtcttttgttgaccatgtgaacccatttctgcttgaatatacttaagagttgaggtgtgttgagagtgaaacggctgggtcacaggagattctgccaaattattttcctagggaatttgaccatgggcacttccacaatgtcacgtgaaagttctaattttcccacaactttgccttctgtcttctctgtagccatttggcaggtatgccggtgagacctcattcaggttttcctttgcatcttcccaatgtaactaagaagattgagcactatttaacacatttacgtgttattttgatttcctctattgtgtttgtaactttttctsattttcaactttgtttttggccttttttttaaaagttatgagtcatttatataatctatacatgaaatactgcaaaaatatttagcatagatatatttattttcaaaacacctgcaaatagaagtaattcagcagtttgaattacagtcttgccagtctgtagcttggcttttcacaatcttaatgatttttttttaatgatcatatggttcctaattctagtaaagttaactttttcattcacttctccttcatggttagtgtccctttaagaaaattcccttaacccgtggccatgaggatattctcctatgtttacatttaagagatttattatcttatccttcactgatatttagatctccaaaccatctgaaaaggatttttcttcatggtgtaaggtagggaaatttttctgtcagtgctaaatctctcttatttccagcatttaaaaaaaatccaatatttgttcactaaactgaagtggacgcttgttgaaaatcacatcaccatagttgcaaggatctgtttctatactctgttccattgatttcatctgtctttgtaagtacagtgttgaatatcttgatttgaggggtggagggagtttgtatctgcaatttcaagtgctttaaaaatgttgacacaattcaaattattaatttttttgatatagtagactttttccttatttctatttacattttttaaaatttttattcactttaattttattttgagacagggtctcactctgtcccccaggcagaagtccagtggcaggatcacaactcactgcagcctccacctcctgggcacaaaggatccttccatctctgagcccccaaatggctgggaatatggatgggcaccaccatgcctagctatttatttatttatttatttgtatagatggtgtctcgttatgttgcctaggctagtattgtacatgtcttgtgatgaacatttacttaaattttaaaattgttggcacaaatgtgacattatatctgccaatttttttaccatctgtaggaactgtaatacagtaaacttacattcctggtgttggacacttgtaccttttcttcaattttgttctcaggtaatcagacttgatggagtatatcaattttataaatttatgaaataaaaaatttatggcttattactaacaaatctacttttgttatccactctgaattttcaccctccatttttatttatttaattatttgagacagagtctcactgtgttgcccaggctggagtgcagtagcatgatctcagctcactgcaacctctgcctcctggattcaagtgattttcctgtctcagcctcccaagtagctgggattataggcacgcaccaccatgcctggctagtttttgtattttt

SEQ ID NO: 721265 - DNA, 647 bp, Homo sapiens
ccccaagtccactgtctcccagcccagttctccactaggagtcacctaggtgttgtagtctttgtggcctagactgccctttaaacttgcttagaagcccagagtactttagcccacggtggcaaggcttgctggagctcagattctgaccactgggatgtgcgagccccgtctcttggaaccttttctgagttcagcaaaacagagctggactcagctgatgcctccccacaaagggagtacttagggctggtttaaatattcctttcgttggcaggtgtcagctgaattcagccaggttttgctttctgctgtgacagggcagcattgagttcaacgcaaagtttcacgattgctgcactcgctctctcacaaaagcacagatgctccctgccatgcaacccttgccagggggtatggaggaggaatggcatcagtgattcaagactctttcctaccttctacggtgcctctttcagcgatgtgaggttgaaaccaggtactgtaagggakcacttcatttttgtttcttataaaagtgacttttttggttagatagtgattaaattgatgtcctcattggggggacggtaggtggaactttctatttgtccattttattccaccacctataatgaatttttatg

SEQ ID NO: 721266 - DNA, 660 bp, Homo sapiens
ttaatcaaataattaaatgtctctcaagctggccttaattccctcttctccaatctttatctgactcatattgctagcattgagtaggcaaaggagaagggctgagtgaagggtcattctccaaccaaaaacaatrcaccaacctattaaaaacctatagctaaactcaatcacacagttacattttaagttactgcatgccaaaatttcaaattaagttataaacacattgcatcaaccaccattacatataggacccctggggttcaacaacattaagaaatggtctggtgaccaaaggaatactgtagctccaaaacactgtttgctttgaagccctgttcagggatcactaacatgcacaacggtaaatgttaaacagataactgttgatgagaatggggcctgtcattaatatatccataaagaaaggacatgtatccataaagaaaggacaggatatatatgaattgaggcaattaaactgagatgcatcaaccattcgtttatttttgttcaagatcttggaactttttattccatctattaaatatgcctatttagtgtcacatgtggctggtaatagtttgtcacttaaagttattttgattaatctatagttttaaattgtttttatcctcagttttacattttgtttaa

SEQ ID NO: 721267 - DNA, 660 bp, Homo sapiens
ttaatcaaataattaaatgtctctcaagctggccttaattccctcttctccaatctttatctgactcatattgctagcattgagtaggcaaaggagaagggctgagtgaagggtcattctccaaccaaaaacaatacaccaacctattaaaaacctatagctaaactcaatcacacagttacattttaagttactgcatgccaaaatttcaaattaagttataaacacattgcatcaaccaccattacatataggacccctggggttcaacaacattaagaaatggtctggtgaccaaaggaatactgtagctccaaaacactgttkgctttgaagccctgttcagggatcactaacatgcacaacggtaaatgttaaacagataactgttgatgagaatggggcctgtcattaatatatccataaagaaaggacatgtatccataaagaaaggacaggatatatatgaattgaggcaattaaactgagatgcatcaaccattcgtttatttttgttcaagatcttggaactttttattccatctattaaatatgcctatttagtgtcacatgtggctggtaatagtttgtcacttaaagttattttgattaatctatagttttaaattgtttttatcctcagttttacattttgtttaa

SEQ ID NO: 721268 - DNA, 660 bp, Homo sapiens
ttaatcaaataattaaatgtctctcaagctggccttaattccctcttctccaatctttatctgactcatattgctagcattgagtaggcaaaggagaagggctgagtgaagggtcattctccaaccaaaaacaatacaccaacctattaaaaacctatagctaaactcaatcacacagttacattttaagttactgcatgccaaaatttcaaattaagttataaacacattgcatcaaccaccattacatataggacccctggggttcaacaacattaagaaatggtctggtgaccaaaggaatactgtagctccaaaacactgtttgctttgaagccctgttcagggatcactaacatgcacaayggtaaatgttaaacagataactgttgatgagaatggggcctgtcattaatatatccataaagaaaggacatgtatccataaagaaaggacaggatatatatgaattgaggcaattaaactgagatgcatcaaccattcgtttatttttgttcaagatcttggaactttttattccatctattaaatatgcctatttagtgtcacatgtggctggtaatagtttgtcacttaaagttattttgattaatctatagttttaaattgtttttatcctcagttttacattttgtttaa

SEQ ID NO: 721269 - DNA, 639 bp, Homo sapiens
tgataagatgattcatttcatgaaagccagaaaggctttcttcttggttatcttagtggtaatgcaataagcccatgagaagagtgagcgtggtgatgtggtttaaggttgtacacatgcctaataatatgatcttcctctcaycaagactaatggagccactaccattgctgagtgtccaactttccagcagctgagaccaataataaactttgtaagcatcaccattcttcaaggagaccagccacttggtagtaagttcaatgtattggacccctctaatgtagcaccacccaaccccccagaaatatgacagtgacttttcataccaaaactgatatctactataattatggtgtgtttttttccatcctataattgccagaacaggaaaaatcttcagaggacttataggatttcctaacttattgacatggtatcgtatataatattgccttaggccaacagaaccattttatagccacagaggtgtgagggaaggtctcataggatccgttggtcttgctaagtggctcttacctcatcatgccccccacacatcatcattcataaaagcttcctaattcaaaatgtggaatggcatgttaaaggatcagctatggcactatttcaaagaca

SEQ ID NO: 721270 - DNA, 1494 bp, Homo sapiens
gggggcagaggttgcagtgagccgagattgtaccactgcactccagcctgggcaacagagcaagactccatcaaataaaaaaaaaaaaaggaaactattttcttaaacacatggtaaaaatattgtatacttgtctcaatactttttgttggtggtcataatcataaatctaatgtaagcaaaattcaccatactgtgtgcaaatccagttgccctttgattttgctgagttcagccaaaattactatccattaagctgaacgccagatttgtttcaacagatacaaaaccaagaacttttcaagaatgctttctcctactctggagtggaacctattaaacagcaaggcaaatactatcaattgttttatctyaaatgttttaattcatctgggtttttctttaaattgatttttttctgctctgggttgatattctatgttgaatctaaaaagtaaggattcaggctaaagttttctaatgcaaaatttcaatgcactcataaaatagagctttgcaggacagcaaatcaatctgtaagcatatgttgaaaagactgactatctcctaaattaacaagttagttaacatctaaaagctactcattgcttgcaggaaaagaaaaaaataagtgataaattgtgtcatgagcaccctataagtagaaaagaaaaatgccctgctattaacaagtaaaatactctgtcatttactgtcattgccctgaagattgtgtattggcctattataatttaattaaataattataattgcatattggtctattataatttggtatgttgtaatttaactccaactcaaaataagttagaacttctcatcattcatccatattttctactcctcccgtattttctgtagattgttattttaattgcatattggtctattataatttcccattttagttttttaagctatctctttaatttcatagaaagattttattttctccctatgttaacaatttagaaataacagaaacagctttaacaaatttatcatatctatcataaagacccatcattgtatcatataaaattaaaaattggtgtattttcttgataaaaaatattcccagttatgaacatttgcttcattgttaaaaaaataataataataatcctgatgaaatcttttatttattcttcttgggtatttagagaaaggtaagtgtataaaatatgaagagtaggttataataactttactcaactaatagcttaaatctagaaataatctagaacaatatattaggaaacactttaattttacgaattttacatggtgtagtagaaaataaaagaattaacattttttgatctatttttatgtgccaggctttatcctagatgactttaacatgtcatctcactgatccccacaaaagccatgcaaaataggtattatatctctatttttcagatagataaactgaaattcagagaataagcttgttaatactgaaaactc

SEQ ID NO: 721271 - DNA, 1494 bp, Homo sapiens
gggggcagaggttgcagtgagccgagattgtaccactgcactccagcctgggcaacagagcaagactccatcaaataaaaaaaaaaaaaggaaactattttcttaaacacatggtaaaaatattgtatacttgtctcaatactttttgttggtggtcataatcataaatctaatgtaagcaaaattcaccatactgtgtgcaaatccagttgccctttgattttgctgagttcagccaaaattactatccattaagctgaacgccagatttgtttcaacagatacaaaaccaagaacttttcaagaatgctttctcctactctggagtggaacctattaaacagcaaggcaaatactatcaattgttttatcttaaatgttttaattcatctgggtttttctttaaattgattttkttctgctctgggttgatattctatgttgaatctaaaaagtaaggattcaggctaaagttttctaatgcaaaatttcaatgcactcataaaatagagctttgcaggacagcaaatcaatctgtaagcatatgttgaaaagactgactatctcctaaattaacaagttagttaacatctaaaagctactcattgcttgcaggaaaagaaaaaaataagtgataaattgtgtcatgagcaccctataagtagaaaagaaaaatgccctgctattaacaagtaaaatactctgtcatttactgtcattgccctgaagattgtgtattggcctattataatttaattaaataattataattgcatattggtctattataatttggtatgttgtaatttaactccaactcaaaataagttagaacttctcatcattcatccatattttctactcctcccgtattttctgtagattgttattttaattgcatattggtctattataatttcccattttagttttttaagctatctctttaatttcatagaaagattttattttctccctatgttaacaatttagaaataacagaaacagctttaacaaatttatcatatctatcataaagacccatcattgtatcatataaaattaaaaattggtgtattttcttgataaaaaatattcccagttatgaacatttgcttcattgttaaaaaaataataataataatcctgatgaaatcttttatttattcttcttgggtatttagagaaaggtaagtgtataaaatatgaagagtaggttataataactttactcaactaatagcttaaatctagaaataatctagaacaatatattaggaaacactttaattttacgaattttacatggtgtagtagaaaataaaagaattaacattttttgatctatttttatgtgccaggctttatcctagatgactttaacatgtcatctcactgatccccacaaaagccatgcaaaataggtattatatctctatttttcagatagataaactgaaattcagagaataagcttgttaatactgaaaactc

SEQ ID NO: 721272 - DNA, 1498 bp, Homo sapiens
tgtttgttttgagacatggtctcactttcattgcccaggctggagtgatgtggcttgatcctagctcactgcagcctctgcttcctgggctcagatgattctcccacctcagcctcctgagtagctgggactacaggcgtgtgttaccacacctggctaatttttgtatttttttctagagatagggtctcactctgttgtccagggtgctctcaaactccttggttcaaacggtccacctgtctcggcctctcaaagtgctgggattatgcatgtgagccactaagcctgattttagaatatcagattttaatttaacttcttagtcccagccacttgtttgacttctttttcattgactgcactcttggaaatgatgatttaaatttaattctggtttgacaggaaaagataattaaaaatcttcctgatgatatcttgactctaaatattaagcatcaccttagtttattagctatattagttcaccaggaatcctcttatcaatctgtgtgtgtgtgtatttttttttttctatctttaaagaaattttagatgggcagaaatcaggcgaccatctaaagcggggtaggaagaaagggagaaacagacaggaagttcctgcatttactgaacctgacacgactgcagaggttaaaacaccttttgatttggccaaggtgagtgcttatagattgaagctttttctgactattggagaagaggaagtgactaatacatttcagagagcaaagtgtacaaattggtctagaatggcaatttttcaacaaatgcatgaattttaggtagaaaaagttacatatactcctttctatatggtagattttttgtttggcaacctgattagtattataaagacatctttgcttttttttttttttttccccaagacagagtcttgctctgtttccagtctggagtgcagtggtgcgatctctgctcattgcaacctccgcttcctgggttcaagtgattctcctgcatcagtctcccgaatagctgggactacaggcatgcgccaccatacccagctaattttcttttttttttttttgagacagagtctcrctctgtcgcccaggctggaatgcagtggtgtaatctcagctcaccacaacctctgcctcctgggttcaagcgattctcctgcctcagcctcccaagtagctgggactgcatgcgcacactgccacgcccagctaatttttcgtattttagtagagatggggtttcaccgagttgcccaagctggtcttgagctgctgagctcaggcaatccacccaccttggcctcccaaagtgctaggattacaggcgtgagccaccgcgcccagccctgtttttgaactttaaattaatggagctaaatagtgtgtactcttgtatctagctgcttttttttttttttttttttttttttttgagacggagtcttgctctgtcacccaggctggagtgcagtggcgcaatcttggcc

SEQ ID NO: 721273 - DNA, 625 bp, Homo sapiens
ctcgctctgttgcccaggctggagtgcagtggcgtgatctcggcctactgcaagctccgcctcccgggttcaagcgattctcctgtctcggcctcccgagtagctgggactacaggcgcctgccaccacgcttggctaattttttgcatttttagtagagacagggtttcaccatcttagccaggatggtctcgatctcctgacctcatgatccgcccgccttggcctcccaaagtgctgggattayaggcgtgagccaccgcgcctggccctaaaaattatgaattagccttattacagtaggccctcagtaaattacccagttcttttcattaccaaggttaagatgagatttgagcaaattccgggcttcccttttcagttccttcttgcttttctcaggctgtgagtagtgaagtgcatggatactcaagcaagagtgggtatacacagagaagatgtcttgggcaggctggccttggctgatggtaaaaccaaatacctgcacctggccatagaggcaagtcacacgacagatcccactaaaagtaaaaccctagcagggagagaaaacagaaaaaacattatagatcatgtcactaatgactgaaacattctaaaatct

SEQ ID NO: 721274 - DNA, 625 bp, Homo sapiens
ctcgctctgttgcccaggctggagtgcagtggcgtgatctcggcctactgcaagctccgcctcccgggttcaagcgattctcctgtctcggcctcccgagtagctgggactacaggcgcctgccaccacgcttggctaattttttgcatttttagtagagacagggtttcaccatcttagccaggatggtctcgatctcctgacctcatgatccgcccgccttggcctcccaaagtgctgggattataggcgtgagccaccgygcctggccctaaaaattatgaattagccttattacagtaggccctcagtaaattacccagttcttttcattaccaaggttaagatgagatttgagcaaattccgggcttcccttttcagttccttcttgcttttctcaggctgtgagtagtgaagtgcatggatactcaagcaagagtgggtatacacagagaagatgtcttgggcaggctggccttggctgatggtaaaaccaaatacctgcacctggccatagaggcaagtcacacgacagatcccactaaaagtaaaaccctagcagggagagaaaacagaaaaaacattatagatcatgtcactaatgactgaaacattctaaaatct

SEQ ID NO: 721275 - DNA, 1342 bp, Homo sapiens
atccttgagggcactccttcaaagtcagtaggagacggattctgatatgttatttcctctatgcacaatttccatgtgttatcatggaatgaccatgattcacggaattgacagaactgaattttaatccaactgttatctcctaaactgtgtgatgctgggcaagtcagttaatctgtctgagcttcagttgtttcatttgaaaaaacagctaagaatatctgcttcatagaattgagagggtgatatggtttggatctgtgtccccaccaaatctcatgtcaaactgtaaccctcagtgttggaagtggggcctggtgggaggtgatggtattatgagggtggatttctcataagtggtttagcagcatctacttcgtgctgttctcgtgacagtgagtgagttctcacgagatctggtcatttaaaagtttgtgacatctacccagcacacctctctcttctcctgccatgtaagacatacctgctttctcttcaccttccaccatgattgtaagtttcctgaggcctccctagaagcagaagccactatgcttcctgtacagcctgcagaaccatgagccaattaaacctcttttctttatgtattactgagtctcaggtatttctttatagcagtacaagaacggactgatagagagagttaaagagataatcagataagtgctaattagtgttcccagcacaagtaagccctttaaaaaggcaaaaacaatgaccattatttactcttcaaatgtaaagtaatacctgaaggtggtccaaatcaccctgagtttgtataaaatgctgtttctttgtttttaataatagagtcaaaatccttcactttttaactgctaaccaccattatttacaaacttcccatgctggcataccccaaaactttctttctaactaagcctcccatcagtggtgtacctaaccctgccctacatgttctccaggctcccctagtttgcacttggttctcaattttgtcactctaatgaattcccagttgtctttcaatgatatctcttcagatgcaacaagatagaaataatcacccacagcttctctattagagcagcatcaaaatcttctccatgcatctgttgatattgcttcttggactataagctgtttgagctataccttagcgtttctccagcactgatgcaatatctgcaggatgccagaagagaaggagtaacattatttgaaaaatacaccctatggaaaagaaaggagagttctaatacctaaatgggaggtaataaaacattgtcaaaarttagtagaagtccaccttttaagaaggaagagttgcagtttgtgc

SEQ ID NO: 721276 - DNA, 1033 bp, Homo sapiens
ctgatgttgactaaatttctaacttccacccaacacccatggtgtttctaagctccatctcttctactttgaatttgttaatttaaacatataacaaagcattacttttaccccagttaaaagtttgtatgttcatgtactttattatttcaaaaatattttttgttttttctctccaaagtatgctgtccatttctcatagcttctagtcatccacatattttttcagtttgcttcttcatttttcttcaaaaacattgatgaacccttttccactcaatactattaatagcttcataggcaataattaacacctgatcatgtacataacaaccattggatgccaacttgaaactactaataaattctgtaagtctatgaatctctcttcttcagagctcggctttaactactgtttctttgctgaacaactctttgaatttttaatttaagccagattatcttagctcttatttttctgacacacagtgaaagtataggcatgtatccttatttttaaaatttacctttccataggtagattaaaaaaatccataggagcagagacaattagtgctttgatcaccaaagtattttcagattttagtggaaggcttgaggcatattaagtattcaataattttttaaattaaatagtgaattccataggatccatatcgtgrcagagttatatttaagggatatatatgcatatttatgtatatgtgtgcacattatacatgtataaatatatatacatatatatctctatctatctatctatctatctatctatctatctatctatctatctatcatctatctatctatctatctagagacccttttccataagtggtaatagttcttcagttaaaaaagatgtagcctcaaatctattttttaaaaaatttccacatttacacctttactgcatggacatagaattggaaagggtgatttctgaggaaccttcctgggttacctcagtaagtcttttggatgtgtaaaagacatgagttacactcttgat

SEQ ID NO: 721277 - DNA, 1058 bp, Homo sapiens
tttttggaatcttgtctacagaataaaaatagaagttcaaaaaatggtaataatataaataaacctagaaaatttcaagaagaaaagtggtaggcacttggtctaaaaagaaaaaagcagtagaatatgggaaaactgtgatgggaagatmttctattttctaaagtctttggtgacatcctaaaactttccaagataatggccatacctcaaatgcctaaagggccagagaaaagacatgaatgaatgaatccatccagatataagagagaaacatggtatttgtctcttggcctcagaatcaacacaatagatagttgtgggaagaaactggaaaaataacttcttttctcaagggaggcagttgttacattgcaaaaacatgcacccgttgtagtcatgttttctgatttgccaatggaattttgaaatatggattttcatgttgaatattttgattttcaatgtgagtaaagtttactgtgtatatcaatatgaaacataccttaagatggacagttcttaacttttggtttacacactaaaagtggtctggggaaggattacatgggttactatgagatttccaagaatttattctgataaattttgtataatatactatctgaaagttactcaactctttggctatgagaaaatgttttggttcaattcaagtagaaatgttggctcctttagattttccaaaataagtttagttagtgactttgtgtgtgtatgtgtgtgtctagagaagagagagagatcagtattgaaatgatacatatttctcttgtaagtgtttatctgatgaattatggtgatatacataagattctagttcttttttgtctcaaagatagggaataatagatatgaaattgcaattcctgggaaatgtcactaagcaatacagtaatacctgttctcataaaacggcaaaattgcatttaaaacaaatgactgaagacaagttgatgatgctatctttttctgttttgggattaatattctagaacacttattctatttgaaaataacaaaattaaatttcctaa

SEQ ID NO: 721278 - DNA, 1627 bp, Homo sapiens
aacaaaaaaacatctgtttggcaacagtatggagagaaaacggcagaaaaagagagaaattgacaaggctggaagattcaatgcaattgcacaagtatagagagtaccatttactacagtgaacatgatcatgtgattgttgcactctggatatggtacatgcaatctcctgcatagctgcaattcaggagatgtatatcttcctgagatttttccatattgttgttttgttttgtttgctccccatcaccaacaaacacattccagaaaattggatttgcaaacatgagaaaaattttcaggatatcaagaagttattgattttatcacttgtcattgcttctggacacggagggtttgtcctcggctataggaattgtgtttaactcaaaatgccgcttttccttaaggactaatgcttacttacagaacaggactgccaagcagtgacaggcatttttttcagcatgagtcaaaaatttcacaaaaaaaactatgactatatatatttatttttatggtggacaaaattctaagattaggtctagatatttcccaactgtgttcttatccccataatctttagctccaggcaaaaccttggcaattcagtgctgaatgctccagctttacatcatccaaaagkttagaattcaccctgtataatagtttaaatataaacttcacataacatacagtgaatttttttctggaagatatcaaaacctctgttaagtttctatgttgattcagaagtatcattcccaagaaagctaccattatttccaattatatttttttcaaattcctttcatttccagctccaacatctgtgttatagtaggagttgtgtagaaattacctaatttttttatatcaccattatctagctctggtattgatacagagtactacataattcaaataaaacttgttgagtagatgaatacatgaaagaatgaataatactattattattattatttgaatagatattatgaccatggcattatgctaggttttgattatgtaaatgtgactcccctgatctcttcctttgagatgcttacagtttattggtagggacagaaacattagcaagcattttcagtacaatttgatgaatattataaaccactcgatatgggttcctggatatacttagttccacctagaagagggacaagcagactaataataaataaatacaaggaaacaaaaacggtgactagaatgaatcttgaaagagaagtggaatttggaaggacaaaatacagaaaacatgatctaagtaaagaaaaaagcaggaacaaaggcaggtcagtaatatatattaatggagagagcaaacaatttactcatatgcgagcttaaggaaggaggacatactgtcagaggaatataaagttatgttttatccaactctaatgtttttaataaggggcagctttcgtttcagttgagtttaaggaaattataaaaatgtaagagtataggtgaaagtaatttttgatcatttatgaccccaacatgaaaaaataatgtctattaacattttgaaatattttcagttttttgtgaggaagatgttcactttacaaggatatccctgggtgtacctataaat

SEQ ID NO: 721279 - DNA, 977 bp, Homo sapiens
tcttcagtttgagtctataatcacaggctgattaaagaagcatcaatcaaacaactctctgggggccattctatacatactgataacatgttaaacatcaatgagcaaaagtggaaagatggaggcggttaagtgagttgcccttctccatcgggggtagccctatctctgttaagcatgacttgcagcgcacacaggaatgctgcatgatgcgaccaccaagccttctaccaactcggagaccaaccaggggagagacatgtcaagtctggggttgcaggcagataaaattctgaaactctattatgtgtgcataatgctattcactggtaataagtggttgattttactacctaaattttaaatcatttatatgtgcctccaagtagttgtctgacttggaaaatctacataataaatttgtgtagtaaatttcctattttgaagttgcatacagtttttcttgatacaacatgagtycatcccttcccataaaatagttgttgaacaactaaacgtttaaagatcatctatgagaatctgccccacagcacccaaattccagactgaaccctgcctgcaactccaagggggaaccctgtgtctgtggggtggggcttcctgttgctcacatctgcccacaagctgtgggatagcttgtgggtaagactccttagggagaccaccacagaagtcaaataaaaagtcttttcctttggcctgcttttcaaataagccaacgcctacgttaatgcaccattgttttcaatacaaaagtcaggcaattcaaagttatagctacaaaagcattggcaattcagccacactccacataaatctacataaaagtgtcaacttttatatcttcctgagctctagaaagtgcaatctagctgccaagagaccaaatttacgaatctgggattccaactagaattgttcctccaagctgcatttctacattctgtaatacctgg

SEQ ID NO: 721280 - DNA, 2788 bp, Homo sapiens
tgggattacaggcgtgggccaccacgcccagctctggtcatgttttatcaagccagaggcctggtaaataggggttcctctaacatatttcccccttctgtcatgagtggacccttaatcctaagggacactgaagggcagaggtcagtcttctgcaacctcttcctgctgagaaasgtcattgatgttaactctgcctagctttaagggacctgtcatgttgggaggggtcttaaccagaggtagcttgaagctgttgcagttaactggaggagcaataggtctgtaggtttgtaggtcactcataagttgatatcctaaacatagaaacttataagaattatagctataattataaaacatgatatatgagtaccatacattgtgaattaaggattaataataagaatagggcccagtaaaccctacattccatgcaaaacatgcagcaacaataaaatccacaacataaagctatgcctattccaatttttatagctggggtgacaaaaggaactttttccaccatgatggccctgacccaaaccacaatgttagccattatctaaagaaagtgtgggattagagatggctttaatttgttgatgcatatctggagggccaaagaaatattgtctgagttatttgggatatatatacaatatttgattctgataatagcacaggttcctccctgtgccgcagtcagagtatctaatgacattctgttttgcatgatagccttatgcatataatacatttcagcatttataaaagatatatctcacaggctgttacttacagcccatggggtatcattggcaatgacctcaacatgccagatagcatcttataatctaacagatggtaggaagagtgaggccaagtggttatacccatgaaaaatggatctggcccacatactggttatgtggagaaggttggctggctttatttatttatttatttatttatttatttatttatttattatgtatttattttgtgacacagtctccctctgttgccgaggctggagtgtggtggcatgatctcggctcactgcaacctctacttcctggattcaagcaattttcctgcctcagcctgccaagtagctgtgattactggtgtgcaccaccacacctggataattggccaggctggtctcaaattcctgacctcaagtgattcatccacctcggcctcccaaagtgctgggattacaggcatgagccaccatgccagcctggctggcttttttaaatagtctttgtccagtgacctggggtcaagataagcttcatgtacaatgtcctagccacccagaaggcaatcatggccaaagattggtgccacatatccaatgagttcctaagggatgcatatcagttgggttttggtcgttgcgaccaatcggtagcagataagtccatttgttgcaggactatggtatgttggcattgtcttgcaggaatccatcccatgacacaagtagcatttgtcaaggcatcaagggagtgattccattgttcctaacacagtgggactacctgacttaggtgtcctgcagaggtggttagtcatagaaaaccatctcaaatctgaagaaatcattcttcaaaactggagtttttgagctttttagtttggatgtttatctttgggtctagaaaggaggtgcccagtgcaagaaacttttctgtggtctcatttactgagaatggcttcctatgcccagaattgctaaaattgttattaattggccattgggttacattgttccaagtcaggccagacatctgtgcttttgtccattgtttaagtccctctaagtatgtctgtaagttatctaagcatgtccctgtgtgggggatatccaccagggcaagcctgagatgctagagaagggcaatagctcacaaatccagcaagaggacatcggcatagtcctgtgcccattgtaagaaaagatttgaacctccagcaatagtgaaaggaaggatagaagccccaaaatagacacaaataaaagagaagctacattctatagttatatcctgtaaggacatagatattgcttacccagagctgggacagactcataccagtaaaagtaaaagacgaccaggaggaggatcaggaagactaaccttgcccccaagcttatccagagcatcactttgtagtaagaagcttccaaggatttctcctgaagaggaagtatagaccttctactggctcacaagagtaaactagattagcagactgggtgtcagaagtgtagaccttctactggctcacaacggtagactagattagcagactgggcgtcggtagcttgtggggctccataagaaacaggtttaattcaagacaaatgtacctaactgtgaatcccttgcagtttaactgctattggagtgctcagagcacttgatatggacctttccacattggggaaagctggtcactagagacccttccattcaagtctttagtaaggttaaataccctagttgaactgaaacagaattttcctctcatgtggggagggaaagccttttatatccatattcacacaatgcattttgcacttgtcctagattgataacatatttttgtaattaatgaatcatttcatctattaggagatttgcagttaggaaaggccttccatatgttaatgcaaaaggacttaattataagtttccctttggagcagctcaaacctgcagtaaagctacaggcaatagagatagccaggtctctgatgtttcctggcaaa

SEQ ID NO: 721281 - DNA, 2788 bp, Homo sapiens
tgggattacaggcgtgggccaccacgcccagctctggtcatgttttatcaagccagaggcctggtaaataggggttcctctaacatatttcccccttctgtcatgagtggacccttaatcctaagggacactgaagggcagaggtcagtcttctgcaacctcttcctgctgagaaacgtcattgatgttaactctgcctagctttaagggacctgtcatgttgggaggggtcttaaccagaggtagcttgaagctgttgcagttaactggaggagcaataggtctgtaggtttgtaggtcactcataagttgatatcctaaacatagaaacttataagaattatagctataattataaaacatgatatatgagtaccatacattgtgaattaaggattaataataagaatagggcccagtaaaccctacattccatgcaaaacatgcagcaacaataaaatccacaacataaagctatgcctattccaatttttatagctggggtgacaaaaggaactttttccaccaygatggccctgacccaaaccacaatgttagccattatctaaagaaagtgtgggattagagatggctttaatttgttgatgcatatctggagggccaaagaaatattgtctgagttatttgggatatatatacaatatttgattctgataatagcacaggttcctccctgtgccgcagtcagagtatctaatgacattctgttttgcatgatagccttatgcatataatacatttcagcatttataaaagatatatctcacaggctgttacttacagcccatggggtatcattggcaatgacctcaacatgccagatagcatcttataatctaacagatggtaggaagagtgaggccaagtggttatacccatgaaaaatggatctggcccacatactggttatgtggagaaggttggctggctttatttatttatttatttatttatttatttatttatttattatgtatttattttgtgacacagtctccctctgttgccgaggctggagtgtggtggcatgatctcggctcactgcaacctctacttcctggattcaagcaattttcctgcctcagcctgccaagtagctgtgattactggtgtgcaccaccacacctggataattggccaggctggtctcaaattcctgacctcaagtgattcatccacctcggcctcccaaagtgctgggattacaggcatgagccaccatgccagcctggctggcttttttaaatagtctttgtccagtgacctggggtcaagataagcttcatgtacaatgtcctagccacccagaaggcaatcatggccaaagattggtgccacatatccaatgagttcctaagggatgcatatcagttgggttttggtcgttgcgaccaatcggtagcagataagtccatttgttgcaggactatggtatgttggcattgtcttgcaggaatccatcccatgacacaagtagcatttgtcaaggcatcaagggagtgattccattgttcctaacacagtgggactacctgacttaggtgtcctgcagaggtggttagtcatagaaaaccatctcaaatctgaagaaatcattcttcaaaactggagtttttgagctttttagtttggatgtttatctttgggtctagaaaggaggtgcccagtgcaagaaacttttctgtggtctcatttactgagaatggcttcctatgcccagaattgctaaaattgttattaattggccattgggttacattgttccaagtcaggccagacatctgtgcttttgtccattgtttaagtccctctaagtatgtctgtaagttatctaagcatgtccctgtgtgggggatatccaccagggcaagcctgagatgctagagaagggcaatagctcacaaatccagcaagaggacatcggcatagtcctgtgcccattgtaagaaaagatttgaacctccagcaatagtgaaaggaaggatagaagccccaaaatagacacaaataaaagagaagctacattctatagttatatcctgtaaggacatagatattgcttacccagagctgggacagactcataccagtaaaagtaaaagacgaccaggaggaggatcaggaagactaaccttgcccccaagcttatccagagcatcactttgtagtaagaagcttccaaggatttctcctgaagaggaagtatagaccttctactggctcacaagagtaaactagattagcagactgggtgtcagaagtgtagaccttctactggctcacaacggtagactagattagcagactgggcgtcggtagcttgtggggctccataagaaacaggtttaattcaagacaaatgtacctaactgtgaatcccttgcagtttaactgctattggagtgctcagagcacttgatatggacctttccacattggggaaagctggtcactagagacccttccattcaagtctttagtaaggttaaataccctagttgaactgaaacagaattttcctctcatgtggggagggaaagccttttatatccatattcacacaatgcattttgcacttgtcctagattgataacatatttttgtaattaatgaatcatttcatctattaggagatttgcagttaggaaaggccttccatatgttaatgcaaaaggacttaattataagtttccctttggagcagctcaaacctgcagtaaagctacaggcaatagagatagccaggtctctgatgtttcctggcaaa

SEQ ID NO: 721282 - DNA, 1112 bp, Homo sapiens
atttttagtagagacaaggtttcaccatattggccagggtggtctcaaactcctgacctcaagtgatccacccaccttggcctcccaaagtgctgagattacaagygtgagccaccatgcccggccttgcttgcaatttttatgttactaatgaagttggtattttttatttgtttcttggccaaatgtgtggaatcttttgtaaattacctattaatctgtccctttgcctaaacaatatatgaatactattattaatttgatagaaccttagatttaaagtggcttcctaaaatattacaaattctgttaactaaggataaaatgtttcagtcttcacctgaaacaaggattctcatttcttagactcttgttttgaatgtttgcttatttggatccaaaattccaaaaagttgatgttctcctctttttagaaaatagaatctcatgtcatactttgcagatagttatattatcataattttccagatggggaatcagagcacgaagtgttgtacttagagtcacagaatgattcactagcagacatgcatccaaaatccattgctctatcttatttttcaattacgtgccccacactttcctccttcaattcactcctcaccacagtctcatttactgaaataaagagccagttagtattcataggttttattcaaacacataaatatgtaagttcatgaaagagtgaaatgattgcacctaggctataaattatttcttgttcgtgtttacaaataaggttttaattactgtatacttcttggtcataggaaaaatgacttaggaataattttcctccaaccaaaatttagtaagaaataagttttagtacagtggtgtttgcacagagaaagaaacctcaatgtgacattgctgctgtagtttaagaaaaaaaaaataaggtaagctgcaaggaaaggactttaaacttttattacgggagagggttttaagtgggggatgttctccagatccaaaatatggtttccctaactgctataaatatatcagtcacttcttcaccgcctccatacggcagtgaccttgtaggatagatggagtggagagaaaagcctatttctcagaaa

SEQ ID NO: 721283 - DNA, 1681 bp, Homo sapiens
tcccagaactaaataaagatgatacagtctgcctttggcagtgcccccttccaaaataaagagaagcacaaaattagccagaattaagccaaaatggcagaattaagcagctgcacaatcggccacccaggccaggtgggccgcgaggaagtcgaamgctgcttctctgccctggcccccgtagtgctccaagatggcagtggctggtgtaagtcatctcaacccaaaagtggggcagtggccgggagcagactggctgtgagttctgacattctcatcggccatgttccagctgtggcttttagcccttgctcagcttccctgagtctgttgctctgctgggatgcagtgaccacagcacccaaccctcagcctcaaatgacacagtgcctgggcaagcatagtgccctgcatatagtaggtgcttaataaatgacagcagccacattccgatttctcaccgtcattttaccaatgcggcggtagctgtccatcatcctgttggtgcagccctggttgcctcatgagtccctccctcccaccctgtacctggtgtttaagtgacatcacacagggctacacacgtccagtgggaaagggttttctcctcttgggactaaaacataacacagagaacttaatagatgccaaggaaaattcaaaacacctctatgaagtgggtgttaattaataatcaacattagttatttcactaatcactaaccaattgaaaaagaatagtgttgaaaaattaatccaaaagaagaacatggagaacagagaggttaagtaactactctaagaccacacagcgggccagtatcagagctgggatttgagcccaggtgttcaggctctttaatggcttttgctggcctgaaatgctggaagcacttttcccccaaccttccctgccagcccctgatgtgggcagcgtggagagctccaggggctgggaggaggcccatgtggctggagaagggggtggtggggacagcagtgggactgagctccaagaggccatgaaggcggcagtttgattatttggcatctgtgccgagtgacccattgtggggacagggacacagtggggcaaggtgcctgctcatgttccaggggaaggagcagatagcaggcaagggagccggccagtgcactggggatgaggatgctcaggaggaaaataaggcaggtggagaacatggtgtatccaggaggggccgggcggcccccaggcttcagtgcgaagtggcatctgggcaaaggctggaacgtgagagtcaggctagcagggagagcaacacgtgtgaaggtccagaggcgggcactggtctgctctttagaaacagcgcgaaagccagggtgttacagcagggcatgagaggcaggcagatggtggtgggcagcgcctcaggaggcatgaggcagccaggtggccctgtgacagcatgccgctttactacccaccgaggggctttcaactgggatgcgacatggcggccaggggttccacttcgtgggggcatctgactccttccgtgcagggacaccttagtgaaaagtcaccgccgtactttgggagagatggttgcgcctgcgcgtctatcctttcgcttgggacattgagcatggcgacaagcccgaggcctggagggaacctgtggtgcctttgcccggagcc

SEQ ID NO: 721284 - DNA, 633 bp, Homo sapiens
agatgcatattctgattgcctcctttggaaaggcttatgagaaactcaaaagaatgcaaccatttgtctctcacatacctgtgaccaggaagacccctccttgcttcaagttgtccccgtctttctgggtggaatcaatgtacttcttacatatattgattgatgtctcatgtttccctaaaatgtataaaaccaaaggtgtgccccaaccaccttgggcacwtgttgtcaggacttcctgaggctgtctcaggggcacgcgtactcaaccttggcaaaaataaactttctaaattagctaagacctgtctcaaatgtttggggttcacacaagtcatccacaggttactttcaggtggagccatgtcttagtttgcttggggtgctttaacaaaataccagactgggtgacttatagaccacagagctttttttctcacagatatggaggctggaaaagcccaaggccaaggtgccagcagattcagtgtctggtgagggcctgcttcctggttcatcgatgttccttcttgctgtgtcctcacgtggtagaaggggtgaggagtctctctcagtactcttttataagggcactaatcccattcacctcccaaaggccctacttcctaaaac

SEQ ID NO: 721285 - DNA, 633 bp, Homo sapiens
agatgcatattctgattgcctcctttggaaaggcttatgagaaactcaaaagaatgcaaccatttgtctctcacatacctgtgaccaggaagacccctccttgcttcaagttgtccccgtctttctgggtggaatcaatgtacttcttacatatattgattgatgtctcatgtttccctaaaatgtataaaaccaaaggtgtgccccaaccaccttgggcacatgttgtcaggacttcctgaggctgtctcaggggcacgcgtactcaaccttggcaaaaataaactttctaaattagctaagacctgtctcaaatgtttggggttcacacaagtcatccacaggttactttcaggtggagccatgtcttagtttgcttggggtgctttaamaaaataccagactgggtgacttatagaccacagagctttttttctcacagatatggaggctggaaaagcccaaggccaaggtgccagcagattcagtgtctggtgagggcctgcttcctggttcatcgatgttccttcttgctgtgtcctcacgtggtagaaggggtgaggagtctctctcagtactcttttataagggcactaatcccattcacctcccaaaggccctacttcctaaaac

SEQ ID NO: 721286 - DNA, 705 bp, Homo sapiens
gccccttttttcccaaaaacattcgggctgaaagttcaatcccagaaaatatcattttccttttcatcgccaatttactacagacttttatttgaaaatgaggtatgttttaaactctaaaccacagtgttttcattttttcccctgccctaaattatcccttggcagctctctgagttgatttttaaagaatatgttttataatgaattcagaacttccacaaagcacaaaagccatgtgaaagcttcaaatgtgaaatatcacatttctttctttgttgctcaatatccatttttgcattcagrgctgtatgcatcaatttcactgaaagcagggtattgtctacatctatctgtctgaatgagatgactttcaggactttgtaattttgaaaaggtcttcaagccaggctatccttcatcccatttctgttgcattggaatgttagacataacaaggtagacaaaggaaagatataatacagatccttattgacagtcagcaagtacaagtatatgtagaaagagataattttctgctggcattttcccttatctcgattctcttatcctttcatgcattatgttttgcatgaacagaatcggaaaaaaattgacagccttgtatgaagtacaccaagaaagctttctccttcaaagatctttttaggatataaaaactctctaagatttagtaactaagaa

SEQ ID NO: 721287 - DNA, 1070 bp, Homo sapiens
tagaactgtgtaactctaaaaagatttccataaccctaggttattttttcctggttaacaaattttttggttagacaaaaacaacaatagcttatacatcatgtaaatcgttgtttctttgtgcagaattaggggctatatctaccataggagtagttggctcagtggctaggcccttgagtctggagtaaaaggctacagccgagacagtctcatagtcatgtgataaattgcttctgtcttctatactattaaagctcttagaagttatggcaaactacttatttcactcaggtttgtattatattatgtcaaaacatatctatccttctcctatcactgtgctactataatgtacttctttagggacatgaccatgccrtttaacttacatctctctcgctgtaccaaataagactcccctcacaatttactcagtaaatgtttgtggagtaagattttcactggcctcatttctccaactatcctgcttggcaactaatccacagtcatataggcctcttttcacttcttttagtttcttaaatttgggcctccgcacccccactccagctcatgctatttattctacttttaatgatatactgcctgctcgattcccattcccagctccaacattcacactcttcatcttgcccatctttcagaactcagcttcactatctcttaggtgaccttgaataagatcttaatacttttcctttccaacaaataacccagttttaattatctaattgattatgatatcacttattcatcactgtgtatcaactcatcccagattcaatggcttcaaacagagaaacaaaaaaatacattttactgcttacattcagtaggttggccaggtattacatcagctgctctctcctgggttcactcaactggaaggatgaaaatggctttattcacatgtctggcagttggtgcttttgctgattgatggcctctcattctccagtacgttagacaagttttcttatgttgtagtctcaggacattattacaactggcaaaaacagaaactgtaaggtgtctaaaacctagga

SEQ ID NO: 721288 - DNA, 631 bp, Homo sapiens
gtatatgtaatataacatgttatatataacctgcattatgtacgtgatatacatcatacactttaatgatataaatacatgtctatatcattacataaaagtatatcatatcctttttaataactccagagtattaaggatgaatacctagacatgaaattcctagaacagaattcttgcattaaaaaaatctatacctattattatattgcctttcagatargctatagtagtttatactccaacctgtagcatatgagaatttctcttcattgatgataaggatgaagtaataatgacaataatacctaggatgaatggagtgctttttattgattaggcagtctgctaggtgctttacatggatcatctcttttaatcctcagaacaactctttgaagtaggtactgctgtttgtttccattttcaaaagagtaaacaaaggttcagagaactagctcatcccagccacagaccccttatatagaattcatacttaccaccaaagcatcttggaggctgtttctgaaaatcacccataattttcctggtttttcccttaaaacctttttttgggggagggagtttcgcttttgttgcccaggctggagtgcaatggtgtgatcttggc

SEQ ID NO: 721289 - DNA, 578 bp, Homo sapiens
ctgtgatagagatacgaacaaggtgtgccggattagagatcaaacagtcaacttcatatgtgtctgacaaaaagtttttttgcagcctttgaagtgcttttaagccttgcaggaaggttatcttctatgccaggtggagaaagtattagggagagtatttcatggattgggtagagtatgtgctcaaatttaagggaataataaaatcaggttgcacttggggaaactttaagactttaaggcaggaggtttaaggagcctgttgggaaatgttaggtgtcgcttggagatgagaaccaaaagactcttattttaaagggaaaataagggtttacttgaatgcagtaggaagtcactgacaggttttaagcaggaggtgagaaataatcagatttgctttttacaacattgattctaatgtcatattaaggaaaaactgtaatgggggagcagctagaagtagggggagttttcaaacaccgcatgttctcactcatagktgggaattgaacaatgagaacacttggacacgggatggggaacatcacacaccggggcctgtcctggggtggggggag

SEQ ID NO: 721290 - DNA, 893 bp, Homo sapiens
ggacatatagtgatatcaattcttatttaagtgtataagaaaaatgaactttttactatatgcagaagattcaggcattaacagtaataaacagagactaaatatgtgaccttttagtctatgatcaatgacattattgactctaccttaaacagagtgttcaggcaaatagtctttctacaaagtgacttcactttagtattggataggctgtatgtataggraaaaaaggcaggaattttcctccgtaatatgttggaatatatgttgaaattttctggagggattatttccactctgccacatgtttctagaagtgtaagaaagcctcaccactataattgcggattccaaaggtagctatcaatggagtaacagaatttcagcattcttgataaaagtaattaagaagccatgatgatcaaatatacacaaggacatgttacagaggatggagttagtagctctagattttcagtggcaactttgtaaattatttgccaaataacccagtgaggatacaataatgatattcatgtcacaaaactgtaagtatgtaatagacaatacatataaaactgccttgcatacatggatatagatacatatatatacatacatatatacattttgtactacctataattttaatcttctaacattattagcaccctcattcacaggaaaaaaaaactcacatacccacctccttcccactccaacatgtcactcttcccataaagtcatcttttacttttatagtgctcagtgtactcttttataatgcacatccccatatgtaagagatatatacatgcaggcatttgtgccttcttaaatttgtagccaactgagtaaatctaaagtgagaatttcatttttaatatgaacag

SEQ ID NO: 721291 - DNA, 1508 bp, Homo sapiens
ttttttctcttagacatctttgtgtgagtgtcagaattagagactctctttaattctgaagaattctgaagtttactccataacatataaatatttacagtgatttttacataagtaaactctccttttgctggttctacctggaataatttagcagttatgtaaataggcaaagttttaattcatttgcttctatgtagctctcttttgaactctgggagagattaaatatgggataattattaataattttatttctttctagacgaaaaccaaccagtttctccagaagttcactgtcccccagtatgtccaggctgttccccttgtagtctatgagcctgtggaatcacattcaggaaaacacctacccatatattcccatttaggtatgtttgcccttytaaaaatatatataattattgtgttttgtgaaaaatgagataaaaagaaatgaaatttaaaaaagaatctaagttatcacgtagaagttaaatcaaatttaaatcaaaatgttaaggccagtaatgaaataaaaatcatacggttcaaatacaactgcaatcataatgctagggaaaaagaattgcattatattagattttaattttctaaacatttgtgtatatattctcttgatttttacagtaatccattgaagtagagagatagaagtaatattaattttacaacagattctgaaattaaaagaagtggattcaattttccaagctatatttaatagtttaccttcatttaataagtcttttggcttaggatgccttttctttaacataagaagtaaatggtagagcaggaaattgaatctaaaaagctgaaattggctgggcgcgatagctcgcctgtaatcccagcactttgggaggccgaggcaggcagatcaccagagatcaggagttcaagaccagcctggccaacatggtgaaaccccatctctactaaaagtacaaaatttagctggtcatggtggcgggcgcctgtaatcccagctactaaggcagctgaggcaggagaatcgcttgaaccccggaggtggagtttgcagtgagccaagatcgcgcccttgcactccagccaggacaacaacagtgaaactccgtctcagaaaaaaaaaaaaaaaaaaagaagaaaagaaaagaaaagaaaagaaaagaaaagaaaacaaaacaaaaaagaaagctgaaaatttagcataaatattaataatttagcatcagaaatcctaggactgggtctgagtctgataattctctgaattctattttctatttttattttgagatgtgactgaatttcttagataggcatgtaacatttggaggactttatcattatcattatagaaaataagacttctataatttaggtttgaatgttagatgtctaaaattgtttctaaatatttcaagtgagatataaatagcctttgtacattaaaatgcattattctttttcttttaagaagaacatgtaagattcttgaatta

SEQ ID NO: 721292 - DNA, 1508 bp, Homo sapiens
ttttttctcttagacatctttgtgtgagtgtcagaattagagactctctttaattctgaagaattctgaagtttactccataacatataaatatttacagtgatttttacataagtaaactctccttttgctggttctacctggaataatttagcagttatgtaaataggcaaagttttaattcatttgcttctatgtagctctcttttgaactctgggagagattaaatatgggataattattaataattttatttctttctagacgaaaaccaaccagtttctccagaagttcactgtcccccagtatgtccaggctgttccccttgtagtctatgagcctgtggaatcacattcaggaaaacacctacccatatattcccatttaggtatgtttgcccttctaaaaatatatataattattgtgttttgtgaaaaatgagataaaaagaaatgaaattwaaaaaagaatctaagttatcacgtagaagttaaatcaaatttaaatcaaaatgttaaggccagtaatgaaataaaaatcatacggttcaaatacaactgcaatcataatgctagggaaaaagaattgcattatattagattttaattttctaaacatttgtgtatatattctcttgatttttacagtaatccattgaagtagagagatagaagtaatattaattttacaacagattctgaaattaaaagaagtggattcaattttccaagctatatttaatagtttaccttcatttaataagtcttttggcttaggatgccttttctttaacataagaagtaaatggtagagcaggaaattgaatctaaaaagctgaaattggctgggcgcgatagctcgcctgtaatcccagcactttgggaggccgaggcaggcagatcaccagagatcaggagttcaagaccagcctggccaacatggtgaaaccccatctctactaaaagtacaaaatttagctggtcatggtggcgggcgcctgtaatcccagctactaaggcagctgaggcaggagaatcgcttgaaccccggaggtggagtttgcagtgagccaagatcgcgcccttgcactccagccaggacaacaacagtgaaactccgtctcagaaaaaaaaaaaaaaaaaaagaagaaaagaaaagaaaagaaaagaaaagaaaagaaaacaaaacaaaaaagaaagctgaaaatttagcataaatattaataatttagcatcagaaatcctaggactgggtctgagtctgataattctctgaattctattttctatttttattttgagatgtgactgaatttcttagataggcatgtaacatttggaggactttatcattatcattatagaaaataagacttctataatttaggtttgaatgttagatgtctaaaattgtttctaaatatttcaagtgagatataaatagcctttgtacattaaaatgcattattctttttcttttaagaagaacatgtaagattcttgaatta

SEQ ID NO: 721293 - DNA, 1508 bp, Homo sapiens
ttttttctcttagacatctttgtgtgagtgtcagaattagagactctctttaattctgaagaattctgaagtttactccataacatataaatatttacagtgatttttacataagtaaactctccttttgctggttctacctggaataatttagcagttatgtaaataggcaaagttttaattcatttgcttctatgtagctctcttttgaactctgggagagattaaatatgggataattattaataattttatttctttctagacgaaaaccaaccagtttctccagaagttcactgtcccccagtatgtccaggctgttccccttgtagtctatgagcctgtggaatcacattcaggaaaacacctacccatatattcccatttaggtatgtttgcccttctaaaaatatatataattattgtgttttgtgaaaaatgagataaaaagaaatgaaatttaaaaaagaatctaagttatcacgtagaagttaaatcaaatttaaatcaaaatgttaaggccagtaatgaaataaaaatcatacggttcaaatacaactgcaatcataatgctagggaaaaagaattgcattatattagattttaattttctaaacatttgtgtatatattctcttgatttttacagtaatccattgaagtagagagatagaagtaatattaattttacaacagattctgaaattaaaagaagtggattcaattttccaagctatatttaatagtttaccttcatttaataagtcttttggcttaggatgccttttctttaacataagaagtaaatggtagagcaggaaattgaatctaaaaagctgaaattggctgggcgcgatagctcgcctgtaatcccagcactttgggaggccgaggcaggcagatcaccagagatcaggagttcaagaccagcctggccaacatggtgaaaccccatctctactaaaagtacaaaatttagctggtcatggtggcgggcgcctgtaatcccagctactaaggcagctgaggcaggagaatcgcttgaaccccggaggtggagtttgcagtgagccaagatcgcgcccttgcactccagccaggacaacaacagtgaaactccgtctcagaaaaaaaaaaaaaaaaaaagaagaaaagaaaagaaaagaaaagaaaagaaaagaaaasaaaacaaaaaagaaagctgaaaatttagcataaatattaataatttagcatcagaaatcctaggactgggtctgagtctgataattctctgaattctattttctatttttattttgagatgtgactgaatttcttagataggcatgtaacatttggaggactttatcattatcattatagaaaataagacttctataatttaggtttgaatgttagatgtctaaaattgtttctaaatatttcaagtgagatataaatagcctttgtacattaaaatgcattattctttttcttttaagaagaacatgtaagattcttgaatta

SEQ ID NO: 721294 - DNA, 582 bp, Homo sapiens
tatcatcagagtgaagagacaacctacagaatgggagaacatttttgcaatttatacatctaacaaagggctaatatccagaatctacaaggaacttaaacacgtttacaagaaaaaaacaaacaaccccatcaaaaagcgggtgaaggatatgaacagacacttctcaaaagaagacatttatgcagccaacaaacgtgaaaaaatgttcatcatcactggtcattggagaaatgcaaatcaaaaccccaatgtatattgacaatatacatttttttcctgtcatcttgtcaatttgagaattttaatgattacctacagcctgataatgctccaaactttagatgaagttttaattgttctgctctcaatttgggctaatatacccaattatcttctgggaatgactaattttgtatttcccaaattgaaatataatcacttcaagtatttttttcacttgaatctcttttacacagaatgcayccatgtgaactcacatttcattctaaatttgcagttctatatttttattataataaaatgaaacatgattatatttttaactcagattcttttgca

SEQ ID NO: 721295 - DNA, 636 bp, Homo sapiens
aaagtggtagagatagcagcaatttattgtaaattctgatcagatattttagaataatttttgcagttttttaatatgcataactttaaccaaggcacaagttttaggcaagaaccttttatcacgtcaaatacaaacatacattgagagactttattcagttgaaagaccattaaaataggaagaaagatctgatctcaaaaatgtgcgagtatgtcaaaatcaaacataaaaagaattttctcttatagaatagagagaggtggtaagcaaagattagtagagcctttaaggagaatttggggaagcaagggaaaaaaaccagtggaatctgataagaaaagtatyccactgtggtctgccgagtctcaggataagctaattaaggggcacattccaatctttagtgcttgctcaggcttgaagagcagcagaatttcgaggcctgtaggaaggaaagaagccagaataatatttggtcaagacaaagcaaagagtaagaaatgggtagttatgaatacttaatcaatcactcaggaatatgtctggaaagcataagagaattaggaatgattaatcagtagttcaaatttaataaaaagaatgtttttcctttacctacggggttggaagtaa

SEQ ID NO: 721296 - DNA, 636 bp, Homo sapiens
aaagtggtagagatagcagcaatttattgtaaattctgatcagatattttagaataatttttgcagttttttaatatgcataactttaaccaaggcacaagttttaggcaagaaccttttatcacgtcaaatacaaacatacattgagagactttattcagttgaaagaccattaaaataggaagaaagatctgatctcaaaaatgtgcgagtatgtcaaaatcaaacataaaaagaattttctcttatagaatagagagaggtggtaagcaaagattagtagagcctttaaggagaatttggggaagcaagggaaaaaaaccagtggaatctgataagaaaagtatcccactgtggtctgccgagtctcaggataagctaattaaggggcacattccaatytttagtgcttgctcaggcttgaagagcagcagaatttcgaggcctgtaggaaggaaagaagccagaataatatttggtcaagacaaagcaaagagtaagaaatgggtagttatgaatacttaatcaatcactcaggaatatgtctggaaagcataagagaattaggaatgattaatcagtagttcaaatttaataaaaagaatgtttttcctttacctacggggttggaagtaa

SEQ ID NO: 721297 - DNA, 1233 bp, Homo sapiens
  misc_feature 307, 308, 309, 310, 311, 312, 313, 314, 315, 316, 317, 318,319, 320, 321, 322, 323, 324, 325, 326, 327: n = A,T,C or G
gaatgtcccagccaatcagggcccgctggtcactctatgaacatgaagagactggctcaaacaaacatgccctttggctgttatgtttaaagagagctatgtctggagtcagctatcagtgagtttgaaacccccaccagtagaacttctagaaagacttgtcaagtcattggaaagctcttcctttttttcactacactgaccttgagcaaactgccacattcrtgtcagtgttggtttaggcccctggagtcacacaggacaagccagccacctccctccccaggcagcagccacttcctccctnnnnnnnnnnnnnnnnnnnnntctgcatcattcttaaccctttgccagccgacccccaccaggccaactgagctgctctcctgggttggggaggggtgccacaatatggttttgcttgcaggtttgtcgattttttatttttgttcacttaattattggcgtgatgcagctgtggatggtgggaggttcaaaagaggctcacttatacagggaacataaattaaagtaaaagaaggaagggaaacatgtgtagagacagaaaatggagtcacggctaagggtgaaatgcaggggacacagaagttcctagacactgacagtggctggaccatacactggaaccccagcttcctgaaagggggacccagttacatgagtcacatgctccttgctaaaaaccaaacccactcaggggaatagtaaggcttcctgatgctaggagcagaaggactgtctccagaagcctgtggagagaagacatgggggatctgatcacggaacggggtctccagttcctgaatgttttaagggaggctccaaacactcactgatggacagcactgccccaaactgcaattcagtaaaagctgcttttcctagatatgactgtgagtttcagtctacacatccaggtgtatgcactgctggtgtaatccaaagaattttctagaatatctgagaaggggcctgaaccgtggcctttaagtcattctccctgatgttttttcagaactgaagctttggtagcagtagcagtgataagtgggacactactctttcttttttccccctccctttttaaaattttattattttaatttttggagatgaggtcttgctatattgcccaagctggtcttgaatttctggcctcaagctatcctcccactttgcttcccaaagtgctgggcttaccatcatgttcca

SEQ ID NO: 721298 - DNA, 1233 bp, Homo sapiens
  misc_feature 307, 308, 309, 310, 311, 312, 313, 314, 315, 316, 317, 318,319, 320, 321, 322, 323, 324, 325, 326, 327: n = A,T,C or G
gaatgtcccagccaatcagggcccgctggtcactctatgaacatgaagagactggctcaaacaaacatgccctttggctgttatgtttaaagagagctatgtctggagtcagctatcagtgagtttgaaacccccaccagtagaacttctagaaagacttgtcaagtcattggaaagctcttcctttttttcactacactgaccttgagcaaactgccacattcgtgtcagtgttggtttaggcccctggagtcacacaggacargccagccacctccctccccaggcagcagccacttcctccctnnnnnnnnnnnnnnnnnnnnntctgcatcattcttaaccctttgccagccgacccccaccaggccaactgagctgctctcctgggttggggaggggtgccacaatatggttttgcttgcaggtttgtcgattttttatttttgttcacttaattattggcgtgatgcagctgtggatggtgggaggttcaaaagaggctcacttatacagggaacataaattaaagtaaaagaaggaagggaaacatgtgtagagacagaaaatggagtcacggctaagggtgaaatgcaggggacacagaagttcctagacactgacagtggctggaccatacactggaaccccagcttcctgaaagggggacccagttacatgagtcacatgctccttgctaaaaaccaaacccactcaggggaatagtaaggcttcctgatgctaggagcagaaggactgtctccagaagcctgtggagagaagacatgggggatctgatcacggaacggggtctccagttcctgaatgttttaagggaggctccaaacactcactgatggacagcactgccccaaactgcaattcagtaaaagctgcttttcctagatatgactgtgagtttcagtctacacatccaggtgtatgcactgctggtgtaatccaaagaattttctagaatatctgagaaggggcctgaaccgtggcctttaagtcattctccctgatgttttttcagaactgaagctttggtagcagtagcagtgataagtgggacactactctttcttttttccccctccctttttaaaattttattattttaatttttggagatgaggtcttgctatattgcccaagctggtcttgaatttctggcctcaagctatcctcccactttgcttcccaaagtgctgggcttaccatcatgttcca

SEQ ID NO: 721299 - DNA, 1233 bp, Homo sapiens
  misc_feature 307, 308, 309, 310, 311, 312, 313, 314, 315, 316, 317, 318,319, 320, 321, 322, 323, 324, 325, 326, 327: n = A,T,C or G
gaatgtcccagccaatcagggcccgctggtcactctatgaacatgaagagactggctcaaacaaacatgccctttggctgttatgtttaaagagagctatgtctggagtcagctatcagtgagtttgaaacccccaccagtagaacttctagaaagacttgtcaagtcattggaaagctcttcctttttttcactacactgaccttgagcaaactgccacattcgtgtcagtgttggtttaggcccctggagtcacacaggacaagccagccacctccctccccaggcagcagccacttcctccctnnnnnnnnnnnnnnnnnnnnntctgcatcaytcttaaccctttgccagccgacccccaccaggccaactgagctgctctcctgggttggggaggggtgccacaatatggttttgcttgcaggtttgtcgattttttatttttgttcacttaattattggcgtgatgcagctgtggatggtgggaggttcaaaagaggctcacttatacagggaacataaattaaagtaaaagaaggaagggaaacatgtgtagagacagaaaatggagtcacggctaagggtgaaatgcaggggacacagaagttcctagacactgacagtggctggaccatacactggaaccccagcttcctgaaagggggacccagttacatgagtcacatgctccttgctaaaaaccaaacccactcaggggaatagtaaggcttcctgatgctaggagcagaaggactgtctccagaagcctgtggagagaagacatgggggatctgatcacggaacggggtctccagttcctgaatgttttaagggaggctccaaacactcactgatggacagcactgccccaaactgcaattcagtaaaagctgcttttcctagatatgactgtgagtttcagtctacacatccaggtgtatgcactgctggtgtaatccaaagaattttctagaatatctgagaaggggcctgaaccgtggcctttaagtcattctccctgatgttttttcagaactgaagctttggtagcagtagcagtgataagtgggacactactctttcttttttccccctccctttttaaaattttattattttaatttttggagatgaggtcttgctatattgcccaagctggtcttgaatttctggcctcaagctatcctcccactttgcttcccaaagtgctgggcttaccatcatgttcca

SEQ ID NO: 721300 - DNA, 656 bp, Homo sapiens
cccctctccccacagccactcacctgcccacagcaggggcagcagtagcagcagcggcatgtctgaggaagcagcttccagggcttcctgtgtgagcagaaaagaggaagggagtggaggggaaggactacagggccggacaggaagctggggaggagcaggagacctcagccctgcatggaagaggaacctcagacccacacatgctcagagcttgtcccctccacacagattgaccctcatgggccagagatgccagagacccgcccagagatgggaggagatggagcagaatctgagtcttgccttccaggagcaccagagcctggatcagtaccttcagggccatctgagacatgcgaaccccatgtctaaagtccttccactctgaggtgcttttctgtgcacaactgtttacaccagggctgatcactgctggcctggcccgagtcgcagcctcacctagatccatkgggtgtttagtccagcaggatataggattctatagggtccgtgtgagtgtctggggcagagaaacaaagaagagtcctaggtaaagtgaaggtggcagccattcatttattcattcattcactaaagatatagtgagtgacagagcaggagcaccgtcatctcggagaaacactgcctcttta

SEQ ID NO: 721301 - DNA, 698 bp, Homo sapiens
ggaaagtgggggaaaggtcacaagggtacaggatcagggaaagaagaggaggaagaagaagacaagagataaggacaaggagagaaagaaagaagaggtggctggtgcagtgggctcacacctgtaatctcagcactttgagaggcccaggtgggaggatcacttgaggccaggaatttgagactagtctgggcaatatagtgagacccccatctctacaaagaaaaaaaattaaaaattagccaggtgtggtggcgtgcatctgtggtcccagctactccagaggctgaggtggcaggatcgcttgaggcagggaaattgaggctgcagtgagctgtgtatgcttgcaccactccactccagcctaggtgagaaagtcagaccctgtctcaaaaaaacaagaaaacagaaagaaaaaaagagaagaaagaagaaagaaagaaagaaagaaagaaagaaagaaagaaagaaagaaagaaaaagagagagagaragaaaaagagaaagaaggaaagaaagaaagaaggaaagagaaagaaggaaagagaaagaaaaaagagaaaggtaggtcagaacaagaaggaaatgaatgagagaaggaaatgagagaagttaatgaagattaaggcataagtgaggaagcaagcaagtatcaagagactgagtcatgcaatgggcaacagtctgaaaagcagaga

SEQ ID NO: 721302 - DNA, 698 bp, Homo sapiens
ggaaagtgggggaaaggtcacaagggtacaggatcagggaaagaagaggaggaagaagaagacaagagataaggacaaggagagaaagaaagaagaggtggctggtgcagtgggctcacacctgtaatctcagcactttgagaggcccaggtgggaggatcacttgaggccaggaatttgagactagtctgggcaatatagtgagacccccatctctacaaagaaaaaaaattaaaaattagccaggtgtggtggcgtgcatctgtggtcccagctactccagaggctgaggtggcaggatcgcttgaggcagggaaattgaggctgcagtgagctgtgtatgcttgcaccactccactccagcctaggtgagaaagtcagaccctgtctcaaaaaaacaagaaaacagaaagaaaaaaagagaagaaagaagaaagaaagaaagaaagaaagaaagaaagaaagaaagaaagaaagaaaaagagagagagagaraaaaagagaaagaaggaaagaaagaaagaaggaaagagaaagaaggaaagagaaagaaaaaagagaaaggtaggtcagaacaagaaggaaatgaatgagagaaggaaatgagagaagttaatgaagattaaggcataagtgaggaagcaagcaagtatcaagagactgagtcatgcaatgggcaacagtctgaaaagcagaga

SEQ ID NO: 721303 - DNA, 642 bp, Homo sapiens
attctaaatcacattgttagactatctggtattgcttccactctaaatcacattgttaacattatctggtgtggccagccctcatcctaaatcacatttctagaatattcagtgtgatgcaaggtccctgggcaaacaaagacacccctatgaggtgtgacattctaagagctagggagtgtcttccagaagccaagggcaaaggccagacttctcttcaggcaaggttaagttccttagtacacagaataaaatgtcaaattcagaatagcagcgatctctatgtttgagagtgggagatgtgtttggggaagggagtataccaggggtagtgttttctttcttttcttttcttttttttttttttgagacagtttcttgctctgtcacccagactggatggagtgcaacggagcattcacagttcactgcaggcttgacctcccaggctcaagcaatcttcccacctcagcctcccaagtagctgggactacaagcatgtgccaccatgcctgactaattttttaatttatgtagagatgggrtcttgttatgttgcccaggctggtcttgaactcctaggctcaagccgtcctcccacctgggcttcctaaagtgctaggattacaggtgtgagctacc

SEQ ID NO: 721304 - DNA, 657 bp, Homo sapiens
ttgttcagatcctgtttccttattgatttttttcaaatgttatattattaaaagtgagatattgaagtctctcacaattatcatattatttatttcttttatcagttatgttacattttgcattgtatatttaagtgctctgatgttggatgtgtatacattcatagttgttatatctttttggtgagttgatcattttatctttgtataatatccttctttgtctcatgacagtttttgacttaaagtctattttgtccaatataagtatagccagtctttcttttggttaaaatttgcagcatgattttttccatccctacacttttggcctatatgtgtccttaaatctaaacttaataagtttattaagtttattaataataataagttatgtaaacttaataagttgtcaaacttaagaagtttacataaattgatccaayataagttggatcttgttttttttcatccattcagctacattatgtcttttgattgaggagtttaatccctttatatttagagtaattaatgtacttccttttgatgggcgagtacttactatagccatgtttttttactaccttgtagttgttttgttcatctttttttccttgctgtattcttctgtattttgttttgtatttattgcta

SEQ ID NO: 721305 - DNA, 1533 bp, Homo sapiens
atcacatgctaaaggtggctaataggtttgtccctactgccaactataatcaacttatttttaacatgtatagtcacattgtaattgatgtctggaaacctggtttccttttttcctttttttttttttttttgttaacttttatttatagacacatgcatataatttaaaagtcaaatagcccaaaaagacttataatgaaaaacatattcccccaaattccatcccactccccaaaggcaagtgtcttctggcatttaccttaatttttctagacaatgtgaattatccagttaggatattccttcttgactycttgtaaggtaactggattgagcactcctatatcaaccactcccccagcttcactttggcaccctaatcacccccatgtagttacaactgaacttttaaatagttattgtttacattatgactatggaaaaaatagttcactacagttctttcatatgttatcacatatatcactttctaaacatttctatatatctgtattagtcagggttctccagagaaacaaaaccaatagtatgcatatatagaaataggttcattataaggaacaggctcacatagttagggaggctgagaagtcccaagatctacatttggcaagttggagacccaggagagtcgatgttgtgttccagtctgaaagcctgaagtcttgagacccagccaataattcagttcaagtctgaaggcaggaagagacaaattccaacacaagcaatcaggcaggaggagttccctcttacttgagggagggtcagcctttttgttctattctggccttaagctgattggatgatgcccacccaccttgaggagggccgtctgctttattcagtctactgattccaatgttaatcttgtccagaaacaccctcaaagacacacatattattaccagaataatgcttgaccaaatatctgggcaccctatgacccagtgaagttgacacataaaattaatcactgcaatatctttctgacatctatccatttttctgagtactcaaacacataacctaccatttgcattttgctttttcttggaggcctcctacccttagtcttccaccctcctactccagtctggactagttgtgttctaggctgggagcatagctagcatcctctattgtggtggcccctgtctaccacatcctgctttcttggttactgaaagcacatcctctaatagcttctcaagaaagggtgcgagggaagtattgttttagcttctgcatatctaaaatgtgttgattgcaccctagacttgacataattaaaccagttttggaaatcagtgttggaaatcatttgtttcttagagttctgaaggtattccaccattgtcttccagcattctgcttgtggtaagaccaatgccatcctgatgctctttgttttgtgtgtgattgaattttgcctctggatgcttttcaggtcttcggttgatttctggcattccggtacgttgtgatgaggtatctcggggagggcctt

SEQ ID NO: 721306 - DNA, 628 bp, Homo sapiens
ctctgctacttgctagtttggaaactttgggtaagttacccaatctttgtatgcctcagtttcttcaaacaggaccaggattaagatgaggccagtgaagcaactaggatgcaatatttaaggagataacagtcagggtcgtggaagtgctggtaggaacctgagagtaatgtcttcttaaatgttgcaccctaagaacctccctagctgcactccaagcccagttctggccttgtattcatttacaaataaacayaataatagtacctttgttatagatagttacaaagattaaatgacttaagagcaaatgacctaatgcttcacacagagtatgcatcatacaagtatttgcctttatgtaagaaaagctctagtttggctatttaatagctctaccaactttggcaaataatgcaccttcagttttcttagctgtaaaatgagagcatgaccatttcatgttcactaggatggctatactcaaaaaagacagataatagtgtgttgggaaagataaattggtaacctcatacattcctagtgggtaggtaaaatggtgtagtcactttggaaaactatctcggagctcctcaaaagactaaatgtagtgttaccacaagaccta

SEQ ID NO: 721307 - DNA, 603 bp, Homo sapiens
tttgctccgatcatctccaagagaacagtactcaacaggcacctgtcctttgctcataccactggacacccaatcttttagatttccaggtgggaattagacccagtaccctgtgtcccaacaattgtagggagaccaaatcgaaccctctaatggtctcagtgaagcgcccttctcatactgtgaaggagaggaccctgacccttctccttggcagagggaaatgccagcacagctctctccaaagagctcctctttcaagctccattttctcaaaacatattccatcttctgkgtgaacaagggattcaagagtcgttagtgagttttggctcatgaactttgaaatgtttgtatagcggtccttcaaaatgtagcttccactatttttagaacacaggaacaacccattgtgttataacacccagttacacaaggttgaccttgatgatgtcatcgcatttgttgaacaattacctcatgctaggctctcttttttttttttattttaaaaaaatattttattgttaaattacagagtctaaactgattaccactatgccattcttttttttattattattatacttgaagttctagggt

SEQ ID NO: 721308 - DNA, 603 bp, Homo sapiens
tttgctccgatcatctccaagagaacagtactcaacaggcacctgtcctttgctcataccactggacacccaatcttttagatttccaggtgggaattagacccagtaccctgtgtcccaacaattgtagggagaccaaatcgaaccctctaatggtctcagtgaagcgcccttctcatactgtgaaggagaggaccctgacccttctccttggcagagggaaatgccagcacagctctctccaaagagctcctctttcaagctccattttctcaaaacatattccatcttctgtgtgaacaagggattcaagagtcgttagtgagttttggctcatgaactttgaaatgtttgtatagcggtccttcaaaatgtagcttccactatttttagaacacaggaacaacccattgtgttataacacccagttacacaaggttgaccttgatgatgtcatcgcatttgttgaacaattacctcatgctaggctctcttttttttttttattttaaaaaaatattttattgttaaattacagagtctaaactgattrccactatgccattcttttttttattattattatacttgaagttctagggt

SEQ ID NO: 721309 - DNA, 835 bp, Homo sapiens
tcttgaacttctgagcacagcagtctgcctgcctcggcctcccatactgttgggactacaggtgtgtgttactgctcccagctgggaggcaggcttttaaaggcatccaaaggaagatggaaatgctggtaagaaaggaaaatggtggtacataaattatgtaactagcagcactgtgactgttaactcttgtacctttttactgtgagactttaatcccttagtttgggtctggcctaatttctctgatggtaatactgtcaaggaacctagaggatatttacttattttagttgttacttgatttgagaaatggaaatttcctgtatttggtactgtaattagtaatttgtcttctgttcgattttagctggatatagtactgttagaaattactttcttgcttaaagggtaggtgtatttccctttgttgtttgggaaattgttgctgtttagtattttgcattmtgataactttaaaaatgtttactataatcacttctaatttatttgcaaaactgttagtgctttattaaaatgtgatcaggaagaaaaagcaatttatatgttcatttcttatgcgtggataacactggagaaaaatttggtaaatgtgacatttaatggtaaaacgagtatgtggtcaactctatgtacgtgtttttaagtattacccatttctttctatgaatacttctgagttatctgcataaatagtggtagttttgagtaacaatataaacgagtttagtggttgctttggtttaagatgtattcttcggttagcatttaaaagtacagttctaagtttaatttacttttgtattacttttga

SEQ ID NO: 721310 - DNA, 1863 bp, Homo sapiens
ttaaaaggaaatatacctacgatagaaatgaaacaaatagcataaatatctagctgtattttgtctttttggtaactgttacaatatatacattttcaaacaactaagttcagcactgacttcgggagaatctagataaaactgaactgacatataataagcatgggtgtaattaatagcacagcagggaaaaccatgggggtgtttcctgagaaagagggactatagagaggcaccagaaaacccagctcatttgcaggattctggggagtgtcaggagcagttattatattcagaactgagaatttatttctaactcagcaacccgtagttctgactgaggtgcagtggtgcaatcatagctcatcacagccccaaactcctaggttcatatggtcctctcatctcagcctcctgatagctatgaccacaggtgtgcactactatgcccagctcgtttattttatattttgttttcatttcatttgtaaagactgggtcttgctatgttgcccaggcaggtcacgaactcctatcttcaagcagtcctctaacctaggcctccctaagtactgagattataggcatgagccattgcatctggctcaaaagtatttctgtcttagtggctttagcaaagaagtgccattttggggacatatacaatggtgtgctgtttgggagtgatacaaaaataattataagaatggaatgaatatgtcagtatgttttcaaaagcaagttatcccaagtttttaaacaagcataattttagagtttttgtaactaacttagggtttaaatgtagcaaaaattttaaacattatcatgaatacacatacaattttaatcaatttggtttccaagatgaatttacatgcttaaattgctaatttcaagttgctgctagatatgagaaagtttgaaattttgaagaaggaagtggcgcttacaaatgtagcaaacttaaattttgaggacaatttaatttaacttccatttttatgaccagattttgggtcagctattaagcattcaaaaaataaaatctgataatatctggcaattccaattttcagttttattgatcttcaccatgaaataatatttaagttaaggggcaaaattttggaaaagcagatcactttgttgtcctatttagcaggttctcaaattctgccatcttggaatcattgcaagtaattatamcaagacaatatcttgtattttgtatttcattgttacacgtccaatttttctctagagatatcagagaaaacctactcaagaaggaaaggttagataaacagccctctctctgtctttgcctccatttggttccttccaattgtttcccagtgcatttcaaagttacttttattgttctcttcattttctctttcattccagaaatttaagtgattatgtaattcttttgacagctgaaggtggtatccgactttgaattaaaggtttacagctacagcttttcaattagaaaatctcagatcatgtgatctatgagttttaatatcttaggatcactaccagtaaggaataatcactttgaaaaaccttaatgctacctagagtttgtgttttgtgaggttgcttggtaaattattttcagttgataattgaatatggcttcaagagaggtgagctcagacatttggcaatgaatattgaatgtgtattccaagagacatgaccttaaaatatcatcaagctaagtagcagtgaaattgaactctgctgtattacagaagtcagtgtttcttacatctttatgatatataaatatttttgcattgtggtagataataatttgtatggaaaaatttaattgaatttaatttatcc

SEQ ID NO: 721311 - DNA, 1863 bp, Homo sapiens
ttaaaaggaaatatacctacgatagaaatgaaacaaatagcataaatatctagctgtattttgtctttttggtaactgttacaatatatacattttcaaacaactaagttcagcactgacttcgggagaatctagataaaactgaactgacatataataagcatgggtgtaattaatagcacagcagggaaaaccatgggggtgtttcctgagaaagagggactatagagaggcaccagaaaacccagctcatttgcaggattctggggagtgtcaggagcagttattatattcagaactgagaatttatttctaactcagcaacccgtagttctgactgaggtgcagtggtgcaatcatagctcatcacagccccaaactcctaggttcatatggtcctctcatctcagcctcctgatagctatgaccacaggtgtgcactactatgcccagctcgtttattttatattttgttttcatttcatttgtaaagactgggtcttgctatgttgcccaggcaggtcacgaactcctatcttcaagcagtcctctaacctaggcctccctaagtactgagattataggcatgagccattgcatctggctcaaaagtatttctgtcttagtggctttagcaaagaagtgccattttggggacatatacaatggtgtgctgtttgggagtgatacaaaaataattataagaatggaatgaatatgtcagtatgttttcaaaagcaagttatcccaagtttttaaacaagcataattttagagtttttgtaactaacttagggtttaaatgtagcaaaaattttaaacattatcatgaatacacatacaattttaatcaatttggtttccaagatgaatttacatgcttaaattgctaatttcaagttgctgctagatatgagaaagtttgaaattttgaagaaggaagtggcgcttacaaatgtagcaaacttaaattttgaggacaatttaatttaacttccatttttatgaccagattttgggtcagctattaagcattcaaaaaataaaatctgataatatctggcaattccaattttcagttttattgatcttcaccatgaaataatatttaagttaaggggcaaaattttggaaaagcagatcactttgttgtcctatttagcaggttctcaaattctgccatcttggaatcattgcaagtaattataccaagacaatatcttgtattttgtatttcattgttacacgtccaatttttctctagagatatcagagaaaacctactcaagaaggaaaggttagataaacagccctctctctgtctttgcctccatttggttccttccaattgtttcccagtgcatttcaaagttacttttwttgttctcttcattttctctttcattccagaaatttaagtgattatgtaattcttttgacagctgaaggtggtatccgactttgaattaaaggtttacagctacagcttttcaattagaaaatctcagatcatgtgatctatgagttttaatatcttaggatcactaccagtaaggaataatcactttgaaaaaccttaatgctacctagagtttgtgttttgtgaggttgcttggtaaattattttcagttgataattgaatatggcttcaagagaggtgagctcagacatttggcaatgaatattgaatgtgtattccaagagacatgaccttaaaatatcatcaagctaagtagcagtgaaattgaactctgctgtattacagaagtcagtgtttcttacatctttatgatatataaatatttttgcattgtggtagataataatttgtatggaaaaatttaattgaatttaatttatcc

SEQ ID NO: 721312 - DNA, 2522 bp, Homo sapiens
cttgaacccgggaggtagaggttgtggggagctgagagcrcaccactgcactccagcctgggaaacaagagtgaaactgtctcaacaaaaaaaaagggagaaaaaaacgtatttattctctcgtattttctgtgggtcaggaatttggtcacaactcaactgggttcactgcatagggtttcacaaggttgcaggcaaggcgtcagctgagctaggttcaagctcattgaggttgttgacaaaattcatttccttatgtctgtatgattgtgtagctatgttttttattgggtattggctggaggccaccctcaggtcttagacaccacctgctgttgggcttcctcaatatggtcacacacttcatcaaatcagcaaggagaatcttgtgtgcatgccagcaatatgtctatctcatatcctaatgtatgtctctctcctcctcctctcctcttctctctcctttcttctgtgcacacacacacacacacacacacacacacacatatcacaggagtaacaacccatcacatttgcaatattatgtcagttagaaacaagtcacagatcctactcacactcactcgatttcatccaaaagtttgggcagtgatcccatccacactaaaaaaggaagagatcatacagagtataacaccaggacatcgagatcatgggaaacatcttagaagtctgcctatcacagataataaatacttgttgttgtttgaagacattaagtttcaggtaatttcttatgcagcaatagataactaattagtaagagttgtgcctaactaatcaggcacaagttagaatataaggagtgaagagttatcactatagatcctacagatactaaaaagataagagtttgttttactataagcaagcctatcacaataagacaatttagattaaaaggctggtaagttttatgctttgtatattttaccatgataaaaacattttataagcatcacttaccattttatcacctattaaatgctaaaggctgtacatacatttcactaacccttagaacaactttgttcagtaaaaattattcctggtttacagaggagaaaactgagactcagaaaggctactcatttatttgaagtctcacagccttcataatgttattcatgcactctttatgccctagatagttggagaaattacaggggagaatctcagaaataactaaaataattgaagatgtaatcaagaaacaaaagtacagtgtttgaatagagaccaactaaagacagctgggactggttcagtctacatataattgaaaggtaaatcactaggaaaaggaagaaatctctgggtttcaagatgaaatagaagtcatgagaattctataaatttaaattcaagttcactgaagagagctaggagtcagctactgtttgctgcagataatattcagtaaggagctaactgctaatgcactggcctggggaagtgtttaatgtcaaatagaaaccaacactagtaaaatacttccaggaggtaagaatttttttttttttgagacagagtcttgctctgtccccaaggctggaatgcagtggcatgatcttggctcactgcaacctccacttcccaggttcaagcaattctcctgactcagtctccctagtagctgggattacaggcacacaccaccatgcccagctgatttttgtagttttaatagagatgcggtttcaccatgttggccagggtggtctcaaattcctgacctcaggtgatccgcccgccttggcctctcaaagagctgggattacaggcatgagccactgcaccttgctgctccttctttttttgtaatggacctgggagatccttaggaatgagggaaagactcatttctttgaatagggcagaatattaaagactagccagccttcaggcttatggtggttgctgctattctgttgaacgtaaaccatagcctttagaaaggagcaagtctttgtgggatacacaggacttgaagtgcatcaaaggggtggaaacccagctgaccatcataccctcaagtgagtttttccactgaatttgattatattctcatttggcctttctttctgggctttttaagcagccccaaagctctaggtgattttacttttgtaattgtattctcttgggaatactcattcctgattgtttcagtaaacagccttgaactcctggcctcaagtgatcctcccacctcaccctcctgagtagtagttgggactacaggctgcagaaacttttaagagaaaatagagggaacaaacccaagctcatttattcagattaagataaacttgatatcaaaactagacttgtcacagagaatgcaagaggcgggagttatttcccaaatccaagttctgcctctggattattagacgtggcctcactgtccttgatctgcaaggaatttatactgattagagcattagtaaaacctatgttctattcatcatgaaaagtcattttttaaagattccaga

SEQ ID NO: 721313 - DNA, 2522 bp, Homo sapiens
cttgaacccgggaggtagaggttgtggggagctgagagcacaccactgcactccagcctgggaaacaagagtgaaactgtctcaacaaaaaaaaagggagaaaaaaacgtatttattctctcgtattttctgtgggtcaggaatttggtcacaactcaactgggttcactgcatagggtttcacaaggttgcaggcaaggcgtcagctgagctaggttcaagctcattgaggttgttgacaaaattcatttccttatgtctgtatgattgtgtagctmtgttttttattgggtattggctggaggccaccctcaggtcttagacaccacctgctgttgggcttcctcaatatggtcacacacttcatcaaatcagcaaggagaatcttgtgtgcatgccagcaatatgtctatctcatatcctaatgtatgtctctctcctcctcctctcctcttctctctcctttcttctgtgcacacacacacacacacacacacacacacacatatcacaggagtaacaacccatcacatttgcaatattatgtcagttagaaacaagtcacagatcctactcacactcactcgatttcatccaaaagtttgggcagtgatcccatccacactaaaaaaggaagagatcatacagagtataacaccaggacatcgagatcatgggaaacatcttagaagtctgcctatcacagataataaatacttgttgttgtttgaagacattaagtttcaggtaatttcttatgcagcaatagataactaattagtaagagttgtgcctaactaatcaggcacaagttagaatataaggagtgaagagttatcactatagatcctacagatactaaaaagataagagtttgttttactataagcaagcctatcacaataagacaatttagattaaaaggctggtaagttttatgctttgtatattttaccatgataaaaacattttataagcatcacttaccattttatcacctattaaatgctaaaggctgtacatacatttcactaacccttagaacaactttgttcagtaaaaattattcctggtttacagaggagaaaactgagactcagaaaggctactcatttatttgaagtctcacagccttcataatgttattcatgcactctttatgccctagatagttggagaaattacaggggagaatctcagaaataactaaaataattgaagatgtaatcaagaaacaaaagtacagtgtttgaatagagaccaactaaagacagctgggactggttcagtctacatataattgaaaggtaaatcactaggaaaaggaagaaatctctgggtttcaagatgaaatagaagtcatgagaattctataaatttaaattcaagttcactgaagagagctaggagtcagctactgtttgctgcagataatattcagtaaggagctaactgctaatgcactggcctggggaagtgtttaatgtcaaatagaaaccaacactagtaaaatacttccaggaggtaagaatttttttttttttgagacagagtcttgctctgtccccaaggctggaatgcagtggcatgatcttggctcactgcaacctccacttcccaggttcaagcaattctcctgactcagtctccctagtagctgggattacaggcacacaccaccatgcccagctgatttttgtagttttaatagagatgcggtttcaccatgttggccagggtggtctcaaattcctgacctcaggtgatccgcccgccttggcctctcaaagagctgggattacaggcatgagccactgcaccttgctgctccttctttttttgtaatggacctgggagatccttaggaatgagggaaagactcatttctttgaatagggcagaatattaaagactagccagccttcaggcttatggtggttgctgctattctgttgaacgtaaaccatagcctttagaaaggagcaagtctttgtgggatacacaggacttgaagtgcatcaaaggggtggaaacccagctgaccatcataccctcaagtgagtttttccactgaatttgattatattctcatttggcctttctttctgggctttttaagcagccccaaagctctaggtgattttacttttgtaattgtattctcttgggaatactcattcctgattgtttcagtaaacagccttgaactcctggcctcaagtgatcctcccacctcaccctcctgagtagtagttgggactacaggctgcagaaacttttaagagaaaatagagggaacaaacccaagctcatttattcagattaagataaacttgatatcaaaactagacttgtcacagagaatgcaagaggcgggagttatttcccaaatccaagttctgcctctggattattagacgtggcctcactgtccttgatctgcaaggaatttatactgattagagcattagtaaaacctatgttctattcatcatgaaaagtcattttttaaagattccaga

SEQ ID NO: 721314 - DNA, 2522 bp, Homo sapiens
cttgaacccgggaggtagaggttgtggggagctgagagcacaccactgcactccagcctgggaaacaagagtgaaactgtctcaacaaaaaaaaagggagaaaaaaacgtatttattctctcgtattttctgtgggtcaggaatttggtcacaactcaactgggttcactgcatagggtttcacaaggttgcaggcaaggcgtcagctgagctaggttcaagctcattgaggttgttgacaaaattcatttccttatgtctgtatgattgtgtagctatgttttttattgggtattggytggaggccaccctcaggtcttagacaccacctgctgttgggcttcctcaatatggtcacacacttcatcaaatcagcaaggagaatcttgtgtgcatgccagcaatatgtctatctcatatcctaatgtatgtctctctcctcctcctctcctcttctctctcctttcttctgtgcacacacacacacacacacacacacacacacatatcacaggagtaacaacccatcacatttgcaatattatgtcagttagaaacaagtcacagatcctactcacactcactcgatttcatccaaaagtttgggcagtgatcccatccacactaaaaaaggaagagatcatacagagtataacaccaggacatcgagatcatgggaaacatcttagaagtctgcctatcacagataataaatacttgttgttgtttgaagacattaagtttcaggtaatttcttatgcagcaatagataactaattagtaagagttgtgcctaactaatcaggcacaagttagaatataaggagtgaagagttatcactatagatcctacagatactaaaaagataagagtttgttttactataagcaagcctatcacaataagacaatttagattaaaaggctggtaagttttatgctttgtatattttaccatgataaaaacattttataagcatcacttaccattttatcacctattaaatgctaaaggctgtacatacatttcactaacccttagaacaactttgttcagtaaaaattattcctggtttacagaggagaaaactgagactcagaaaggctactcatttatttgaagtctcacagccttcataatgttattcatgcactctttatgccctagatagttggagaaattacaggggagaatctcagaaataactaaaataattgaagatgtaatcaagaaacaaaagtacagtgtttgaatagagaccaactaaagacagctgggactggttcagtctacatataattgaaaggtaaatcactaggaaaaggaagaaatctctgggtttcaagatgaaatagaagtcatgagaattctataaatttaaattcaagttcactgaagagagctaggagtcagctactgtttgctgcagataatattcagtaaggagctaactgctaatgcactggcctggggaagtgtttaatgtcaaatagaaaccaacactagtaaaatacttccaggaggtaagaatttttttttttttgagacagagtcttgctctgtccccaaggctggaatgcagtggcatgatcttggctcactgcaacctccacttcccaggttcaagcaattctcctgactcagtctccctagtagctgggattacaggcacacaccaccatgcccagctgatttttgtagttttaatagagatgcggtttcaccatgttggccagggtggtctcaaattcctgacctcaggtgatccgcccgccttggcctctcaaagagctgggattacaggcatgagccactgcaccttgctgctccttctttttttgtaatggacctgggagatccttaggaatgagggaaagactcatttctttgaatagggcagaatattaaagactagccagccttcaggcttatggtggttgctgctattctgttgaacgtaaaccatagcctttagaaaggagcaagtctttgtgggatacacaggacttgaagtgcatcaaaggggtggaaacccagctgaccatcataccctcaagtgagtttttccactgaatttgattatattctcatttggcctttctttctgggctttttaagcagccccaaagctctaggtgattttacttttgtaattgtattctcttgggaatactcattcctgattgtttcagtaaacagccttgaactcctggcctcaagtgatcctcccacctcaccctcctgagtagtagttgggactacaggctgcagaaacttttaagagaaaatagagggaacaaacccaagctcatttattcagattaagataaacttgatatcaaaactagacttgtcacagagaatgcaagaggcgggagttatttcccaaatccaagttctgcctctggattattagacgtggcctcactgtccttgatctgcaaggaatttatactgattagagcattagtaaaacctatgttctattcatcatgaaaagtcattttttaaagattccaga

SEQ ID NO: 721315 - DNA, 2522 bp, Homo sapiens
cttgaacccgggaggtagaggttgtggggagctgagagcacaccactgcactccagcctgggaaacaagagtgaaactgtctcaacaaaaaaaaagggagaaaaaaacgtatttattctctcgtattttctgtgggtcaggaatttggtcacaactcaactgggttcactgcatagggtttcacaaggttgcaggcaaggcgtcagctgagctaggttcaagctcattgaggttgttgacaaaattcatttccttatgtctgtatgattgtgtagctatgttttttattgggtattggctggaggccaccctcaggtcytagacaccacctgctgttgggcttcctcaatatggtcacacacttcatcaaatcagcaaggagaatcttgtgtgcatgccagcaatatgtctatctcatatcctaatgtatgtctctctcctcctcctctcctcttctctctcctttcttctgtgcacacacacacacacacacacacacacacacatatcacaggagtaacaacccatcacatttgcaatattatgtcagttagaaacaagtcacagatcctactcacactcactcgatttcatccaaaagtttgggcagtgatcccatccacactaaaaaaggaagagatcatacagagtataacaccaggacatcgagatcatgggaaacatcttagaagtctgcctatcacagataataaatacttgttgttgtttgaagacattaagtttcaggtaatttcttatgcagcaatagataactaattagtaagagttgtgcctaactaatcaggcacaagttagaatataaggagtgaagagttatcactatagatcctacagatactaaaaagataagagtttgttttactataagcaagcctatcacaataagacaatttagattaaaaggctggtaagttttatgctttgtatattttaccatgataaaaacattttataagcatcacttaccattttatcacctattaaatgctaaaggctgtacatacatttcactaacccttagaacaactttgttcagtaaaaattattcctggtttacagaggagaaaactgagactcagaaaggctactcatttatttgaagtctcacagccttcataatgttattcatgcactctttatgccctagatagttggagaaattacaggggagaatctcagaaataactaaaataattgaagatgtaatcaagaaacaaaagtacagtgtttgaatagagaccaactaaagacagctgggactggttcagtctacatataattgaaaggtaaatcactaggaaaaggaagaaatctctgggtttcaagatgaaatagaagtcatgagaattctataaatttaaattcaagttcactgaagagagctaggagtcagctactgtttgctgcagataatattcagtaaggagctaactgctaatgcactggcctggggaagtgtttaatgtcaaatagaaaccaacactagtaaaatacttccaggaggtaagaatttttttttttttgagacagagtcttgctctgtccccaaggctggaatgcagtggcatgatcttggctcactgcaacctccacttcccaggttcaagcaattctcctgactcagtctccctagtagctgggattacaggcacacaccaccatgcccagctgatttttgtagttttaatagagatgcggtttcaccatgttggccagggtggtctcaaattcctgacctcaggtgatccgcccgccttggcctctcaaagagctgggattacaggcatgagccactgcaccttgctgctccttctttttttgtaatggacctgggagatccttaggaatgagggaaagactcatttctttgaatagggcagaatattaaagactagccagccttcaggcttatggtggttgctgctattctgttgaacgtaaaccatagcctttagaaaggagcaagtctttgtgggatacacaggacttgaagtgcatcaaaggggtggaaacccagctgaccatcataccctcaagtgagtttttccactgaatttgattatattctcatttggcctttctttctgggctttttaagcagccccaaagctctaggtgattttacttttgtaattgtattctcttgggaatactcattcctgattgtttcagtaaacagccttgaactcctggcctcaagtgatcctcccacctcaccctcctgagtagtagttgggactacaggctgcagaaacttttaagagaaaatagagggaacaaacccaagctcatttattcagattaagataaacttgatatcaaaactagacttgtcacagagaatgcaagaggcgggagttatttcccaaatccaagttctgcctctggattattagacgtggcctcactgtccttgatctgcaaggaatttatactgattagagcattagtaaaacctatgttctattcatcatgaaaagtcattttttaaagattccaga

SEQ ID NO: 721316 - DNA, 2522 bp, Homo sapiens
cttgaacccgggaggtagaggttgtggggagctgagagcacaccactgcactccagcctgggaaacaagagtgaaactgtctcaacaaaaaaaaagggagaaaaaaacgtatttattctctcgtattttctgtgggtcaggaatttggtcacaactcaactgggttcactgcatagggtttcacaaggttgcaggcaaggcgtcagctgagctaggttcaagctcattgaggttgttgacaaaattcatttccttatgtctgtatgattgtgtagctatgttttttattgggtattggctggaggccaccctcaggtcttagacaccacctgctgttgggcttcctcaatatggtcacacacttcatcaaatcagcaaggagaatcttgtgtgcatgccagcaatatgtctatctcatatcctaatgtatgtctctctcctcctcctctcctcttctctctcctttcttctgtgcrcacacacacacacacacacacacacacacatatcacaggagtaacaacccatcacatttgcaatattatgtcagttagaaacaagtcacagatcctactcacactcactcgatttcatccaaaagtttgggcagtgatcccatccacactaaaaaaggaagagatcatacagagtataacaccaggacatcgagatcatgggaaacatcttagaagtctgcctatcacagataataaatacttgttgttgtttgaagacattaagtttcaggtaatttcttatgcagcaatagataactaattagtaagagttgtgcctaactaatcaggcacaagttagaatataaggagtgaagagttatcactatagatcctacagatactaaaaagataagagtttgttttactataagcaagcctatcacaataagacaatttagattaaaaggctggtaagttttatgctttgtatattttaccatgataaaaacattttataagcatcacttaccattttatcacctattaaatgctaaaggctgtacatacatttcactaacccttagaacaactttgttcagtaaaaattattcctggtttacagaggagaaaactgagactcagaaaggctactcatttatttgaagtctcacagccttcataatgttattcatgcactctttatgccctagatagttggagaaattacaggggagaatctcagaaataactaaaataattgaagatgtaatcaagaaacaaaagtacagtgtttgaatagagaccaactaaagacagctgggactggttcagtctacatataattgaaaggtaaatcactaggaaaaggaagaaatctctgggtttcaagatgaaatagaagtcatgagaattctataaatttaaattcaagttcactgaagagagctaggagtcagctactgtttgctgcagataatattcagtaaggagctaactgctaatgcactggcctggggaagtgtttaatgtcaaatagaaaccaacactagtaaaatacttccaggaggtaagaatttttttttttttgagacagagtcttgctctgtccccaaggctggaatgcagtggcatgatcttggctcactgcaacctccacttcccaggttcaagcaattctcctgactcagtctccctagtagctgggattacaggcacacaccaccatgcccagctgatttttgtagttttaatagagatgcggtttcaccatgttggccagggtggtctcaaattcctgacctcaggtgatccgcccgccttggcctctcaaagagctgggattacaggcatgagccactgcaccttgctgctccttctttttttgtaatggacctgggagatccttaggaatgagggaaagactcatttctttgaatagggcagaatattaaagactagccagccttcaggcttatggtggttgctgctattctgttgaacgtaaaccatagcctttagaaaggagcaagtctttgtgggatacacaggacttgaagtgcatcaaaggggtggaaacccagctgaccatcataccctcaagtgagtttttccactgaatttgattatattctcatttggcctttctttctgggctttttaagcagccccaaagctctaggtgattttacttttgtaattgtattctcttgggaatactcattcctgattgtttcagtaaacagccttgaactcctggcctcaagtgatcctcccacctcaccctcctgagtagtagttgggactacaggctgcagaaacttttaagagaaaatagagggaacaaacccaagctcatttattcagattaagataaacttgatatcaaaactagacttgtcacagagaatgcaagaggcgggagttatttcccaaatccaagttctgcctctggattattagacgtggcctcactgtccttgatctgcaaggaatttatactgattagagcattagtaaaacctatgttctattcatcatgaaaagtcattttttaaagattccaga

SEQ ID NO: 721317 - DNA, 2522 bp, Homo sapiens
cttgaacccgggaggtagaggttgtggggagctgagagcacaccactgcactccagcctgggaaacaagagtgaaactgtctcaacaaaaaaaaagggagaaaaaaacgtatttattctctcgtattttctgtgggtcaggaatttggtcacaactcaactgggttcactgcatagggtttcacaaggttgcaggcaaggcgtcagctgagctaggttcaagctcattgaggttgttgacaaaattcatttccttatgtctgtatgattgtgtagctatgttttttattgggtattggctggaggccaccctcaggtcttagacaccacctgctgttgggcttcctcaatatggtcacacacttcatcaaatcagcaaggagaatcttgtgtgcatgccagcaatatgtctatctcatatcctaatgtatgtctctctcctcctcctctcctcttctctctcctttcttctgtgcacacacacacacacacacacacacacacacatatcacaggagtaacaacccatcacatttgcaatattatgtcagttagaaacaagtcacagatcctactcacactcactcgatttcatccaaaagtttgggcagtgatcccatccacactaaaaaaggaagagatcatacagagtataacaccaggacatcgagatcatgggaaacatcttagaagtctgcctatcacagataataaatacttgttgttgtttgaagacattaagtttcaggtaatttcttatgcagcaatagataactaattagtaagagttgtgcctaactaatcaggcacaagttagaatataaggagtgaagagttatcactatagatcctacagatactaaaaagataagagtttgttttactataagcaagcctatcacaataagacaatttagattaaaaggctggtaagttttatgctttgtatattttaccatgataaaaacattttataagcatcacttaccattttatcacctattaaatgctaaaggctgtacatacatttcactaacccttagaacaactttgttcagtaaaaattattcctggtttacagaggagaaaactgagactcagaaaggctactcatttatttgaagtctcacagccttcataatgttattcatgcactctttatgccctagatagttggagaaattacaggggagaatctcagaaataactaaaataattgaagatgtaatcaagaaacaaaagtacagtgtttgaatagagaccaactaaagacagctgggactggttcagtctacatataattgaaagrtaaatcactaggaaaaggaagaaatctctgggtttcaagatgaaatagaagtcatgagaattctataaatttaaattcaagttcactgaagagagctaggagtcagctactgtttgctgcagataatattcagtaaggagctaactgctaatgcactggcctggggaagtgtttaatgtcaaatagaaaccaacactagtaaaatacttccaggaggtaagaatttttttttttttgagacagagtcttgctctgtccccaaggctggaatgcagtggcatgatcttggctcactgcaacctccacttcccaggttcaagcaattctcctgactcagtctccctagtagctgggattacaggcacacaccaccatgcccagctgatttttgtagttttaatagagatgcggtttcaccatgttggccagggtggtctcaaattcctgacctcaggtgatccgcccgccttggcctctcaaagagctgggattacaggcatgagccactgcaccttgctgctccttctttttttgtaatggacctgggagatccttaggaatgagggaaagactcatttctttgaatagggcagaatattaaagactagccagccttcaggcttatggtggttgctgctattctgttgaacgtaaaccatagcctttagaaaggagcaagtctttgtgggatacacaggacttgaagtgcatcaaaggggtggaaacccagctgaccatcataccctcaagtgagtttttccactgaatttgattatattctcatttggcctttctttctgggctttttaagcagccccaaagctctaggtgattttacttttgtaattgtattctcttgggaatactcattcctgattgtttcagtaaacagccttgaactcctggcctcaagtgatcctcccacctcaccctcctgagtagtagttgggactacaggctgcagaaacttttaagagaaaatagagggaacaaacccaagctcatttattcagattaagataaacttgatatcaaaactagacttgtcacagagaatgcaagaggcgggagttatttcccaaatccaagttctgcctctggattattagacgtggcctcactgtccttgatctgcaaggaatttatactgattagagcattagtaaaacctatgttctattcatcatgaaaagtcattttttaaagattccaga

SEQ ID NO: 721318 - DNA, 2522 bp, Homo sapiens
cttgaacccgggaggtagaggttgtggggagctgagagcacaccactgcactccagcctgggaaacaagagtgaaactgtctcaacaaaaaaaaagggagaaaaaaacgtatttattctctcgtattttctgtgggtcaggaatttggtcacaactcaactgggttcactgcatagggtttcacaaggttgcaggcaaggcgtcagctgagctaggttcaagctcattgaggttgttgacaaaattcatttccttatgtctgtatgattgtgtagctatgttttttattgggtattggctggaggccaccctcaggtcttagacaccacctgctgttgggcttcctcaatatggtcacacacttcatcaaatcagcaaggagaatcttgtgtgcatgccagcaatatgtctatctcatatcctaatgtatgtctctctcctcctcctctcctcttctctctcctttcttctgtgcacacacacacacacacacacacacacacacatatcacaggagtaacaacccatcacatttgcaatattatgtcagttagaaacaagtcacagatcctactcacactcactcgatttcatccaaaagtttgggcagtgatcccatccacactaaaaaaggaagagatcatacagagtataacaccaggacatcgagatcatgggaaacatcttagaagtctgcctatcacagataataaatacttgttgttgtttgaagacattaagtttcaggtaatttcttatgcagcaatagataactaattagtaagagttgtgcctaactaatcaggcacaagttagaatataaggagtgaagagttatcactatagatcctacagatactaaaaagataagagtttgttttactataagcaagcctatcacaataagacaatttagattaaaaggctggtaagttttatgctttgtatattttaccatgataaaaacattttataagcatcacttaccattttatcacctattaaatgctaaaggctgtacatacatttcactaacccttagaacaactttgttcagtaaaaattattcctggtttacagaggagaaaactgagactcagaaaggctactcatttatttgaagtctcacagccttcataatgttattcatgcactctttatgccctagatagttggagaaattacaggggagaatctcagaaataactaaaataattgaagatgtaatcaagaaacaaaagtacagtgtttgaatagagaccaactaaagacagctgggactggttcagtctacatataattgaaaggtaaatcactaggaaaaggaagaaatctctgggtttcaagatgaaatagaagtcatgagaattctataaatttmaattcaagttcactgaagagagctaggagtcagctactgtttgctgcagataatattcagtaaggagctaactgctaatgcactggcctggggaagtgtttaatgtcaaatagaaaccaacactagtaaaatacttccaggaggtaagaatttttttttttttgagacagagtcttgctctgtccccaaggctggaatgcagtggcatgatcttggctcactgcaacctccacttcccaggttcaagcaattctcctgactcagtctccctagtagctgggattacaggcacacaccaccatgcccagctgatttttgtagttttaatagagatgcggtttcaccatgttggccagggtggtctcaaattcctgacctcaggtgatccgcccgccttggcctctcaaagagctgggattacaggcatgagccactgcaccttgctgctccttctttttttgtaatggacctgggagatccttaggaatgagggaaagactcatttctttgaatagggcagaatattaaagactagccagccttcaggcttatggtggttgctgctattctgttgaacgtaaaccatagcctttagaaaggagcaagtctttgtgggatacacaggacttgaagtgcatcaaaggggtggaaacccagctgaccatcataccctcaagtgagtttttccactgaatttgattatattctcatttggcctttctttctgggctttttaagcagccccaaagctctaggtgattttacttttgtaattgtattctcttgggaatactcattcctgattgtttcagtaaacagccttgaactcctggcctcaagtgatcctcccacctcaccctcctgagtagtagttgggactacaggctgcagaaacttttaagagaaaatagagggaacaaacccaagctcatttattcagattaagataaacttgatatcaaaactagacttgtcacagagaatgcaagaggcgggagttatttcccaaatccaagttctgcctctggattattagacgtggcctcactgtccttgatctgcaaggaatttatactgattagagcattagtaaaacctatgttctattcatcatgaaaagtcattttttaaagattccaga

SEQ ID NO: 721319 - DNA, 890 bp, Homo sapiens
atagttacattattgtttactttgctgatgtttagctaaatgtagcaaactgaagcattatggatcgggaataacaaagcaacaatgaagaaacagatgttgtctttttcttatttaaatctcttgactacctagaattcaacgtagaaataactttagtgggaggttaacattatttaatgcaaataggttgataaaaatgtagcaaatgaacatgttattaatagttctgtcttctagccttactgtggtaagttgaaggaagttttcatttttgtttttgttggttttagggtttttgctggtttttgttttctttaccagagtgagggtacttttttctctatctgatactttctgaaactcttaaggagttcggtcaaaagtggaaaacaatcaratttctatttttggtgttttcctctttgttctccaaacttgtcatggtctacattcaatgtgttgcactcacatggaatgtctgtctctcagacctttactcgtccacagtctaaaggagactggccaggcgcggtagctcacgcctgtaatcccacactttggaaggccgaggcgggcggattacgaggtcaggagatcgagaccatcctagctaacatggtgaaaccccgtctctactaaaaatacaaaaagttagctgggcatggtggcgggcacctgtagccccagctactcgggaggctgagccaggagaatggcgtgaacccgggaggcggagcttgcagtgagcagagattgggccactgtactccaacctgggtgaccgagcaagactccgtctcaaaaaaaaataaataaaagttaaataaataaataaaggggctgcaggagcatgctgccccagtttctggaaagtctttcaggattag

SEQ ID NO: 721320 - DNA, 890 bp, Homo sapiens
atagttacattattgtttactttgctgatgtttagctaaatgtagcaaactgaagcattatggatcgggaataacaaagcaacaatgaagaaacagatgttgtctttttcttatttaaatctcttgactacctagaattcaacgtagaaataactttagtgggaggttaacattatttaatgcaaataggttgataaaaatgtagcaaatgaacatgttattaatagttctgtcttctagccttactgtggtaagttgaaggaagttttcatttttgtttttgttggttttagggtttttgctggtttttgttttctttaccagagtgagggtacttttttctctatctgatactttctgaaactcttaaggagttcggtcaaaagtggaaaacaatcaaatttctatttttggtgttttcctctttgttctccaaacttgtcatggtctacattcaatktgttgcactcacatggaatgtctgtctctcagacctttactcgtccacagtctaaaggagactggccaggcgcggtagctcacgcctgtaatcccacactttggaaggccgaggcgggcggattacgaggtcaggagatcgagaccatcctagctaacatggtgaaaccccgtctctactaaaaatacaaaaagttagctgggcatggtggcgggcacctgtagccccagctactcgggaggctgagccaggagaatggcgtgaacccgggaggcggagcttgcagtgagcagagattgggccactgtactccaacctgggtgaccgagcaagactccgtctcaaaaaaaaataaataaaagttaaataaataaataaaggggctgcaggagcatgctgccccagtttctggaaagtctttcaggattag

SEQ ID NO: 721321 - DNA, 613 bp, Homo sapiens
ccttctgaagtttccctgaaaatcactaataggaggcagataaatagtagaaaaggcatacaggtttcggcaatgtgtgtacactggagcccttagaatgaagacccacacacaagatgggtgcagaagcttgtctaccacacgaagtttacagaaagaatggggtcttggatcacaggaaaaaaaaaagattatgtgagaaaaggactctgactagcaacagtggacttattacgtaggtgaaacctcactgggagcagtcctcagagagaatagagagaaaatgtttctttcagacctttggagacctcagaygctcagttaacctttcctagatccaggcaaattagcagacctcagagaaagcctggctgcatcaaagtagattctctacagatgcaaatctccccaagacagttttgcagctaagtttgcatttccagcccttctgaatagccattttgatatatatcacggaaatacattttggggtaaaatatattggattccttcatacagctataaaacatacagaaataatttttgtcaatgtctaccacaaatccaatatagtagtaattataaaacctaccagatattgaagaaaaaatat

SEQ ID NO: 721322 - DNA, 613 bp, Homo sapiens
ccttctgaagtttccctgaaaatcactaataggaggcagataaatagtagaaaaggcatacaggtttcggcaatgtgtgtacactggagcccttagaatgaagacccacacacaagatgggtgcagaagcttgtctaccacacgaagtttacagaaagaatggggtcttggatcacaggaaaaaaaaaagattatgtgagaaaaggactctgactagcaacagtggacttattacgtaggtgaaacctcactgggagcagtcctcagagagaatagagagaaaatgtttctttcagacctttggagacctcagacgctcagttaacctttcctagatccagrcaaattagcagacctcagagaaagcctggctgcatcaaagtagattctctacagatgcaaatctccccaagacagttttgcagctaagtttgcatttccagcccttctgaatagccattttgatatatatcacggaaatacattttggggtaaaatatattggattccttcatacagctataaaacatacagaaataatttttgtcaatgtctaccacaaatccaatatagtagtaattataaaacctaccagatattgaagaaaaaatat

SEQ ID NO: 721323 - DNA, 613 bp, Homo sapiens
ccttctgaagtttccctgaaaatcactaataggaggcagataaatagtagaaaaggcatacaggtttcggcaatgtgtgtacactggagcccttagaatgaagacccacacacaagatgggtgcagaagcttgtctaccacacgaagtttacagaaagaatggggtcttggatcacaggaaaaaaaaaagattatgtgagaaaaggactctgactagcaacagtggacttattacgtaggtgaaacctcactgggagcagtcctcagagagaatagagagaaaatgtttctttcagacctttggagacctcagacgctcagttaacctttcctagatccaggcaaattagcagacctcagagaaagcctggctgcatcaaagtagattctctacagatgcaaatctccccaagacagttttgcagctaagtttgcatttccagcccttctgaatagccattttgatatatatcacggaaatayattttggggtaaaatatattggattccttcatacagctataaaacatacagaaataatttttgtcaatgtctaccacaaatccaatatagtagtaattataaaacctaccagatattgaagaaaaaatat

SEQ ID NO: 721324 - DNA, 1833 bp, Homo sapiens
tcttaatttggtcctgtaattcttcattgctgtattaactttctgatgcttttaaggatgttttataacaaattgtttagttttctccaacggaatgtttattctgagttatctaattcatattgtaagtatatagggagtttaatataaaattattaaactaatatttgtgaaagaatgtatttgtgcatttaacaaatatgttaatcctcaaacagttattgggcagctgagcatacagcaataaaaataacataatttttatgtgtacaatatttatggaataaattactggaaccaataaatactttagttaataacatgagcaagaacagaaactgtatacactatagagcatagtaatggaataatgagtgattaaagttattaatattaggtagaaaatgaagggtatctttgagagcagaactcaaggaagcaagcaattcgccttacgaaaaaagagttacctgtagataaaagaaaaactgaaaaatttacaagtcaagactttttgagcaaaaacaaaaatatgactattagtcaccaattcagtacagtggaaaaaaaaacatgaagtaaaccatgttgtggaagagcatgtagggttttgataatcatgggatgattctgaattaattttaaatgcgataggaatatatgagataatttcaccagagaataacatgactgtgtttgcatttcaaaggggtgtatctcgtgcactgtgaagaataaataggttatgtgagcaaataaattcggaggctattgtagtccacagaaaataggtagtgacttaggtgagaatgctgtsaggatgagtggtattagtggtgagaagtcgtcaggccatagatgtatttcagaggactggccaagagaactgcagctaaactggagtgtagggagtgaaatggagaactcaaagatgactctcagcactggaaggtgacagctgtcactgaagcaggctgatgcctctcattaagagagttacttgggaatggcaagatcaaaccttctcactttcaaatttatgaaaaatattgttttccaaacgaatgactttgggatcagaaagccatcattctaattgatggttccacaactacacgggctcacactcccaagagcaaaagtaaatcatcacaaaggtgcttcctgataattctagagaatggagaattactgtaacatctttctgattttaggagaggtaacagttccctttttagcctacacgctatttttctttaaagctcagccaagagactccattataattttcaaatgtgtgtcacttaaattctcatatgaaataccactatgcttaaattagtcaaaacattttcccggtctacacctctatcttgtcattgcaatcattttcacaaaagtgactgcagctcacagaccctaaaaggggaaaatccagggtaggttatctgatctagttagtttggaagacaggatctagagattatttaatatgaaataggtcacctgaaatgaagtgtttattgaaaacagcttggatcaacccagttttctaccactgaaccatgcatttggtttcaaaaacacaacaactctggggaatatcggctgcttccaactgtgttgaaggtgttaaagaaaagagcatataattataaatgatcatctgaggcctttatagtctctgctcaagagactagcgtcttccattcttaacgaaacacccaaatatcttaatagttgggcaaaatcttactatcagagagataattttatcttgaagactgttaaattataatggtgattcactaccttaccacgtctctgactcaa

SEQ ID NO: 721325 - DNA, 1833 bp, Homo sapiens
tcttaatttggtcctgtaattcttcattgctgtattaactttctgatgcttttaaggatgttttataacaaattgtttagttttctccaacggaatgtttattctgagttatctaattcatattgtaagtatatagggagtttaatataaaattattaaactaatatttgtgaaagaatgtatttgtgcatttaacaaatatgttaatcctcaaacagttattgggcagctgagcatacagcaataaaaataacataatttttatgtgtacaatatttatggaataaattactggaaccaataaatactttagttaataacatgagcaagaacagaaactgtatacactatagagcatagtaatggaataatgagtgattaaagttattaatattaggtagaaaatgaagggtatctttgagagcagaactcaaggaagcaagcaattcgccttacgaaaaaagagttacctgtagataaaagaaaaactgaaaaatttacaagtcaagactttttgagcaaaaacaaaaatatgactattagtcaccaattcagtacagtggaaaaaaaaacatgaagtaaaccatgttgtggaagagcatgtagggttttgataatcatgggatgattctgaattaattttaaatgcgataggaatatatgagataatttcaccagagaataacatgactgtgtttgcatttcaaaggggtgtatctcgtgcactgtgaagaataaataggttatgtgagcaaataaattcggaggctattgtagtccacagaaaataggtagtgacttaggtgagaatgctgtcaggatgagtggtattagtggtgagaagtcgtcaggccatagatgtatttcagaggactggccaagagaactgcagctaaactggagtgtagggagtgaaatggagaactcaaagatgactctcagcactggaaggtgacagctgtcactgaagcaggctgatgcctctcattaagagagttacttgggaatggcaagatcaaaccttctcactttcaaatttatgaaaaatattgttttccaaacgaatgactttgggatcagaaagccatcattctaaytgatggttccacaactacacgggctcacactcccaagagcaaaagtaaatcatcacaaaggtgcttcctgataattctagagaatggagaattactgtaacatctttctgattttaggagaggtaacagttccctttttagcctacacgctatttttctttaaagctcagccaagagactccattataattttcaaatgtgtgtcacttaaattctcatatgaaataccactatgcttaaattagtcaaaacattttcccggtctacacctctatcttgtcattgcaatcattttcacaaaagtgactgcagctcacagaccctaaaaggggaaaatccagggtaggttatctgatctagttagtttggaagacaggatctagagattatttaatatgaaataggtcacctgaaatgaagtgtttattgaaaacagcttggatcaacccagttttctaccactgaaccatgcatttggtttcaaaaacacaacaactctggggaatatcggctgcttccaactgtgttgaaggtgttaaagaaaagagcatataattataaatgatcatctgaggcctttatagtctctgctcaagagactagcgtcttccattcttaacgaaacacccaaatatcttaatagttgggcaaaatcttactatcagagagataattttatcttgaagactgttaaattataatggtgattcactaccttaccacgtctctgactcaa

SEQ ID NO: 721326 - DNA, 1833 bp, Homo sapiens
tcttaatttggtcctgtaattcttcattgctgtattaactttctgatgcttttaaggatgttttataacaaattgtttagttttctccaacggaatgtttattctgagttatctaattcatattgtaagtatatagggagtttaatataaaattattaaactaatatttgtgaaagaatgtatttgtgcatttaacaaatatgttaatcctcaaacagttattgggcagctgagcatacagcaataaaaataacataatttttatgtgtacaatatttatggaataaattactggaaccaataaatactttagttaataacatgagcaagaacagaaactgtatacactatagagcatagtaatggaataatgagtgattaaagttattaatattaggtagaaaatgaagggtatctttgagagcagaactcaaggaagcaagcaattcgccttacgaaaaaagagttacctgtagataaaagaaaaactgaaaaatttacaagtcaagactttttgagcaaaaacaaaaatatgactattagtcaccaattcagtacagtggaaaaaaaaacatgaagtaaaccatgttgtggaagagcatgtagggttttgataatcatgggatgattctgaattaattttaaatgcgataggaatatatgagataatttcaccagagaataacatgactgtgtttgcatttcaaaggggtgtatctcgtgcactgtgaagaataaataggttatgtgagcaaataaattcggaggctattgtagtccacagaaaataggtagtgacttaggtgagaatgctgtcaggatgagtggtattagtggtgagaagtcgtcaggccatagatgtatttcagaggactggccaagagaactgcagctaaactggagtgtagggagtgaaatggagaactcaaagatgactctcagcactggaaggtgacagctgtcactgaagcaggctgatgcctctcattaagagagttacttgggaatggcaagatcaaaccttctcactttcaaatttatgaaaaatattgttttccaaacgaatgactttgggatcagaaagccatcattctaattgatggttccacaactacacgggytcacactcccaagagcaaaagtaaatcatcacaaaggtgcttcctgataattctagagaatggagaattactgtaacatctttctgattttaggagaggtaacagttccctttttagcctacacgctatttttctttaaagctcagccaagagactccattataattttcaaatgtgtgtcacttaaattctcatatgaaataccactatgcttaaattagtcaaaacattttcccggtctacacctctatcttgtcattgcaatcattttcacaaaagtgactgcagctcacagaccctaaaaggggaaaatccagggtaggttatctgatctagttagtttggaagacaggatctagagattatttaatatgaaataggtcacctgaaatgaagtgtttattgaaaacagcttggatcaacccagttttctaccactgaaccatgcatttggtttcaaaaacacaacaactctggggaatatcggctgcttccaactgtgttgaaggtgttaaagaaaagagcatataattataaatgatcatctgaggcctttatagtctctgctcaagagactagcgtcttccattcttaacgaaacacccaaatatcttaatagttgggcaaaatcttactatcagagagataattttatcttgaagactgttaaattataatggtgattcactaccttaccacgtctctgactcaa

SEQ ID NO: 721327 - DNA, 645 bp, Homo sapiens
agaaaatggaactaatgtttattaacagttactatggaagagggaatagaaatgtgttgctcttgaacaggtttattcagctttggcactattgacattttgggctagctaattccttgtcacgggcagtatgtcctgtgtgtaggatgttaagcagcatttctggcctccacccactagatatagtagcacacccgcgcccctcccctcctccctgcccccgtgacaaccaaaaatgtctttagacattgccagatgtcccttgggcagcaaaaattgctccctctccccagttaagagccatagttctagagtacagaattagtaccactaaataaawgttattggtgtgtttagaacagtgcctagcacatagctggtactcaaatatttgttgaataaatgagtagtcagattttcattgtgaattaaaaacagaacaaaacttgatgtctgacctttcaagttgcttttacaaaagaaatgggatgtccattgaacatctgttttagatctgatttcccaatctggattattaaaatgaggaggctattttttcccagtatataaatgattctaatactttttgctgtaaaacttttggagtctctctgctaaattatgttccagtttcttagcttggga

SEQ ID NO: 721328 - DNA, 1253 bp, Homo sapiens
tccagccggggtgacagagtgagaccccatctcaaaaaaaaaaaaaaaaagactatcattttccccttatgaatgtatttaattatatcctacagtttttaatatgtagaattgatgatgaatttgccttatgttatcttcaagctatgggctatttaaaagtatacttttagaaagtttctaaaattgttaccagaaattatgatctctccactttctttgaaattttttacttgttttaacactcgtctatgtggttaatttttgaacttgtccacagtttcttgaagggaagtctatttctgcagctaaatctcatgttctgtatgtgtgcatttattctattttttcataattttaaatcttcatcctccctaattatttttatactttatttactgagagatatattaaatatcctactagaagcatggatttgtctgtctcctcatctgtcaacttttgctttttgaggctgtacttgggtgcatatgattcaaaaaaatacatctttttttttaatttgaacttttatcaaaatgaaatgttttccttcatttatgtatgctttcaacattatgtatgatatagctatagtaactttggttagactttgcactgtgtatctttcacgtgtgtgtgtgtgtgtgtatttttttttccactgtgctgcccaggctatagtgcaggggctgttcacagacgtgtctgtggctcmctgctgccttaaactcctgggctcaaatgatcctcctacctcagtctttagagtgatgtgtgccaccactgccaaataattgtttttatttctttagagatagaatttggctatattgcccaggctggtcttgagctcttggtctcaagtgatcctctcacctctgcttcctgagtcactgggattaaaggcatgtgccgccaagcccggctcctctgatacatattttaataccttttaaaatcattctatatctttgtattttaaatatgacttataaatagcatggaatgggattttaacaatttatccatctttaactggattacttagtccatttgcatgtatttgtattctgacatacttggattctgtatagatggtgagtggtgtgtatgtacatgcatgtgtgtttgtgtcattttgtcactttctatttatcctacttatgtttcttttttcctttcttgccttcttttcaattggtgggattttttttcttctctagtcattttaagttagtctttgtttatat

SEQ ID NO: 721329 - DNA, 1253 bp, Homo sapiens
tccagccggggtgacagagtgagaccccatctcaaaaaaaaaaaaaaaaagactatcattttccccttatgaatgtatttaattatatcctacagtttttaatatgtagaattgatgatgaatttgccttatgttatcttcaagctatgggctatttaaaagtatacttttagaaagtttctaaaattgttaccagaaattatgatctctccactttctttgaaattttttacttgttttaacactcgtctatgtggttaatttttgaacttgtccacagtttcttgaagggaagtctatttctgcagctaaatctcatgttctgtatgtgtgcatttattctattttttcataattttaaatcttcatcctccctaattatttttatactttatttactgagagatatattaaatatcctactagaagcatggatttgtctgtctcctcatctgtcaacttttgctttttgaggctgtacttgggtgcatatgattcaaaaaaatacatctttttttttaatttgaacttttatcaaaatgaaatgttttccttcatttatgtatgctttcaacattatgtatgatatagctatagtaactttggttagactttgcactgtgtatctttcacgtgtgtgtgtgtgtgtgtatttttttttccactgtgctgcccaggctatagtgcaggggctgttcacagacgtgtctgtggctccctgctgccttaaactcctgggctcaaatgatcctcctacctcagtctttagagtgatgtgtgccaccactgccaaataattgtttttatttctttagagatagaatttggctatattgcccaggctggtcttgagctcttggtctcaagtgatcctctcacctctgcttcctgagtcactgkgattaaaggcatgtgccgccaagcccggctcctctgatacatattttaataccttttaaaatcattctatatctttgtattttaaatatgacttataaatagcatggaatgggattttaacaatttatccatctttaactggattacttagtccatttgcatgtatttgtattctgacatacttggattctgtatagatggtgagtggtgtgtatgtacatgcatgtgtgtttgtgtcattttgtcactttctatttatcctacttatgtttcttttttcctttcttgccttcttttcaattggtgggattttttttcttctctagtcattttaagttagtctttgtttatat

SEQ ID NO: 721330 - DNA, 3664 bp, Homo sapiens
ggaaaacacctagtaagaaaaaggagagatctctatttaatgatacaatagtagagttataatttcctgtataatgtaaatttcaagcatttaaacattttcattgaattataaaatactatttggaaaagaaagaaaaacagcacaactgcagattacagatgactaagatagatgaatcatgaaaaggtgctagcagagatttctatcacacctatcagggatacacaatttccaagaatttcagaagtgtttggtgttcctattaacgtaaatcctgaaataacacctgagtgaactgtcttctaattcttcaactggatggctttttagtgtaaaagatgttgaatactgattgactttttaataattttatagtatawgtcagaaatactgcacagtccctatttacatcattctacagtggtttttaaaatgttttaagaataaaaaacatgcaaactttatttgatttttctgaggaaataactttttggatttaatttcaatgaaaccgttgataacatttccctccccaacaatctctggcaatgatccctcagattttaatgattatgtattattaccttttaatacaagtagaataacactcagggaatttacaacatttgttattttcagtaaatacattggttgaagtttaaaagtctatgcgtagtaaacttacatctttcaggagcttggtcaatgtgttctggacaaagcaggaagatgtgactgaaatcctgaaaggagccggctcctgcagcacaaggataatgatacatctgggtacatttctcttcacagcatttgatagtggctccaaagtgcttacaaaatgcacatcgctgaaaggggtaaaggagagaaatctctttataaaaccttgaaaaggaatattcaaatataagctgggaaggtataaaaaactctctgtacatcacaagtaaacaaattgaacctgcaaaatattaaacaaaggattcattaaaaataataaaatctacattactcaattttgtgcttcgtgtgctaccaactcatccttccattcaaattagaaagttagaatttcattccttatattttcaaaaataaattgtgaagcattttataaacaaaacctaaaatattttttaaaagcaaatagtaatatggttaaaggggcaggtttctatattgaggattattataaagtttttaaatcctaccaaaactagtaataggaacatatattatttataagacatattactattttttaccctgcctaaaaataaatacaaaataaattcatcaattataagttaacagggacacaaatggttaaagactcacaaaaaaaacaaaactacatacttcaatgtagcaatcaacttcaaatttcttaacaaaagatggaaatgtgggggaaaaaattagtcatctggtatctttcccatttcaacctgcctccattatcttgcaagtggtaaaatgcacagaaataagccccaaacaagaggggcagtctagggcaagtgaacacataagaagtcggaagaaattatgtaaaatgttgcatttacttattcagttttcccttagaatgattcacaaactcttcctcattctcccaagtccattttgagcatcattttctttgaagagagtctgatgggccctgtactatacagtatgaaatctctctgtgggaaatgactatctaacataaatttttgtttacaccgttacatggtacctacttgcttatgccattacatgatcagtttacctttttctcatcctaatccaagatccttcagttgatgcaccatactatctttgtatccaaagcaccaaaaatgctgcttcaaacaggccctaatagataggtgttcctatacatataccaaaaatacttaacttttggtgatcttgtttgtgagtgtggctcataaacagcttagctgagataactggagcctcacgcagcagagacagttggaccctgctaacattactgtggatatcttcacatgttactacactgactttatattctgctaattaaccagggactacagtagttaaaattataattgttttcaatgttttatgtgtaaatctgtatctcacatactatcaaactcttcctcactgtcatcagtctactgcattgaatcaacataacaaagctaaatgactgctgagggctgaatcagaaagaagaaaacaaagagatacaaaactctggccggcccggtggctcacacctgtaatctcggcactttggaaggccaaggcgggcggatcacgaggtcaggagatcgagaccatcctggctgacacagtgaaactccatctctactgaaaatacaaaaaattagccggatgtggtggcaggcacctgtagtcccagctactcaggaggctgaagcaggagaagcttctaaataactcataaacactaattactgttgtgacactttaattttatataatatttataagtatacagaataacatttcggtgctattttggcactcaagggtattaatgcattagaaacacaaaaaaatatttgtcttcattgataaagtgtaataaccagcttttacaaaacaggtaattttttatattgtaactcccaaggtatctaaatatgtttagtgcattaacagaacccagaattaactgcaaatacaacaccttggtagtctaaatgtccaaagagaaaggtcacgtaaatgtcgaaagaaaaagtacaatcaatctgttgaaaaatgtttataacaactcattaacataactaatttctgctaaattgttaaaatctaaaatcgcttattttgatactatatggcaagttttgcagaagccttttgcactaaaaataatcttggcagataaaatataatgagaggtaagtatataataacagaaaataatttaaattgaccagcttctcaatgtctttctcattttagaaacaccaatatgttctcttaatcatatctgcaatgaaaaatattatattagctaaactattatgaaaagtactggaatatatctaacgtactaatttacaatatcatataaagatatcagtgaataaaagaaggaaaataaaacactacatttaggggaacgcttcaaacccatatggtacaattaaatagctaatgaagagcactcggcattaaaagaaaatgtttactatatatacacagtctggaatgtatcttcctaaaccaaataaaaagtacttgtaaaatcatagacaatatcaaagaatggatttctacagggaacttctcaaatgtcaacactcttatacactacacataaaagaaatcaagcaagttaaaatattaataataagtaatatataataagtaacaattacaaagcaaattaacatttggggaggagggataaagtaaacagctcttggctgggcatggtggctcacgcttttaacccccgcactttcagaggctgaggcaggtggatcatttgagctcaggagttcaaaaccagcttgggcaacatggtgaaactccatctctacaaaaaatacaataattaggtaggcatggtgacatgcacctatagtcccagctactcatgagcctggggtgggaaaattgcttgagcccaggaggttgaggctgcagt

SEQ ID NO: 721331 - DNA, 699 bp, Homo sapiens
ttttcacattcattgagacatttttattaagcacttcctgtgtgtcgtgcgtggggctagatcctgaactataaccatgtttctaacaggcataaattttgacttcaagaggtttaaattttaaaaatttttcagttcattgttgtacagatttatgagtttatattaaggtatatcaataatatatgccatcgaagccagtcagcctcatactttcaatttgaaataccattttcagaaataaatgcatattttattacatgacactatataatggtcatataaatgaaactatcttcccattgaataaaaaacaaaactggaaacaaaagtaaccaaggaaacatktctatcagggaggtttttggttgtttgtttatttgcttttttacagtttttaatgctaactttagtttacttttgtgatacttatcagacaattttattctttttctggagtactgtttcaccactcagtagtgaaacaatgcctctttaaagttagtgctaattcttaaatttgacacaagatgcttcattttgaggaaagtattataaaaacaaaatagaaaattgcatctttgaagtatatctccttttagctgttttcttcatacactatgaattttacttaaggaaatgaaaaattaagattggagtgcaatccatccctgactatttctatagcaattggaaagt

SEQ ID NO: 721332 - DNA, 1713 bp, Homo sapiens
cttaagatatcccgcttaggaacatacatagcagggaggaggtgcaataaaggggcaagaacaccgtgtgtgggatcaggagacctggtcctgctattaaatgcctttctttttctcacctgtaaaaatgaatgaattgatctctaaggttccctggagctctaagttctatgactacacagcagatagtatagaaataataatagttgatacctcttttggctgtaagttgaagaggaaactaaaaaagggttgtaaattttaaaactttgattttaccatgagtgcttcttattataattattaggttcttgcagtactggagttgattacataaaactgattacttgggtttaattaattaattccacagcaagagataataagaattatccccactcagataaatgaaagtgggtaaagaaaatagggccaaagataaaaaataaattatcaattgtaagagagattttttgatgaaccaacttcataaataaagctgctattctttgacttgatttgaacctggggaagctaatggtagaaaggatctgcgtcattgtctgctgtgaaaaatggacaaatttggatttgttttttaatgtgcttgtttaagagtctggtcatgatttgttttgggtggaattttgtgacttgaatagagttgatggttattgtacttggtgtaattataaattgaacaattccttcttatagggaatacaagaaagtgtttagagtatttgttttgatgtgtacaacttgttcctctctttccagaattaaagaccttactctycctgcaaaaacttttaatactctgtactaatctctactattgtctttcttcctctcttattatattgctccagctgtgatgtctctcatcctgtcacttctttggcactgagatacaatctttctcttagaataatttgttagccttcttataaattgtgtacctgaactcatatatgattggagcctcttaatatgtaaagcacttgaaatggaatgaccctgggtaagagttcccatcatgtccccttactgcatgtggaggtcttatttttaagctctttgcagtctcttttattaggttccctgggtatagtgaatgcttaataaataatgatgaaggttttgaaatgtcactttacaaatgagaagtcggaagggttttggcctatgtggattaacaagtcatccagtgaagcaacctttatcctcaggattctcacagagtctatctagttaaacctgagatttaacatcaggtgagtagataaaatgagtctatctatccagcacaggatgggagaaatagatcttttcaaaaacagtacaagtgttcataaatgaaggcattgtaattgttagtggcaggaaatagaaatatgggcattatgataccactatggaatgttcataataagtgttagtaattatttgatttacaaaacaaaagggggagtggatattgtgatgttatttaaggataactctgtcatgtgagaagtggaagcaggggaaaataaactgcagggcattttgcattaagtataaaattaaaattaaaaaaaatatgggccaggcgcgatggctcatgcctgtaatcccagcactttgggaggccgaggcgggcagatcacgagatcaggagatcgagaccatcctgacgaacacggggaaaccccgtctctactaaaaaat

SEQ ID NO: 721333 - DNA, 1048 bp, Homo sapiens
tgccmacttctgacaccagtcactgctgcagtgatgacagtaaattccagactttctctgctacttcttttttaaacttatgttatcaatcttttaattttccacagtaatcacacttttgttttcagtcttccttgccacatacatatattaccactgttagagctctagttctaatattaaagaagcagcatagtgtataggcctagagcatgtttcagactaagatctggagtcaaatctagcaacacaactctgattccagatggcagaaagagcacttatatccatctcccttgcacccctaatctgcctccattacatctctaagtctaataggaattacatcattagtaagaatgatagataaagaaaagaagtaaataaagatgaattaagcatagggctagaaaacaagaatccagaagcaggccttggaaatactctaagtcaagaataaggcagggagagtgttgattgttggagaagagagagcagagagatacaatgcagaaaacacaaaaatctgaacaaagagtcagattatcgtttactctagaaatgaataaattgttcaaaatgagaaaatttatctatgtaattcattatcttacacattgaataaaaaataaaatgattttattaccagatgctataatggcatttgataaaattaatcagctaatcaagtttaagacaaattgcaataaaaagaaattacttcgcgatttactaaaatacaacagcaaactttatcctaagtggtaaaacagtttcattataatcacaaaaaggcataatgtcctccatcatcgtaattattcagcattggttttgaagttatagcaaatgcaattttaaaaattagacaatcaatatcagcattagaaaaaaatagaatgttttggtgacgatataactgtatttagaaaatctcaaaaattacagtaagaaaaaacctaccaaattatgaggacattcagcaagatgggtagttcaagttgaaaacatataaatacttaactttctgcctttcctacattaatac

SEQ ID NO: 721334 - DNA, 1048 bp, Homo sapiens
tgcccacttctgacaccagtcactgctgcagtgatgacagtaaattccagactttctctgctacttcttttttaaacttatgttatcaatcttttaattttccacagtaatcacacttttgttttcagtcttccttgccacatacatatattaccactgttagagctctagttctaatattaaagaagcagcatagtgtataggcctagagcatgtttcagactaagatctggagtcaaatctagcaacacaactctgattccagatggcagaaagagcacttatatccatctcccttgcacccctaatctgcctccattacatctctaagtctaataggaattacatcattagtaagaatgatagataaagaaaagaagtaaataaagaygaattaagcatagggctagaaaacaagaatccagaagcaggccttggaaatactctaagtcaagaataaggcagggagagtgttgattgttggagaagagagagcagagagatacaatgcagaaaacacaaaaatctgaacaaagagtcagattatcgtttactctagaaatgaataaattgttcaaaatgagaaaatttatctatgtaattcattatcttacacattgaataaaaaataaaatgattttattaccagatgctataatggcatttgataaaattaatcagctaatcaagtttaagacaaattgcaataaaaagaaattacttcgcgatttactaaaatacaacagcaaactttatcctaagtggtaaaacagtttcattataatcacaaaaaggcataatgtcctccatcatcgtaattattcagcattggttttgaagttatagcaaatgcaattttaaaaattagacaatcaatatcagcattagaaaaaaatagaatgttttggtgacgatataactgtatttagaaaatctcaaaaattacagtaagaaaaaacctaccaaattatgaggacattcagcaagatgggtagttcaagttgaaaacatataaatacttaactttctgcctttcctacattaatac

SEQ ID NO: 721335 - DNA, 2028 bp, Homo sapiens
taaatatattttttatactaagtatagtctagggcattcaatgaaattaaaccacacatataaatatatgatatgtttatgtggatacctgtgtatatgagttaggcctcaagtaagaattgtactgctttctcacgtatagatgattatataagttatttaatcctcatagccattttgtaaggtagataaggaaaaatgtcttttttcacttttggagttatatatatagtgtctgtgggtttgtgtgtgggtgtgtagagttaccatgtacaaactgggtcattcagaatcactggaatcatagcagaagactagtagtaaattccatcctgagttataaatgctaatattccttcagttggtactggcttgcagcaatcccaaattttatattctgaaacatacttccaagtcagaataaaggtaacataaaggtaaccccatttttagaacttcaatatagagcagttttttcctcttttactccctctgctttctcctgaaaatatttttcccctctcaggcaaacaaacacaaattattcttttaaaaaataatattctgtggagtttttcaattccaaaatatttcaaatattaaaaatgcttgatgtgaatttgtcaccagctagaaattattgcattggtaagtataacatttgggtgtgatgattttataggtgcaaaaagtctgaaatatttgaaaactgaggaaagggccagatcagctgcttaaatgatatttgaacaactgttttatctcctaatatgtaatttatctcctaacatgtaataataagcaacgactattatcacaatttttcatcactgcttcagcttctaagcctgattatattcaatttacttcaatatttgttgatcattcactgtaggaaaagcactaagccattttctttacttttgagaaagagttatggaaagtgattatagagtatttggtttatagaaaaatatggacccaggcagaatttgagcaatttggctaagttatttaatctttctgtggttagtaaagtaataatacttaataatacctgcaagtttttagtgagaatttaaaataatgatccctaaatgcttagcattgggccagacacagtatgtgtttagmagtatttagtaaaaaaacatttcttaatataaaacagttaacattcctagaaatatcacaaagtcaaaaagtagaattccatagaattcaacaaaaaacaatttttctttctcagtccacctttaaactcaaatacttaagctattttgttgtctttttcataatatggccatgcctcaaaattttccagtcaatatttaacgatttttaagttctttgtttatatttagtcacaaaataatcttatatccatactaaaattatattaaatcctatataatagtgaacattctaatctttatttacagttaaactcttctcctcctgtggtttgggttagtttcagcttggaagtctacagaagcaaatttctctaccttgagcgtagtctttcccctactcaaatatcaccagtcatgatttctgaacagaggtaatcaacctagaatgaaatcattagggtggatttaattcaatatgactggtccttacaaaaaagggaaatttggacctagaaacagacactcacacagacagaacgccatgtgaagaaaagcagacatggagtgatgcttctacaagtcaaggaatgccaaagatcacattaaaccagcagaaactgagagaggcatgcatcagattctttctcactgcctcagaaggaagcaaacttgctgacacctttatcttggacatttaggctccagaactgtgagacaatatatttctgttgtttatgtcactctttagtggtactttgctatggcatacgtgtacataacttttgtgccacaaatagatcagtttgcatatatatgtagaaatatatttcaatgtatgtgcattagaaatatatatgcgttagaaatatatttctacatatatgtaaattat

SEQ ID NO: 721336 - DNA, 936 bp, Homo sapiens
tggtcttgctgacttcaggaatgaagacgcagaccctcgtggtgagtgttacagctcataaaggtagtgcgggcccaaagagtgagcagcagcaagatttattgtgaagtgcgaaataacaaagcttccacagcatggaaggggaccccagcgggttgccactgctggctggagtgaccagcttttattcccttatttgcccctgcccacatcctgctgattgatccattttacagagagctgattcgtcagttttacagagtgctgattggtgtgtttacaatcctttagctagacacagagcgctgattggagcgtttttacagagtgttgrtaggtgcatttacaatcctttagctagacacagagcggtgattagtgcgtttttacagagtgctgatgggtgtatttacaatcatctagccagacagaaaagttctccaagttcccactcaacccaggaagtccagctggcttcacctctcataaaggcttctgatactgaaagagaacacacatgttgttcccacatgaaagtaactgctttacttaatttcccagaggagcatttataggggcagaagaaatttttgacctgttcaggaaatctataatatctgcctacctattttgtaataactgggctggaccaggtatcagctgactgatctgatacggaagtcagcctgtgtaccacaccaatctaattaaaaccattggcttgcatgtctatgcagtctgtaatagaggagacaacagtctccttacaggggtaaacccaatttgaataaaaatcaattttacttgactttttcagctgttttgttgtttggaagtacttgcagcatgtatttttatcttcttttgcttattttttacctgtatagtggttggctaaaatttttgctagctctcctgaaaaatagagccaaatgt

SEQ ID NO: 721337 - DNA, 1473 bp, Homo sapiens
gggctttgccrgcgtgcctgtctctgcctctctctcatttcccctgcacctgtctgcctggcacatgtccctgtctccctgtctcttttatacctattgatccccacacccatgcatccctctctgcctctccctctctttgtctccatgtttttctatctgcattcctctgggctctgtcaactcccttcatctcaggccacagtgagctgcctttggttttatctagcctaggaagcagttttgattatttatgatgctatcacttattaatttttatctttataataacataaaaacaacgggcgttaagcccctacctgctggcgggtggcagcccaccagcctggtcctcctgcctcacggaccgatggaactgccctgctcctatttatcagacttcgatatccatctcctttggagactgtcggctccaatgttacaatcacagcaatattagaataacaacttaaaaccaatcatttttatggggacacacacagtataaaaagacctgcctatctgaggacacatataacatcagcagctattgctccataaacctgtcagttagagaaacatcccagggagtccttgaacaccattatccaagtttaaccagggagagagggagagagagggaaagaaggagtgagagagggagagagagggaaagaaggagtgagagagggagagagagggaaagaaggagtgagagagggagagaggactttgcaaataattgctcatggaggtctggaaaaaaaaatgtgagcaattgattccagagggagccaatggattgagttcaatggcccaagcccagccccaagtcgtgcttggcatatgtctcctgaaattatggaggaggcttagaaaggagctggggagagggacactcagtatgcatgaccaggccaactccctttggttcccattctagatttgattcccctgaatcagacccttagaggaaatttcatgtgtcagatttttattaggaagcgtttccagggaaaatcaaaagaggagtgaggaactgagaaagagaagggaaacaggaggctctgccagggtatggtatcaagtgaggctccacggagccaagcttgggctcagtcccaagggaagccccagcgacagtgcacgtgacacctcctcattgtcccagccccggggaaaggcagccagtctattgattcccctgcacccattggttaagggatttcgcgtggcttcctggccacttctggctctttgtgtgcacaggcaaatggggttccagcagcctgaaggcaggcccccaccagcaaagaggtgcaggtgctggctgttgggttgagagcacattgggagccagtgtgcatagcaatggcaaagagggcagaggagatacaaatggcaggttgacagcatttgccacacatccccgggcagggtttgcatccagcttctattctgggtctctgctgc

SEQ ID NO: 721338 - DNA, 1473 bp, Homo sapiens
gggctttgccagcgtgcctgtctctgcctctctctcatttcccctgcacctgtctgcctggcacatgtccctgtctccctgtctcttttatacctattgatccccacacccatgcatccctctctgcctctccctctctttgtctccatgtttttctatctgcattcctctgggctctgtcaactcccttcatctcaggccacagtgagctgcctttggttttatctagcctaggaagcagttttgattatttatgatgctatcacttattaatttttatctttataataacataaaaacaacgggcgttaagcccctacctgctggcgggtggcagcccaccagcctggtcctcctgcctcacggaccgatggaactgycctgctcctatttatcagacttcgatatccatctcctttggagactgtcggctccaatgttacaatcacagcaatattagaataacaacttaaaaccaatcatttttatggggacacacacagtataaaaagacctgcctatctgaggacacatataacatcagcagctattgctccataaacctgtcagttagagaaacatcccagggagtccttgaacaccattatccaagtttaaccagggagagagggagagagagggaaagaaggagtgagagagggagagagagggaaagaaggagtgagagagggagagagagggaaagaaggagtgagagagggagagaggactttgcaaataattgctcatggaggtctggaaaaaaaaatgtgagcaattgattccagagggagccaatggattgagttcaatggcccaagcccagccccaagtcgtgcttggcatatgtctcctgaaattatggaggaggcttagaaaggagctggggagagggacactcagtatgcatgaccaggccaactccctttggttcccattctagatttgattcccctgaatcagacccttagaggaaatttcatgtgtcagatttttattaggaagcgtttccagggaaaatcaaaagaggagtgaggaactgagaaagagaagggaaacaggaggctctgccagggtatggtatcaagtgaggctccacggagccaagcttgggctcagtcccaagggaagccccagcgacagtgcacgtgacacctcctcattgtcccagccccggggaaaggcagccagtctattgattcccctgcacccattggttaagggatttcgcgtggcttcctggccacttctggctctttgtgtgcacaggcaaatggggttccagcagcctgaaggcaggcccccaccagcaaagaggtgcaggtgctggctgttgggttgagagcacattgggagccagtgtgcatagcaatggcaaagagggcagaggagatacaaatggcaggttgacagcatttgccacacatccccgggcagggtttgcatccagcttctattctgggtctctgctgc

SEQ ID NO: 721339 - DNA, 1473 bp, Homo sapiens
gggctttgccagcgtgcctgtctctgcctctctctcatttcccctgcacctgtctgcctggcacatgtccctgtctccctgtctcttttatacctattgatccccacacccatgcatccctctctgcctctccctctctttgtctccatgtttttctatctgcattcctctgggctctgtcaactcccttcatctcaggccacagtgagctgcctttggttttatctagcctaggaagcagttttgattatttatgatgctatcacttattaatttttatctttataataacataaaaacaacgggcgttaagcccctacctgctggcgggtggcagcccaccagcctggtcctcctgcctcacggaccgatggaactgccctgctcctatttatcagacttcgatatccatctcctttggagactgtcggctccaatgttacaatcacagcaatattagaataacaacttaaaaccaatcatttttatggggacacacacagtataaaaagacctgcctatctgaggacacatataacatcagcagctattgctccataaacctgtcagttagagaaacatcccagggagtccttgaacaccattatccaagtttaaccagggagagagggagagagagggaaagaaggagtgagagagggagagagagggaaagaaggagtgagagagggagagagagggaaagaaggagtgagagagggagagaggactttgcaaataattgctcatggaggtctggaaaaaaaaatgtgagcaattgattccagagggagccaatggattgagttcaatggcccaagcccagccccaagtcgtgcttggcatatgtctcctgaaattatggaggaggcttagaaaggagctggggagagggacactcagtatgcatgaccaggccaactccctttggttcccattctagatttgattcccctgaatcagacccttagaggaaatttcatgtgtcagatttttattaggaagcgtttccagggaaaatcaaaagaggagtgaggaactgagaaagagaagggaaacaggaggctctgccagggtatggtatcaagtgaggctccayggagccaagcttgggctcagtcccaagggaagccccagcgacagtgcacgtgacacctcctcattgtcccagccccggggaaaggcagccagtctattgattcccctgcacccattggttaagggatttcgcgtggcttcctggccacttctggctctttgtgtgcacaggcaaatggggttccagcagcctgaaggcaggcccccaccagcaaagaggtgcaggtgctggctgttgggttgagagcacattgggagccagtgtgcatagcaatggcaaagagggcagaggagatacaaatggcaggttgacagcatttgccacacatccccgggcagggtttgcatccagcttctattctgggtctctgctgc

SEQ ID NO: 721340 - DNA, 630 bp, Homo sapiens
tgtcttacccacaaagttttttaagaaataaataatagggaaaaataaactgcatgcatggaacgtatacatggcagttgcttttgctattattatagtttcttcttccctgggggttcctgatctggggacccctgtacctgtctccgtgtggacctgatgttctcagtctggctgcygcagccgaacagacccgtgacccctttgaaacacctcctcagcaagttgaacctttctctgggaatttcagagtgggttcactagctatgaggcctctgcttgttgctagatgccgagaaaacaaatattgttttagaaacattaataattgaaaagttttcagcagagaatcggccagcattaggggaattgaaaattaagactaagacactacctcaagctgatttcctgatgaataattcatggggccgatgcccacgaagacctggaggagaaaataccttctgtgcctgtcctccccatcactgccaccacgccgtcacctggacgtttccctgactcctccatggggaaggggagatctggggagtaggaagagctggcaacacagcagagctttgatttgaattctcatcaccattttgcctgcatgtggctgtgtggtcattg

SEQ ID NO: 721341 - DNA, 628 bp, Homo sapiens
cacgactaaggctcttgggtggaggtgggaggcctttcttgactgccctgggtaatgggtgctcaggccttgctgagtgactttgtctggaggaaagtaggggagaatgttctcaaaaggggtgcttatatttgagaagcagagactcgccacaccagacatgtggcaccctcacacccagaaccagcaactccttcctcaaaccacaactctctgccaaaacatcttacctcccagcagatacagtggctcttttttctttgctttggtcaatagctttttctccattattagcagtgactagcctttctgtgcctgtgagtgaagcaagacagaaaccattgtgcccattttacccataagcaagaaaaatgatacaccatggaatattatgcagctataaaaaaaagagatcatgccctttgcagggacagggatggaggtggaggccattatccttagtaaactaaggcaggaacagaaaaccaaataccgcatattctcacttagaagtgggagctaaatgatgagaacacatagacacatagaggggaacaacacacactggggtctatcggagggtgrggagtgggaggagggagaagatcaggaaaaataactaatggat

SEQ ID NO: 721342 - DNA, 649 bp, Homo sapiens
ttctcccattctatacacagtacktcctggtcttgctcattgttgatctccgctacttggatctacacctcttctccccttctggcagggatctctgccttcgctgctatctcctggctacctgtgccagggcctagttcagagtagatgctcagtacatatatattgaatatatcttgaatgtatgaaagaacaaatgagtttcctttctacaaaggaggggactgaggcgcagagaaatgagctgatcacttgtccaaagtgacatggcaaataaatgacagctgtgggattcaagtcctgccagactcctaagcttggaaggtagggttgcctgggagaaatgctggatgggtcttttttgatgatcactaaagtaagttgcctttgagtgaaaaggattcagtagctgaagtttgcaaacacagtgccacgaagcccttgccgccctgccttcctgtccgggagatggctccaggtagctccaggcaaccagaagatgtgctgggatggaggctgtggatatcatctttggtgttattttgcttctagagatgggagctcttttctgagcctatttgtagggacatctgcatatacgagccacctatctggtaagtccttcccatggtccgaggcctgtacagca

SEQ ID NO: 721343 - DNA, 649 bp, Homo sapiens
ttctcccattctatacacagtacgtcctggtcttgctcattgttgatctccgctacttggatctacacctcttctccccttctggcagggatctctgccttcgctgctatctcctggctacctgtgccagggcctagttcagagtagatgctcagtacatatatattgaatatatcttgaatgtatgaaagaacaaatgagtttcctttctacaaaggaggggactgaggcgcagagaaatgagctgatcacttgtccaaagtgacatggcaaataaatgacagctgtgggattcaagtcctgccagactcctaagcttggaaggtagggttgcctgggagaaatgctggatgggtcttttttgatgatcactaaagtaagttgcctttgagtgaaaaggattcagtagctgaagtttgcaaacacagtgcmacgaagcccttgccgccctgccttcctgtccgggagatggctccaggtagctccaggcaaccagaagatgtgctgggatggaggctgtggatatcatctttggtgttattttgcttctagagatgggagctcttttctgagcctatttgtagggacatctgcatatacgagccacctatctggtaagtccttcccatggtccgaggcctgtacagca

SEQ ID NO: 721344 - DNA, 649 bp, Homo sapiens
ttctcccattctatacacagtacgtcctggtcttgctcattgttgatctccgctacttggatctacacctcttctccccttctggcagggatctctgccttcgctgctatctcctggctacctgtgccagggcctagttcagagtagatgctcagtacatatatattgaatatatcttgaatgtatgaaagaacaaatgagtttcctttctacaaaggaggggactgaggcgcagagaaatgagctgatcacttgtccaaagtgacatggcaaataaatgacagctgtgggattcaagtcctgccagactcctaagcttggaaggtagggttgcctgggagaaatgctggatgggtcttttttgatgatcactaaagtaagttgcctttgagtgaaaaggattcagtagctgaagtttgcaaacacagtgccacgaagcccttgccgccctgccttcctktccgggagatggctccaggtagctccaggcaaccagaagatgtgctgggatggaggctgtggatatcatctttggtgttattttgcttctagagatgggagctcttttctgagcctatttgtagggacatctgcatatacgagccacctatctggtaagtccttcccatggtccgaggcctgtacagca

SEQ ID NO: 721345 - DNA, 956 bp, Homo sapiens
aatgaccaatttaccaggtaattgattcactaaatatttgtttctattctacttaggaagtttcagcaatttgkgttgcaaatcgttttggcaggctttgaggaattttttttttttttttgaagtttgggtctcattgtagccagagggaggggccatccctgtgccgcctccacgtgcctgccttctgccttcaaaacaactgggaatgtgcccccaaagcctcctctaacatggctgctatggccacagccctcaggcagagcatcggaagggaggcctcctgaccagcttttgggtagctggacccatcacaaacacatgctcccagccaggcccaggccattgccatgccagactgggtcatttcaaaggccacataaaccagagaagttcaagtgagggaagtgaggtatttgcctcggatatgaagtttagggggcacacacaaaactcatgagaagtgttttaatgcaatatgttttaaatcaaaattaatgcaaaaaattcatgatatacaaaatgacaattttttttcgtttttttatttgtttgtttgtttgtttgtttgtttgtttgtttgagacagagtttcgctcttgttacccaggctggagtgcaatggcacaatctcggctcaccgcaacctccacctcccgggttcaaacgattctcctgcctcagcctcccgagtagctgggattacaggcacgtaccaccatgcctggctaattttgtatttttagtagagatgaggtttctccatgttagtcaggctggtctcgaactcccaacctcaggtgatccgcccacttcggcctcccaaagtgctgggattacaggtgtgagccactgcgcctggccgaaaatgttttaaatagagtcatgatcagtaacaatgctgtgacaagccatattggagcatgagggaaaaggaaaaatcaataatcctgttt

SEQ ID NO: 721346 - DNA, 849 bp, Homo sapiens
gaaatgaatatctggtcttccaatccagtagattttgcaagacttgaagctgaagtaatgccttgttgttgacaataatataggtcaccgggacacctgggaaaagggaataactaggttgtctggtctgactggaaattattgcagagctctgtcgtgttttcagtgcctcaggccataggacaaatttgtagctgatctgggagtaagttcaagagtcaagatgatgccaaaatataatttttttcatcaaatctctcctgaagctgtaagaaaataacagtgatttaagcttttcatctcttttcattatccatttttaatgtcatggagacatgacaatacagcaaaataaaaatgtataaagagataaaaaatagcaaacagtgagtgccacatactgccttttgaagagtttaaagcacatttatggatatcatctcacactgagagatgatatttaatttttcaaagccttactgagtaactttaacaatatttgaaatatatacaattggttacttttttctgtctgaaagaaatcaacattctactcattttttctttcttactgttccctacttcaaacttggttgggttgtagtttatctttcagaaggggaggtgcataagtatttccacctttataagggttggttttttgttcctaacaccccagatttcatgtttgtttcattttgtctatctcatttctaaaacattctttctggagtaarataagataaaaatcaataattcaaccattgtggttagatgcctaccagccttcaattcccaacacattgatcacacaaatccctttcttcatgtacttagttttttttatta

SEQ ID NO: 721347 - DNA, 582 bp, Homo sapiens
tctaaaagtaaataaataattagctgatccttcacacagtgttttccaatgtcctcattactgtcttctgcacaaaccactagggggcaagacagtctaacatattagagtagacctaattgtatccaacagagggcagtaatacacaaactagggagacaagtcaattacattacatttcagccattcgcatctgccatttcctctggggattataagagggagggaagaaaggaaggaaggaaggaagaaaggaaggaagaaagcaaggaagggagggagggaacaaccctctcaataaacaattcattggctgacttttctgaaattgttaaacaagtgaatttaataracaattttttctagatttaaataatttaactttgaagtgaaaaaccataagttagaagataagtgttaacaaatagaaacaataaaatgtgaaaatcatttccaatgaaagggagcaagtgttaacaattttatttttatgggcaaatgcaatatcatgttacttttaaaggataagtagtgaatcaacagcataaataattatttattagacaaaaaacaagagctgag

SEQ ID NO: 721348 - DNA, 604 bp, Homo sapiens
ggaaacagggacatacatggcatatatggtcagcctaccagctgcagaaagcataattggtgaattatttgcccaactgctccagatcctggtcagtagcccacacactagaattatagttgctgagcccatccccccttattccaagaatctctgattggctgccttggaagctttagctcttctcactgtcataccacctttggttctactgtccaaatgctgaccttctgttataactgcaggcagcctggtggtcaagcagatgtccccaagaacttcctggggttctctctgaactttgagccatttagaatcaccaggatgccttggtcactgtcaacatcaaaatgtgaatcttcttagacaccaccagtagttamtgtacctctagaggaactgagggttcttcacccacaaatgaagaccatctctaaagtgccccatcacattctagaaggatacagctgctggaagaaaataaagtgtcccaccaccactcccacagttcttaagctcatacacaccaacaaccactccaggaaccaactgaagacttcaaatatcatagtaccagagagggttgatgccaaacccacttcta

SEQ ID NO: 721349 - DNA, 1481 bp, Homo sapiens
tattggctacatttatcaatcctactccaaccacagaatctactgcaaaaagtggaattatattataaatatcatctgctgcatcaaatctcaaggtttattgaagcaatgttctgatcttttatgaccgttagacacactttagattgacagcaattttgtagcactggccaaagctcctaaaatatagtctctcaattaagaaaaaaaaatcactgaaaaaaaattttgcaaagtatttaaaaataactattaatttcaattagtaacatctctttacaacctacagatgaraaagtgcagcatctaaggtgttggttgatgttgacttaaaaagacaaagatggaacgcattttactaaaaggaagtgagattgttgactgacagttcttggaaaaaggttaaaaattcaaaaggagtggctgcatgtggctcagaacttaaaagccttttctcttctcaacagaagagcagtctcaagtaataatacgttgccatggagatgagaaactagaggaatcagagaactcaatttgcagttaaatgggctggaaacaattcttactacttggtgaaggaaagcgattaaaaatatacttgattgccacagggaattttttttcaccaagacatttcccaacctcattaatgaacaaggaagtctaaaaacaaatggaaacccaagatatccatagattgaacccattaaacataattcagaattttaaacattatcacaaattattattctgggtgactgtgcttcttttcaatggtactttatcagtagatactggaatgagactaaaactgcattcaagaacaaactgatataactgaaggaactgaaatttcagtggaaaaaaaagagcatgacaaatggaaaagtagccagagtaagaaatagagtcaggtagtaaaaatccaggtttaaaaaaatctcttcagagtcaatcacagaatacctttgtgagtgctgtaaagggctgcaaacgtcaccatgaagaaagttgtggagtatttgccagcattaactaaatgaggaaaggccctttttgtgtctcgatatcggcgcaggcactggatgaagcgaagccaagcaggaatgcactgaacaatggcccgcacaccatatgtatatttgtggcaaattcctgattctgtgaagatttcaaagaagaaaaattaccattgaaaaaaagtaacttgttcacatcatttagccatatagtgtagctaataccaagtctaaaaaagcaaaaaaccttcagaatcactttcttctttgcaactattatattctcaagattttcttttttttttttgagactgagtctcgctctgtggtccaggctggagtgcagtggcacaatctcagctcactgcaacctctgcctcccggttccagggattctctcatctcagccttttgagtagctgggattacaggtgcataccaccacacccagctaattttgta

SEQ ID NO: 721350 - DNA, 2233 bp, Homo sapiens
ctgggcaacagagygagactttatctcaaaaattaaataaataaataaataaaaagaagagacaaaggataggttcaggaaaacagtgtattcccatcacaggtcctaaagagatggagtcactgcatgccaagagggggtcacatgggaggcagcaccgggggagtggtctcagccaggcagacagggagaaaggacccataggcttgctcacgggtgtcagggtggaatatatgagcaagaggtgcaggggtgtccatcagtgcatctgaatgttactgggtctcagtcaggggaggacagggaggtgaacctgtggcaggggctaaacataccacgctggggctcacctgggagagatgcgcaaaacttacaatgcagtgcactgggggcacctgtctgcatctcacccccgcagaggagtggctgtaggtacctccctgtaatccaattgtgagttggagtcttgctttaggctgtctgaataattagcacaaatgtagtcaactatcccctactgtaggggaatttataggcagggcttatagggatttgcaaagcaagtgagaatactagcagattgaaaaatgaaaacaatttgttgggcacaatcgaactacagaaatatcttctttaaattctgactatctttttttcttttttcagtattaagtccatctgagaaactagagccttgggacccagggatgaggaaacttaccgtacagacatgcgggctgaccttcattcaccctgcgggccatggcctctgccatccaactgcagaggcttcagccgaaactctctccagcactgccctaaacagaccaagtgtgagggagggagcatgtaatgaaaagtccacagagaacaagaagccacaagattcggtgctctggagccattctagatggtttcaggggaactagcttcccacctctgacagggataccatggcaaataccactctttgcctaggattataattctttgtgcacaatgcatcccatcccaaagacagtccacagcaggacttgctccatctctgaactggtcttacccccttaaacctgcctttatatctaggagtttctttattttattttatttttttgagacagagtctcgctccattgcccaggctggactgcagcggcgtgatctcagctcactgcaacctccacctcctgggttcaagtgattcttgtgcctcagcctcccaagtagctgggattaaaggcacgtgccaccatgactggccaatttttatatttttagtagagatgaggtttcaccatgttggccaggctggtctcaaactcttgacttcaagtgatccgcccgcctcagcctcccaaagtgctgggattacaggtgtgagccaccaggcccagcctatatctaggagtctcttgatgagcattggtcgacagaaagaagtctcttctaaaaattgttaatgcttttatagactactcatagtctgagtcataaaacatcatttgcctttcaatttataccttccaagtgaatatgattattgaggattatctaattattatctacgtttctctctagatataaaaaacaccatagatcctatacacacaaaaatggtttttctatcagaaatggactcactcgcctggcaaaaggacacagattagattattctaatctcaaggccccttaggcttatgaattcaaaaaaaaaaatagaagaaatgaacaaaaacttaaatcacagtttgttattaagtaatatctgaaatgaattagaaagaaaccataagccttaacaatactccaatcacagttaaattaatttagacagaaaagcaaatagcaattgacttgaaaataagaagtggagccgaaggtggatacaagaaatccaggagggctaagataaatcccaaatccaatgttcatcaatgcctacacattcagtacaacctgatggcattaattctgtggttggggaaatgtgaaagtgaaatcgataataccacagttctaaatgtgcactgttggctgaacttatggtgtggtggggggtggtaaaaattaggcttctaagaaaggatgggactctgccctccaggcaaggagtaaatggccccagcagatggaaaactaaagcaaatgtaatcacctgcattttgaaaataggtgtgtttctgagaatttgtttgaattagttctttgtaaataaaacaggattttgaatgca

SEQ ID NO: 721351 - DNA, 2233 bp, Homo sapiens
ctgggcaacagagtgagactttatctcaaaaattaawtaaataaataaataaaaagaagagacaaaggataggttcaggaaaacagtgtattcccatcacaggtcctaaagagatggagtcactgcatgccaagagggggtcacatgggaggcagcaccgggggagtggtctcagccaggcagacagggagaaaggacccataggcttgctcacgggtgtcagggtggaatatatgagcaagaggtgcaggggtgtccatcagtgcatctgaatgttactgggtctcagtcaggggaggacagggaggtgaacctgtggcaggggctaaacataccacgctggggctcacctgggagagatgcgcaaaacttacaatgcagtgcactgggggcacctgtctgcatctcacccccgcagaggagtggctgtaggtacctccctgtaatccaattgtgagttggagtcttgctttaggctgtctgaataattagcacaaatgtagtcaactatcccctactgtaggggaatttataggcagggcttatagggatttgcaaagcaagtgagaatactagcagattgaaaaatgaaaacaatttgttgggcacaatcgaactacagaaatatcttctttaaattctgactatctttttttcttttttcagtattaagtccatctgagaaactagagccttgggacccagggatgaggaaacttaccgtacagacatgcgggctgaccttcattcaccctgcgggccatggcctctgccatccaactgcagaggcttcagccgaaactctctccagcactgccctaaacagaccaagtgtgagggagggagcatgtaatgaaaagtccacagagaacaagaagccacaagattcggtgctctggagccattctagatggtttcaggggaactagcttcccacctctgacagggataccatggcaaataccactctttgcctaggattataattctttgtgcacaatgcatcccatcccaaagacagtccacagcaggacttgctccatctctgaactggtcttacccccttaaacctgcctttatatctaggagtttctttattttattttatttttttgagacagagtctcgctccattgcccaggctggactgcagcggcgtgatctcagctcactgcaacctccacctcctgggttcaagtgattcttgtgcctcagcctcccaagtagctgggattaaaggcacgtgccaccatgactggccaatttttatatttttagtagagatgaggtttcaccatgttggccaggctggtctcaaactcttgacttcaagtgatccgcccgcctcagcctcccaaagtgctgggattacaggtgtgagccaccaggcccagcctatatctaggagtctcttgatgagcattggtcgacagaaagaagtctcttctaaaaattgttaatgcttttatagactactcatagtctgagtcataaaacatcatttgcctttcaatttataccttccaagtgaatatgattattgaggattatctaattattatctacgtttctctctagatataaaaaacaccatagatcctatacacacaaaaatggtttttctatcagaaatggactcactcgcctggcaaaaggacacagattagattattctaatctcaaggccccttaggcttatgaattcaaaaaaaaaaatagaagaaatgaacaaaaacttaaatcacagtttgttattaagtaatatctgaaatgaattagaaagaaaccataagccttaacaatactccaatcacagttaaattaatttagacagaaaagcaaatagcaattgacttgaaaataagaagtggagccgaaggtggatacaagaaatccaggagggctaagataaatcccaaatccaatgttcatcaatgcctacacattcagtacaacctgatggcattaattctgtggttggggaaatgtgaaagtgaaatcgataataccacagttctaaatgtgcactgttggctgaacttatggtgtggtggggggtggtaaaaattaggcttctaagaaaggatgggactctgccctccaggcaaggagtaaatggccccagcagatggaaaactaaagcaaatgtaatcacctgcattttgaaaataggtgtgtttctgagaatttgtttgaattagttctttgtaaataaaacaggattttgaatgca

SEQ ID NO: 721352 - DNA, 2233 bp, Homo sapiens
ctgggcaacagagtgagactttatctcaaaaattaaataaataaataaataaaaagaagagacaaaggataggttcaggaaaacagtgtattcccatcacaggtcctaaagagatggagtcactgcatgccaagagggggtcacatgggaggcagcaccgggggagtggtctcagccaggcagacagggagaaaggacccataggcttgctcacgggtgtcagggtggaatatatgagcaagaggtgcaggggtgtccatcagtgcatctgaatgttactgggtctcagtcaggggaggacagggaggtgaacctgtggcaggggctaaacataccacgctggggctcacctgggagagatgcgcaaaacttacaatgcagtgcactgggggcacctgtctgcatctcaccyccgcagaggagtggctgtaggtacctccctgtaatccaattgtgagttggagtcttgctttaggctgtctgaataattagcacaaatgtagtcaactatcccctactgtaggggaatttataggcagggcttatagggatttgcaaagcaagtgagaatactagcagattgaaaaatgaaaacaatttgttgggcacaatcgaactacagaaatatcttctttaaattctgactatctttttttcttttttcagtattaagtccatctgagaaactagagccttgggacccagggatgaggaaacttaccgtacagacatgcgggctgaccttcattcaccctgcgggccatggcctctgccatccaactgcagaggcttcagccgaaactctctccagcactgccctaaacagaccaagtgtgagggagggagcatgtaatgaaaagtccacagagaacaagaagccacaagattcggtgctctggagccattctagatggtttcaggggaactagcttcccacctctgacagggataccatggcaaataccactctttgcctaggattataattctttgtgcacaatgcatcccatcccaaagacagtccacagcaggacttgctccatctctgaactggtcttacccccttaaacctgcctttatatctaggagtttctttattttattttatttttttgagacagagtctcgctccattgcccaggctggactgcagcggcgtgatctcagctcactgcaacctccacctcctgggttcaagtgattcttgtgcctcagcctcccaagtagctgggattaaaggcacgtgccaccatgactggccaatttttatatttttagtagagatgaggtttcaccatgttggccaggctggtctcaaactcttgacttcaagtgatccgcccgcctcagcctcccaaagtgctgggattacaggtgtgagccaccaggcccagcctatatctaggagtctcttgatgagcattggtcgacagaaagaagtctcttctaaaaattgttaatgcttttatagactactcatagtctgagtcataaaacatcatttgcctttcaatttataccttccaagtgaatatgattattgaggattatctaattattatctacgtttctctctagatataaaaaacaccatagatcctatacacacaaaaatggtttttctatcagaaatggactcactcgcctggcaaaaggacacagattagattattctaatctcaaggccccttaggcttatgaattcaaaaaaaaaaatagaagaaatgaacaaaaacttaaatcacagtttgttattaagtaatatctgaaatgaattagaaagaaaccataagccttaacaatactccaatcacagttaaattaatttagacagaaaagcaaatagcaattgacttgaaaataagaagtggagccgaaggtggatacaagaaatccaggagggctaagataaatcccaaatccaatgttcatcaatgcctacacattcagtacaacctgatggcattaattctgtggttggggaaatgtgaaagtgaaatcgataataccacagttctaaatgtgcactgttggctgaacttatggtgtggtggggggtggtaaaaattaggcttctaagaaaggatgggactctgccctccaggcaaggagtaaatggccccagcagatggaaaactaaagcaaatgtaatcacctgcattttgaaaataggtgtgtttctgagaatttgtttgaattagttctttgtaaataaaacaggattttgaatgca

SEQ ID NO: 721353 - DNA, 2233 bp, Homo sapiens
ctgggcaacagagtgagactttatctcaaaaattaaataaataaataaataaaaagaagagacaaaggataggttcaggaaaacagtgtattcccatcacaggtcctaaagagatggagtcactgcatgccaagagggggtcacatgggaggcagcaccgggggagtggtctcagccaggcagacagggagaaaggacccataggcttgctcacgggtgtcagggtggaatatatgagcaagaggtgcaggggtgtccatcagtgcatctgaatgttactgggtctcagtcaggggaggacagggaggtgaacctgtggcaggggctaaacataccacgctggggctcacctgggagagatgcgcaaaacttacaatgcagtgcactgggggcacctgtctgcatctcacccccgcagaggagtggctgtaggtacctccctgtaatccaattgtgagttggagtcttgstttaggctgtctgaataattagcacaaatgtagtcaactatcccctactgtaggggaatttataggcagggcttatagggatttgcaaagcaagtgagaatactagcagattgaaaaatgaaaacaatttgttgggcacaatcgaactacagaaatatcttctttaaattctgactatctttttttcttttttcagtattaagtccatctgagaaactagagccttgggacccagggatgaggaaacttaccgtacagacatgcgggctgaccttcattcaccctgcgggccatggcctctgccatccaactgcagaggcttcagccgaaactctctccagcactgccctaaacagaccaagtgtgagggagggagcatgtaatgaaaagtccacagagaacaagaagccacaagattcggtgctctggagccattctagatggtttcaggggaactagcttcccacctctgacagggataccatggcaaataccactctttgcctaggattataattctttgtgcacaatgcatcccatcccaaagacagtccacagcaggacttgctccatctctgaactggtcttacccccttaaacctgcctttatatctaggagtttctttattttattttatttttttgagacagagtctcgctccattgcccaggctggactgcagcggcgtgatctcagctcactgcaacctccacctcctgggttcaagtgattcttgtgcctcagcctcccaagtagctgggattaaaggcacgtgccaccatgactggccaatttttatatttttagtagagatgaggtttcaccatgttggccaggctggtctcaaactcttgacttcaagtgatccgcccgcctcagcctcccaaagtgctgggattacaggtgtgagccaccaggcccagcctatatctaggagtctcttgatgagcattggtcgacagaaagaagtctcttctaaaaattgttaatgcttttatagactactcatagtctgagtcataaaacatcatttgcctttcaatttataccttccaagtgaatatgattattgaggattatctaattattatctacgtttctctctagatataaaaaacaccatagatcctatacacacaaaaatggtttttctatcagaaatggactcactcgcctggcaaaaggacacagattagattattctaatctcaaggccccttaggcttatgaattcaaaaaaaaaaatagaagaaatgaacaaaaacttaaatcacagtttgttattaagtaatatctgaaatgaattagaaagaaaccataagccttaacaatactccaatcacagttaaattaatttagacagaaaagcaaatagcaattgacttgaaaataagaagtggagccgaaggtggatacaagaaatccaggagggctaagataaatcccaaatccaatgttcatcaatgcctacacattcagtacaacctgatggcattaattctgtggttggggaaatgtgaaagtgaaatcgataataccacagttctaaatgtgcactgttggctgaacttatggtgtggtggggggtggtaaaaattaggcttctaagaaaggatgggactctgccctccaggcaaggagtaaatggccccagcagatggaaaactaaagcaaatgtaatcacctgcattttgaaaataggtgtgtttctgagaatttgtttgaattagttctttgtaaataaaacaggattttgaatgca

SEQ ID NO: 721354 - DNA, 591 bp, Homo sapiens
tattctccagctaatggaaatgtatattttctacattactattgaaaaaataatggctttttgcatttcaaaaaaaaattgagcatcagacagcagttgagaatacattttttgagagggagaaaatatcattggaaatgtcttccaaaaaatactatatagggcacccagtcatacgagcagaaaaatgaaataccaggaatgggttcttttcactttatcctttatgtccaaaatgactggaacaatgtaggaccaagaactaaatccttcataaaagcctacagttaatatgcycagggttgtagtttgtttttttctttagttttatttgttttttgcctcagttatttccttggggaaaagtctcagaagcaaatgtgctgagtggagctggatatggatttaaatttatgacttttgaaatgaattgccaattttcaacaccatgcaaagtgatacatagtgttccagttttgtcatattctaccttatattaaatattataatttcagttcctttgcctctaccttattcaccatagtacatctttaaatactaaaactctttattatacctattgattgaaca

SEQ ID NO: 721355 - DNA, 1519 bp, Homo sapiens
taattttctaaattctaattctggcatatctccttgaatataatttagatgatttctgtgtacactaatttaacatctccagataaatgtttcttccaattccactcagcctggctatccttgtttgtttcaacttattcattccttagttcattcatgtatttaatacacttttaccaagcacacacatgtctgtggctctcagtgggcatcttctagttctaggagagggttctggacactcttttctctttgactttcatattctggccatacatgctgtcaaaagtaaactttaaggcaaattaaatttaagagtttaattgagcaaaggacaatttgcaaattgggcagcccccgaacaagcattggttcagggaagcactgctgttgctatgtggtcaaagatttatgaacagaaagtgatgtacagaaaacagatgtggaatatagaaacagctgatgggttacaactcaacatttcccttagttaaacatggtttgaatagttggctgcccttggttaaaactcagtgattggcaaatgagtggctacaatctgtttacatatcccgttagggtacagttcagtatgtagggagatagctgtagaatgaccttaaaatatgtaaggaagtagctttaggctaaaataatttaacaatgcttatgggcatttttaatttcttgtcttgcacttgtggataagtacgaaacatttgggacaataaacacaaatgtgaatcacatactaaaaataatggtgatcaaaaggcagcattggaagaatgttgagtcttgcagtctgacaatgcaggaaaagaaaggggtgaaaccattccaacagagtctgatgggcagtgaattagcagtataactagctaacacacaatatggattggaaaacacatcctgttaccgctatataactgagatatcttgagtatgtataagaaaaatcatggaactccaaagaattcaataactttttaaggaagtatcagggaaaattctacaattacattttcttgaaggagcgagtgaaccatgacagatgaacaaaagagggaatgttttataaagagagacagcagcatatgcaaaatcaaagaaatgtgaaagcccatgtaatttattaaaaaggtaaatcataaaaataagtttttaaaagttgaaattttgcagcacttgtaaaacaacgtacaaaggacaggactacaggagaatgtgggaaaatagaaattggttttaggattatgaaactttactgttactgctagtaaaatataatttgttttaaaagtctgaagaaaatatgttgacgaaattgaattctttaaaagagtaagttttcwattggacttttctctgttttggttattgtgcttatcaggaacaaccacactgacacaattttaatatgattgtaataattgaggttaccacatcctttagcaaattattgctattctgaatgtaggtaggaattttctccaagtgtgaaaagtctgaactctta

SEQ ID NO: 721356 - DNA, 592 bp, Homo sapiens
ggggaaatggtgccttggcracccagagcagtcatgccccctgtgcctgtgctacattggtagcctgtctcctgggaaaattgtacgttgctgggccagagcagtcacgcttccccaggcctgagctgaaatggcacgttgatccctaagaaattagtgaattggacagttgtgaatccctggacagggctgctatagtaccctgcatctcagggaaacagagcagtggctaagctgagacaccaacccttgcaggccaaaaaactctcatatcctgctttcttggaacaggactagcctagccctctagggactgaggtgctaagaaacttctcttagcaccacttagggagtggaatcatcactgtgctgctcaccttcgcccagggtctaaatgacagctgcagtccgctgttctggagtccttgctgctgctgctcctgctttcacagagtctgggatacttttcagtcccactgtcccagggtctagaatcaccactagatggtgccttatctcctgggacattttttgactctggttccctgattgcagctgtaccctgctccccaggcccaaacctccagatcct

SEQ ID NO: 721357 - DNA, 592 bp, Homo sapiens
ggggaaatggtgccttggcaacccagagcagtcatgccccctgtgcctgtgctacattggtagcctgtctcctgggaaaattgtacgttgctgggccagagcagtcacgcttccccaggcctgagctgaaatggcacgttgatccctaagaaattagtgaattggacagttgtgaatccctggacagggctgctatagtaccctgcatctcagggaaacagagcagtggctaagctgagacaccaacccttgcaggccaaaaaactctcatatcctgctttcttggaacaggactagcctagccctctagggactgaggtgctaagaaacttctcttagcaccacttagggagtggaatcatcactgtgctgctcaccttygcccagggtctaaatgacagctgcagtccgctgttctggagtccttgctgctgctgctcctgctttcacagagtctgggatacttttcagtcccactgtcccagggtctagaatcaccactagatggtgccttatctcctgggacattttttgactctggttccctgattgcagctgtaccctgctccccaggcccaaacctccagatcct

SEQ ID NO: 721358 - DNA, 646 bp, Homo sapiens
ttatctatgctgcaaaactctgcagcactacttttttgcccataacctagagtttggttatgatctagtgaatagtgcaactattcacgtgtggttatttaaatgtaaattcataacatttcataaaatttaaaattcagcttctcagttatacttgtcctatttcaagtgccaaatttccatgtgtggctagtagctaccataagagatcatcacaaaaagttctcatggtcagcaccaatagagggagacatacaatttgaaggtgagccaatcacattctttatcataggagaaatgtgaatgaagaaacaagaagcccagaagcagttaagagaaagttccattgttatcaacattccagaaagaatgccacaaactcctgatgctggrtgagaggagaggtcctggttaactgaacttcccacagcctggatattgagcaattccttaggcttttcagtgtaccctcatagatagtaaaatggagcacattttttttttttttttttttttttttgagacagggtcttgctctgtctcccaggctggagtgcagtggtgggatgatagctcactgcaagctctgtctcccgggttcaaaaaatcctcctgcttcagcttcctgagtagctaggactacagg

SEQ ID NO: 721359 - DNA, 395 bp, Homo sapiens
tctggaagattcatctgaaatatatatatataaagtgagcctggccaacatggtgaaacctatctctactaaaaaaataccaaaaaaattagccaggcttggtgcgtgggtgcctgtaatcccagctgctgggaggctgaggcaggagaatcacttgaacccaggaggcggaggttgcagtgagctaaggtcatgccactgcactccagcctgggcaacaagagtgaaactccgtctaaaaatgaaaaaaaaaawagtgagtgttcaatgaaaatatcttacattataatacaccaaaacatatagctttgtataaaaaataataaccaattagtcaacttaataaaaatgtttcaagaaatgatagaagctacacaaataatttaataaaaata

SEQ ID NO: 721360 - DNA, 1163 bp, Homo sapiens
ttcagactttatcagcagacttttccttatatatagttgtgccgggtataaatagcagacttctgcttggttgtgtagttactgaaaacagcatttgttttcttatctccatccagaaaagatcagcacttctagaactgaagctttatttcttttgctcttgtgttgctgatcaaactgttcatgttagattgaatacaggtaaatcacatctttggaaataagcatctattttaacattttcacactgtgaataaaataacatagggcacatcacaacacacaattttattccactgtctgaaacatgctttttttgttccgaatgtatttttggtttatctcatattccctttttctcactccccctcctattcctttctactctgtgggtcaaatgagcagagcaaactttttcttcataaaaagttacttcaatactgggccacgcacatcatggacaacatattaattgccataagagcatgggattctgctgctaaaaagttccctgattccatctatcattcaggagataaaaaaatgtctcagcagctatttaatttgtttgacaatcttaaaatccttagaaaccttatgcagtgaaaattatttaggttaccagaaacttccctacaaaaaaatggctttatgaccagcatactgtatgaaaaaaatgaaaaaaaagaattttatgatgtttagcatatgaaatgaaatgtaaattttgtatcattctgtctcaagatttttttacattgccaaatattttctgtagcgtgtttaaaataataaagaactggaattttatgttatttctataaatatatgaatgtgatttttaatatttctggatgtagtttaggctaaatatatgtatttatttactcaatgcataamatttatttttgatggttctgatgggttacagtgaatagtaaactcaaaccaacactggtaatgtgttctggtatcactataccttgtaagaaagcataatatttaggacaatcattgtctttaatatcaagactctctaagtcatccagctggttggatgatactgacaggagtctaaaaatcgtatccgaaagttggaattagctcttttatcaaacaattatcttcttcaatataacaaagaatataattgatttgattaa

SEQ ID NO: 721361 - DNA, 2539 bp, Homo sapiens
taatcatggctcagtgcctggaactcctgggctaaagggatcctcccgccttagcctcctgagtagctaggaccacatgcacacagcatcacacctggctaatttttgtgtattgtattttttatggagacgaggtctctactgttgcccaggctagtcttaaacttctatcctcaagcaatccctctgccttgggctcccaaagcactgggattacagacatgagcctgtatgtgctatagctcatatgtgctactgctcctggacacatttgtgtttttctctactaaaaacatgcctctatggaggtgatcctttcttattgggactccccattttccctctcaaagaactgtcaacatttttggtctcaaatcttttatgcctgggtgttctcttttcacttttctttggtaaagtttctcttggccactcctgagggtggaatgcttttctttatcagttgcaggtgtcattactttcccacaatccaccctttatatgcagttcttaggtgctttttgcttctctttttaagggttaaaattcatagcagtatatagaaaattcctatttgcaagcattgttttattataaattgtctttggttgaataaaactagaagtataatgaaatatatttaagatataattgaagtatattgccatctttatccatagattcttattcaaaaggtcaagagtagaaatgtatatttttggtaaatatctctgttattttgattgcagagaaacaagcaaatggcaaattcaaggttatagggacaaaagtactaaagacagacaacaatttacagaaacaaacagatttataaatctatatcttctaaagtaatcacatatctatagtagagatactatttaaattcataaagttaaattatacttgatatattccatttacgaagaaaaaattatgtgttatagctaagattttaatgtgaaaaagaatatttggaaaaaataaccttcaacagctgaaaatttcttcacccaaaaccatgcatttggttatgctggacaaagtagttattttgatcaaattcttccgggtgttttgatatgaactaaagcgctcttgtgatacaaagaatatcattaattaggaactttagccaatcaaagatggacttatgtaatattacagattctattgggattgaaatataatggtctttttagtacttcctggctattgactttaactatgatgcactcactggtagtcaagaataaaaatgtatttcacctaagatatttagtagttagctagaaaatatgttcatggtgtaatgattctaaactttaatatcagattttaaagaaaataagattcatgactaaagtttttttgagacacatagataaatatcaagacatttacaacatttctttctcttctgtttcttatcctgctttaggagcagcaatacaatataatttaagagtggtgaagagttaaaatagactttcacttacaagcttagagtttgctgcagtatcagcaggtgtgtggctagcctctgtggtgaggacacatgagggttgtttttagctttggattgtgccctcctaaaataaattgcatctactggagttcttgattttgttatcgttgatgatggttatagaaaaatggcaaaatgaaacaagtcgtttaatgctagagtagaatattttggatcataggcttataatcaaaagggtaataaatatattattaaaatatttacccttatagtccttaattgttgttttattagtattgataggtaaactaactcaattctgtataattgcagagaatatgttggtttagaccagggtaccaaattaattgcctgggtttttatcgcatctttactggcgaccacttctttgaaaatatgattataacagtgcaaaactgttacatgcattaagaaaaccaaaaatctaggctcccacaatgatgtagcattaccattagtttaaacagagagagcctgtttatttatggccagaaatgcagacatttttatctactctgtgttctagcagactttttattagaaattgtaacaagcatgaaagaactggatttggatggcaattaattttcattttctaaactatcctctgaaggaagtctaaataaacaaaagaaaggccaataaataagaacatgaacagtgagaaaaaaaaaagagaatcaaggggcctagatcatttacaaaatatataatgtggtagacctgcagtaatagagtattgaagattttacatttcaaacaaggtgaagaaggaaaagcttttcaggttagaacaaacatatacaagaaaagcaatctaaaaactgaagaaatataagagcttggtcattgtgggaggaggtttatttagcaagggtctttaatagagaatataaagttataaatgaaaacttatatttagtattatataaggtaatatttaacataatttatataatatgtaacatttagatattttaagcataagaaaatttgraagtatagaaa

SEQ ID NO: 721362 - DNA, 635 bp, Homo sapiens
agtatttaggactaacactacagataatttttgtgtcatagaaattatatatacatacatrtatacatatatatatatatatatatacgtataaatacccatatagtaaaatatagtgataagttctgaatagtggaatttcctgattcatacttcataaggtagaatttattgtaatggttgtcattgaacattaatataaaaatatcataaccgagaaaggtcattcatatacatagtagtcctctagagtaagcctaaatcagtattgatgttgacataaagagatattaataatgaatattatgtcaaagatgcatgtcaaagataacaaaataaataactcagaggatgcaaagataatttttgtatcagttacctaccagaaatatgacacttaactaccaattcataacaattaaaatatatgatgtaatcgtacaaatatctatgtcttaggaagtgaaggccatgtcattttaggagatatattctgaaaaataaagttaagaaaatattacatagacaacatctcaaacctgttccttttagtccatttttactgtcattaccctagtagaagtcagcatcgtttcttacctaaacacccaaaacagctttctcaaataaatggc

SEQ ID NO: 721363 - DNA, 679 bp, Homo sapiens
ttgtttttcctaatatacattcttaatagcatttcctttcttcctagcatgtgttgacatattcaaaaaatatagcctgactattattatactcatactgtcttactttagttatattttatttttaarttgcttttctatttgccttcaactataactaccaattacatcaattattcctaacttattataaaatatgtattcttacaaacatttcctaatctttctgtaataagaatttttcctattagacaaattcttattacattagactagtaatctctaaattagacttctctcattagactagtaatctctaaataatattttaaggaaatatgttttttgagctcttgcatagttcagaatgtaattatgttagaattgtacaaaaacaatacttttactaagtcttggctgtggttatgatggttcccaatgaatttctctttcaaaagtaaatgactttatatcattaggttggtggaaaagttattgcgattttgccattaaaataataatagaatagaaaagtaagaatagaataacagaatttgccaacctaatcatagaatcctggcttaatgagaagggaatagacatgttagatgattcacttttcttgtaaatattaattgagttctgactatgtgctaggatgaaggtacagcagttaaaa

SEQ ID NO: 721364 - DNA, 1776 bp, Homo sapiens
tatgtattatcatacttgtcatggttctttcttttggaaggtaaaactcaattcaaaaatttttgaggaaatagtaaatccaaggtcatattcaaggtcattgctccttcaggcatgtctagatccaggacctcagtgaacctcacatggacttttatttatcttcatttcttacagttgttcttgcatacatttatttaacacttggtcttatttttctgccttcatgtgttctagaaagataatcttaattggattcagtaaacgtgattcaaatttctcctcattctagcagaatcagaacaaacgcttctaagactaatatatcatagcttaggaaacactctgaccgttatttaaaccccagcccttttagaaattaattttggcaagagttttaagtaaacagctggcttaaatcactactcatctttatgttgcagatggctgtaccatgactaatataccccaatgtaaagatctggtaacactctgattcacttacttggatcagccaccatttacccttgtagtaaagatggaatacaatgagtgacctttcaaaatggtattgggatagtaggtttcccaaaggcaagagcaatagaaagacaaaattcatacactatttcactgaagctagaattccatcaatgataggaaacactaccatttatgtaataccaataaataaaagatgctgctaatgaaaatattacactatccttccacttgtagtttcattttatattaaaatagatttttagacataataatgttatgctttcacttacataagaaggaaaatataagtgaaatatatttgttaaaatgtcattaaaatacttcaacattccgtgtctaactcttctgaaactcttcaacttagagtgtgcatgtgtttatgtgtgtgggtgtgtatgtgttttcacatattattctctgccagcaggagttttagaattacagcatttcttaaaagagtgttcatcattgtatctgaaattttcttccaaactagctatacttactctgcaagttttgatggactgtgcagacaaaatggtgcttcatgactgccacagaaaaatagcaattaaaagatccatcccaaatcgaaatgttaaatgttaaaatgtgacaaatttgcatattaggatttgtaaaatatattacacttgtttagtgattgttttttgttttttcttgtgtattttgtttcagtgaatgagtgtatatatwtttatgagtattttatatatacatatacaatttattaatttgctccagtaaacttattttcccatatggtttctctcatttctaaggttttcagaaatctaattctaggagttgggtagagattgcttaagtagtaaacatttttgaactgacacaattcataataacataaaaaaaatagattagcagagtccaacattgcaataacaaaataattggctacagtaatgaatatagttacgtccttctcaatatgaattctgaaaaatcagcttatgttctgatgtatgtagaataatgttcccccaaatatgtccatgtcctaatccctgaatcctgtgactatattatggtacagagcaaaggagaattaaggttgccgggagaaatacagtttttaattagctgaacttaagatgagcatattattttgaattatctatctgggtgagcccaatgtaaccacagtgatccttataagtgacagagggagacagaagagtcagtgttactgtaagacacagagtgaaaaaa

SEQ ID NO: 721365 - DNA, 1776 bp, Homo sapiens
tatgtattatcatacttgtcatggttctttcttttggaaggtaaaactcaattcaaaaatttttgaggaaatagtaaatccaaggtcatattcaaggtcattgctccttcaggcatgtctagatccaggacctcagtgaacctcacatggacttttatttatcttcatttcttacagttgttcttgcatacatttatttaacacttggtcttatttttctgccttcatgtgttctagaaagataatcttaattggattcagtaaacgtgattcaaatttctcctcattctagcagaatcagaacaaacgcttctaagactaatatatcatagcttaggaaacactctgaccgttatttaaaccccagcccttttagaaattaattttggcaagagttttaagtaaacagctggcttaaatcactactcatctttatgttgcagatggctgtaccatgactaatataccccaatgtaaagatctggtaacactctgattcacttacttggatcagccaccatttacccttgtagtaaagatggaatacaatgagtgacctttcaaaatggtattgggatagtaggtttcccaaaggcaagagcaatagaaagacaaaattcatacactatttcactgaagctagaattccatcaatgataggaaacactaccatttatgtaataccaataaataaaagatgctgctaatgaaaatattacactatccttccacttgtagtttcattttatattaaaatagatttttagacataataatgttatgctttcacttacataagaaggaaaatataagtgaaatatatttgttaaaatgtcattaaaatacttcaacattccgtgtctaactcttctgaaactcttcaacttagagtgtgcatgtgtttatgtgtgtgggtgtgtatgtgttttcacatattattctctgccagcaggagttttagaattacagcatttcttaaaagagtgttcatcattgtatctgaaattttcttccaaactagctatacttactctgcaagttttgatggactgtgcagacaaaatggtgcttcatgactgccacagaaaaatagcaattaaaagatccatcccaaatcgaaatgttaaatgttaaaatgtgacaaatttgcatattaggatttgtaaaatatattacacttgtttagtgattgttttttgttttttcttgtgtattttgtttcagtgaatgagtgtatatatttttatgagtattttatatatacatatacaatttattaatttgctccagtaaacttattttcccatatggtttctctcatttctaaggttttcagaaatctaattctaggagttgggtagagattgcttaagtagtaaacatttttgaactgacacaattcataataacataaaaaaaatagattagcagagtccaacattgcaataacaaaataattggctacagtaatgaatatagttacgtccttctcaatatgaattctgaaaaatcagcttatgttctgatgtatgtagaataatgttcccccaaatatgtccatgtcctaatccctgaatcctgtgactatattatggtacagagcaaaggagaattaaggttgccgggagaaatacagtttttaattagctgaacttaagatgagcatattatttygaattatctatctgggtgagcccaatgtaaccacagtgatccttataagtgacagagggagacagaagagtcagtgttactgtaagacacagagtgaaaaaa

SEQ ID NO: 721366 - DNA, 1035 bp, Homo sapiens
ttgatcttttaattcttggtgcctaggaatttgcccaacataatagagactaaataacacatatttgtaaagtaatattcaagaaatgccacatacctcttggactcagttagatcctggtttcactcagaggcaaaggctgggacccttctttgttaagagacctgaagatgtcagaaagtctttgtgacctgcagcactttaggaaaactaggggcctgttgagagactcacgcacataattttcataaagaamctgagccttgtttaagctaaagtacctgtatgtagaaaaggaaaataaaagttgtgaatcgtagtgaatgttttctactcatttactcttctacccaagactagagagatttaaaaaatgtggttaccgagatctcactacatagagagtgaaacaaatgccaagaagggtatttgaaatagcatgggcacccaatatgtttgtgacaaatggattttttgaatgaactgaccagtaaatcaataaacatgatggcagaggtatcatgtaatgtaagagaacctcaggcacagagttacggtgtcttcagagaactctatgcagttttattattctaaataaaacatgtaataatgattattatttttattctttactaacttctttctaggagcccggcaccattctaagtgctttacatgtattgatttccttaatttttgcaaagttcctgtgaggcaggtacatctgtcatacccatactgcagacagtttctcaaaattcatgacacatatactgctgccctttcccctgtattgttctggcttctgcctccaacaccaagtgtttatgtctctgtgtgtattggacccagactcccaagacaggcctctttggttcatttaaacatgatcctctgggatctaccttgtcggtccaagctccctagggccactttataatcacctggtcatcctaaagatggataagcgaggtccctgtggaagatatcaacgagtatggtcttccatttatccacctgtttgccatttgttca

SEQ ID NO: 721367 - DNA, 831 bp, Homo sapiens
cagattagctattgaacaaaaaatcccaatatcctgtggggtaggaaaaaaaggcacattgatgtttatctgattaattcacaaaatttattttactatccatgttcgatttatttgcttacgttaatggagttctaaaaaggtagatgatgattttgtgattctaaagagcttcaatcaaaatgtaagataaacagtaagaattataaaatgataaaatattattatgaaatattgatgcagagattatgtttacacttcctggcattgctacatttgacctattattagtggtgcttctgaatcaccaaatattaatattctcttttcaaatcttagggtcttttttcctaattctatgattcattagatgactgcatatctttaaaccagaatttttaattgccacaatatagtagctactctaaatttgagtttgtcttaagtccaagaaaaatgtggagatgatattaagagaattcagttttatccatccttagataaaaataaaaactaatcatcacttctccttattataacaatttagaaaaattattgagagatgtcaaaaacgggggcaatttatcagtgctgaactataggagacaagtattgtccagttctgcccagcatggttaagtcatcagatctactcttgaattgtgtacctggtaccacaatggggagttctgctttcttcgttgcactttactttcctcatttcttctccatgatctgaatttgtttttcatggaaggccttaggwtagtcataatagttaacacttactatgtgcttataatatgccaggcactgagtgaagtattacat

SEQ ID NO: 721368 - DNA, 571 bp, Homo sapiens
agcaaaaaaaaagtgaaacccatcagggaactaatcttccacctgcacttggagtcaatggagattgagagtgagagtcaaatggttgaaggaaactctctaaagaaaaaggaactaacagtagatggcttgaaacttcagaaaagaaagaagagtatgcaaattggtaaaaataagggtgtataaaatagactatttgctatgcgtgagtttcttaaggtatatttgaaggttgaaagaaaaattatacatccaaagttcagcttaatgcatgcagaaggaatatttaatacaattatatcttaaaagttcataggcactcaaataaatgtaaagtttctcagattgatgtgcaaaaacatcaattccagtagaccatagtaagttatacgcatatatattgttatgcatgtagcaaccagtacgataactactacttaatatactaatttaaagactgaaaataaatygagatggagtttttaaaaagtttaaataacccacagaaaggtaaaacaaaatcagaaaatagcataagaaatgatccaaagacacataataaaaggtcaaa

SEQ ID NO: 721369 - DNA, 2144 bp, Homo sapiens
aggctggtctgaaactcctgagctcaagcagtgtaccacctgtacctcccaaagtgctgggattacaggcgtgaaccactgtgcctggtcacaaagttttcatatgcccttacccagtgtccctacatgaccatagtatagcgatcaaaaacyaggaagttaacgttgatgctacactgttcactaaccttagctcttactccgattttgtcatgtgtttcattgttgctgtttttctctttcaggatccaaatcaagatcccatatttcacttaattgtcgtggttccttagtcttttccaatcggggaccattcattactctgtctttcatgaccttgacactttaaagagtactgttattttgtggagcattgccccagtttggatttttctgatgtttctttacggttaagttgaggttatgcattgttggcaagaacaaccacagaactgatgttgtgctcttctcggcatgtcacatgcttgaagtcgagagataagacattagtttttaagatatgtttagtgtttttaagttttagttgtaaaatacagtttgctgtttatacttcgcagccattcattttttagtgtgaagtttaatgtctttcatttttatcagttctttttttcttatggttaagccatgtgaaaatgaattacagtattacaggtatgcccttgtattctttatttttcttcctgaaacttaatatattttgatccatcagttattcctatcaatttgagagggtataatacttttgaaatagaagtgtttttctgtattgtccttgtacagttttttaatataattactatttttttttccagtttcaatagtcatgggcattcccacagtgaagagagaagttaaatcttacctcatagaaactcttcattcccttattgataacctgtatcctgaagagaagttggactgtgttatagtagtcttcataggagaggtaattatttaattgttgttatgtttttaccaaatatagcctataagagttgaaactctaattgaatatttgaatatgcttttaaaaacgctttttaaaaaatgtgatgagtaaagcttaggtaatatattctatctggtagtttaatgtaaattgaactcacttctgtcctgcaattacaaaccaggaatagtaatatttgttgtcaataggatgttacacccgtagatctttaagaacgtgtgcctatttctagctctaagacttaaatttggagatttgcactgatgatctttgggagtcctgaaacctgaaaaaggtttaggctcagctggggttttatcattcttttattctctccatcccttctctgtactcctaagaaatcatgtgaatgagaaataccacacttcttgtattttagtctcctcaaaagatttagagaaagaataaatcttgagcaagttctttttaaatcatgaggaataagaccctagagtaaatattttcttaattattgtatagaatttcagaatgggaaaggatttaggacatggtctagttctggcccactaattcctaactttttagagttccccatgtctttttaaatgaaaatggtcttgatgatttccttattagagaagtaaacaaatgcatactgttcaaaacaattacataaatatataatgaaaaattacctgttactcctctacataaatataactatttcaaattatatgttaagactttttgttctgaaataattttagatttacagaaagttgcagaaattatagagggtatctccttcactcagcttgctctgatgttaacaacatatgtagccatattatagttatcaaaaccaggaaattaacactgatataatactcaaccaaactacagactttatttgagtttcctgtttttccgcctgggttcgcctttctgttccagcatgcactatggaacaccacattgcagttagcggttctcatgccttagcttcctcctgtccatgtttgtgtctttcatgaacttggacatttttgatgggcactggtcagttattttgtaaaatgtctcagtttggatttatctgatattttctcatgattatattttgactatgcatttttggcaagaataatatgacttgcctttttaaaaa

SEQ ID NO: 721370 - DNA, 1024 bp, Homo sapiens
atttctcatttctcttttttttttttttcaggaaaacaaaatcttacccagaagttgctcagyacacttctggctaaaattgaatcatttacccactgaaacccatcatatataaaataaattgataagaaattgaccaagttttaatgttatgatttactccataggcatgctgtcactcaaacaaattaatcacctaaacattaaagaagatggtaaaaaatactggtagaaaaaacactaacacattacaaatttttaaatgctaattactctgaagtctgcatacaagttaagatgcacgttggagaagagggcaggatccattcatacaaagaaccataataaagatattggatttttaaataagtgaggaaaaatagcagttaaggagagtggtgaatggattgtaggtgagaaaaagaagaggagaatcagagaaaaaaaggaaactaattaggagactatcttcctaagtccaagtgagagaatgtgactagtgtgacatagacgagactaagaaagctataaatagctaaaagtgtatggatttgtaatgagttttagaagcagagttgctaatgaagcactttctgtcagggaaatataccactcagaatttattccactgtttgtgtcactgaagttcatggttttgccatttcctaaaactgaaggttactggggcaagatttgggagagggaaggagtgtactgagaacgttaaatgtaaaacacccattagacatttaagtggagctgttcagaaagcaatttgatacatgaacctatatcaactgaggatttagtactggaaatactgattgagggttcagtatattgatggtattgcaagtactaggtaagaatcaagttacataggagaaagtagacaaagactgcatctactagcattacttctccaaactcatctgtcattacctaaaattgtacagttgtacaataaacagcctcaaacttcatatattaaatagaatcctaaagtaaaacatgtgttcaaagg

SEQ ID NO: 721371 - DNA, 1429 bp, Homo sapiens
ggagaacatctatagtaaatttgttctcagtcatctagtttgatggaaatggcactatctcttagctagataatggacttatcatataacacttcattgaatccttaaataacacttagaaaggggctgcatttttttttttgacaaggcttatacctatgactggatatttcactccagtcttctaaaaagggccattttacttttcagagtcacttctttttttttttttttttaattatactttaagttttagggtacatgtgcacattgtgcaggttagttacatatgtatacatgtgccatgctggtgcactgcacccactaactcatcatctagcatcagagtcacttcttaagtcatgtggtcattggccgggcacaggggctcacacctgtaatcccagcactttaggaagccaaggtgggcagatcacttggggtcaggggttcgagaccagcctggtcaatatggtgaaaccccatctctactaaaaatacaaaatttagctgggcctggtggcgggcacctgtaatcccagctactcaggaggctgaggcaggagaatcgctggaacccaggtggcagaggttgcagtgagccaagatggcaccattgcactccagcctgggtaacaaaaggagactccatctcaatataaataaataaataaataaatattaagtcatgtggtcattaactttggagactgatttgcatatgagtgtagatacaaattaaaacacaagtaaacctcattgcatgtcaccctatacatatcgacaatggaaggaataccttgcctgtagtggactgtcacttctggactgaaagactaagaaataaactaacttttcttttttgcataagtcagaaaaacttatagctagtaggtccagtttcctcgttgacctcagcaggtgaagtgaacaaatagtgttaattcagatataaaaaattatctgaatcttggtttgtatgaatgtacaatctacatgcaacattaaatcacataacttttatagtttcacatgtgtacataggctccttctcagccgcttccatatccattagttattaaactttctaaactggcattgaaayattacaacaatgttttgttgcaccaattttataaacttacgcagtgcaacatgtattagttttctgaggcaaaccagtggtaaatttctcaaggttcttgctgccttctttagcagcatttgaggaaggatctcttatatatttgtaatagataaaaataaaccagattgcaaatcctttttaaaaatcctacaccacgtaccaagtttttggttcaaattgtgtaagataaattaaacttaaatcacattctattaaccaatatgagggcatttctagtaagcacagttaagttgaaataaagttttcaaaagaaaaaaaaaa

SEQ ID NO: 721372 - DNA, 1429 bp, Homo sapiens
ggagaacatctatagtaaatttgttctcagtcatctagtttgatggaaatggcactatctcttagctagataatggacttatcatataacacttcattgaatccttaaataacacttagaaaggggctgcatttttttttttgacaaggcttatacctatgactggatatttcactccagtcttctaaaaagggccattttacttttcagagtcacttctttttttttttttttttaattatactttaagttttagggtacatgtgcacattgtgcaggttagttacatatgtatacatgtgccatgctggtgcactgcacccactaactcatcatctagcatcagagtcacttcttaagtcatgtggtcattggccgggcacaggggctcacacctgtaatcccagcactttaggaagccaaggtgggcagatcacttggggtcaggggttcgagaccagcctggtcaatatggtgaaaccccatctctactaaaaatacaaaatttagctgggcctggtggcgggcacctgtaatcccagctactcaggaggctgaggcaggagaatcgctggaacccaggtggcagaggttgcagtgagccaagatggcaccattgcactccagcctgggtaacaaaaggagactccatctcaatataaataaataaataaataaatattaagtcatgtggtcattaactttggagactgatttgcatatgagtgtagatacaaattaaaacacaagtaaacctcattgcatgtcaccctatacatatcgacaatggaaggaataccttgcctgtagtggactgtcacttctggactgaaagactaagaaataaactaacttttcttttttgcataagtcagaaaaacttatagctagtaggtccagtttcctcgttgacctcagcaggtgaagtgaacaaatagtgttaattcagatataaaaaattatctgaatcttggtttgtatgaatgtacaatctacatgcaacattaaatcacataacttttatagtttcacatgtgtacataggctccttctcagccgcttccatatccattagttattaaactttctaaactggcattgaaatattacaacaatgttttgttgcaccaattttataaacttacgcagtgcaacatgtattagttttctgaggcaaaccagtggtaaatttctcaaggttcttgctgccttctttagcagcatttgaggaaggatctcttatatatttgtaatagataaaaataaaccagattgcaaatcctttttaaaaatcctacaccacgtaccaagtttttggttcaaattgtgtaagataaattaaacttaaatcacattctattaaccaatatgagggcatttctagtaagcacagttaagttgaaataaagttttcaaaagmaaaaaaaaa

SEQ ID NO: 721373 - DNA, 701 bp, Homo sapiens
ttgctttctgtactcagtgtttcctctgattatgttagatttcaagaagaaagatttgtttactttttggtgatgtaagaaaattagagagaggataacactttttgtgcctttgattggctaagacatacatatatacacaagtctatacatataaaacatatatataacatttagaaatactttgtcacactattgagaaatgcacatttttatatctacaaacatgaatatggagacaaaaaggactaatatgaaggttagttcaaatacaagaaagtatataacctttcttctcttctctttttatgtgtcactgtacttcagatatcctattccagacctgttaaacggggcagggatgaatagagggaaggagacagcagagaaaattcaatttagattgcaataaagttgccagatcatgcccataatataycttcaaaacgtaatctgtaaagtcacttcaaatagacatcactatgtaattgtgattgtcattatatattaaattataattaataaaatacccagtaacagaaatcaattcactcctcgttatgcttcttaaatatatctattttattctcctttatttttctgtacctatttgttgacttgatctgtaaacaattatagatagggtataaatgctgtggttcagtcatgctcaagccagaatgcacagaagtcactaaccc

SEQ ID NO: 721374 - DNA, 613 bp, Homo sapiens
ccccactttatgaaaaggaaaattaaattgtttcagtgacaataaaggcatatcagacaggaagagaayggatattaaagttctagcattgttcttaaattgatttgttttattgaatatatttctttgccactttttctaatcactgaactgaaaatgatagtttctatatacctgaatgaattctaaggggtaaataaatgtaccttgaaaaatatgtaacataagtagttacatacagttgataaatctaatgcagcgatgcaatttacataagtgcagctaatattagaagaatcttgacattgcttctccttagaaatgtagagagctggaaagagcatcccataaaatctcacacaaaaaaaatattagggcaaatagaaaacatgtgcttttttttcttaaacacactgaattcttcaggttttagggtcaccaactggcccaaagtcagagccaagtgcctgaagggaaagataagacatgagctgtagagttcaactgtgatgactcatgagttggtggagggaaaagagggtcaggtacttgagagcctcaaatttctatcttattttgagattttccttcacacgccccacttcatgctcat

SEQ ID NO: 721375 - DNA, 613 bp, Homo sapiens
ccccactttatgaaaaggaaaattaaattgtttcagtgacaataaaggcatatcagacaggaagagaacggatattaaagttctarcattgttcttaaattgatttgttttattgaatatatttctttgccactttttctaatcactgaactgaaaatgatagtttctatatacctgaatgaattctaaggggtaaataaatgtaccttgaaaaatatgtaacataagtagttacatacagttgataaatctaatgcagcgatgcaatttacataagtgcagctaatattagaagaatcttgacattgcttctccttagaaatgtagagagctggaaagagcatcccataaaatctcacacaaaaaaaatattagggcaaatagaaaacatgtgcttttttttcttaaacacactgaattcttcaggttttagggtcaccaactggcccaaagtcagagccaagtgcctgaagggaaagataagacatgagctgtagagttcaactgtgatgactcatgagttggtggagggaaaagagggtcaggtacttgagagcctcaaatttctatcttattttgagattttccttcacacgccccacttcatgctcat

SEQ ID NO: 721376 - DNA, 613 bp, Homo sapiens
ccccactttatgaaaaggaaaattaaattgtttcagtgacaataaaggcatatcagacaggaagagaacggatattaaagttctagcattgttcttaaattgatttgttttattgaatatatttctttgccactttttctaatcactgaactgaaaatgatagtttctatatacctgaatgaattctaaggggtaaataaatgtaccttgaaaaatatgtaacataagtagttacatacagttgataaatctaatgcagcgatgcaatttacataagtgcagctaatattagaagaatcttgacattgcttctccttagaaatgtagagagctggaaagagcatcccataaaatctcacacaaaaaaaatattagggcaaatagaaaacatgtgcttttttttcttaaacacactgaaktcttcaggttttagggtcaccaactggcccaaagtcagagccaagtgcctgaagggaaagataagacatgagctgtagagttcaactgtgatgactcatgagttggtggagggaaaagagggtcaggtacttgagagcctcaaatttctatcttattttgagattttccttcacacgccccacttcatgctcat

SEQ ID NO: 721377 - DNA, 666 bp, Homo sapiens
atcccatgtaacttagcaaagctagcaagtccctaaactcggcgcagcactataggggtggcctcccagtagcattgttaacaccaattgtaattggtaggcaatcacttagtttcacatttcattaccygagttatacaaatgtgtaaaaaaaatacagttttaataaagggagtaaaggataatatgagtaatattcacaatctctagttggaagaggtagtgttttctcagaaatgatgcattcctggagcaaggtcattttatgtttggtttgttaaatatctatttccattttgacaaaccactggaaaatcccagcttcacaaggactctccatgagaatgatcaaacaaaagaacacccataacacaaaatcaaaacaagggtggtccaggcgtcacattaaagactcattaccaagttttcttagaagagataaagaacacaaagttacttttatgtgatggaaaacagagagaaagagtaaatggaacaataaatgttgggcaacaacagtgaaaaccaagctgtggaaaaaaatgaatggaaatgttttgtttggtattgatttcctatcctgatatcagaaagtatgggaaagaacaaagcacatttttttgagacaaatagaacataaaacaaatgaatgttaaagactatttt

SEQ ID NO: 721378 - DNA, 1030 bp, Homo sapiens
ctttaacctacacgtccgtgttagacgcattgtgtggtttctatcttgggatggagcccaggctgctacacaccttaacccatggacattgcacttcattagattatcactattggccaaagatcatgctccaccacccttctctgcccccgactttctttccttaattgaaacccctaaatgtcctctttgcacccaaagcttacctgctcttccttccctatattcttggccacacacaaaaatctgatgctctggcaaatgcaaaaatggggagaaggcaggggaatcatttctcttcccttacgtaagcactgagggtaatgtcattccattgtgtgaggaataaaaaaatgaggcatagagagctgccatgatttgcctggaccaatgaagctgtcatggcagaagtggaacaaaggtttaggtgtcccgaatgtcagtccagctcctatgccttcagaacgtgctgtggagggagacactgggggacccactcatgctgagcactcagggttacccaggttctgacagtggggatgtgacaggctgagctgactcagtccagtcctcttataccaaataaggatggaaaccctcacataatagaagtgaagacagggaacaaatccaggaacaattaagaggctgatgcctggaaggcctgggcagaatgacagggarattggagcagaacagaggccctagatggggacaaggggaaggaagtggcctcaggggccagatggcacctgtccactgcacagaggctggagccttgagttccatctagtccttgtcaactacaatcattatgccctatggctcaacgagtcctggagaaaatgtgttttctgcagcctggggaggtgagagtaaaacaattcagcctcaagaagttgaaagcccaggaaatcatagcacgtggagatgggattcatacttaaatttcctgcccttgacttctggtttggccacttgactcacattggccaatggatgtggtaaagtggttgtctgcccattctga

SEQ ID NO: 721379 - DNA, 1030 bp, Homo sapiens
ctttaacctacacgtccgtgttagacgcattgtgtggtttctatcttgggatggagcccaggctgctacacaccttaacccatggacattgcacttcattagattatcactattggccaaagatcatgctccaccacccttctctgcccccgactttctttccttaattgaaacccctaaatgtcctctttgcacccaaagcttacctgctcttccttccctatattcttggccacacacaaaaatctgatgctctggcaaatgcaaaaatggggagaaggcaggggaatcatttctcttcccttacgtaagcactgagggtaatgtcattccattgtgtgaggaataaaaaaatgaggcatagagagctgccatgatttgcctggaccaatgaagctgtcatggcagaagtggaacaaaggtttaggtgtcccgaatgtcagtccagctcctatgccttcagaacgtgctgtggagggagacactgggggacccactcatgctgagcactcagggttacccaggttctgacagtggggatgtgacaggctgagctgactcagtccagtcctcttataccaaataaggatggaaaccctcacataatagaagtgaagacagggaacaaatccaggaacaattaagaggctgatgcctggaaggcctgggcagaatgacagggagattggagcagaacagaggccctagatggggacaaggggaaggaagtggcctcaggggccagatgrcacctgtccactgcacagaggctggagccttgagttccatctagtccttgtcaactacaatcattatgccctatggctcaacgagtcctggagaaaatgtgttttctgcagcctggggaggtgagagtaaaacaattcagcctcaagaagttgaaagcccaggaaatcatagcacgtggagatgggattcatacttaaatttcctgcccttgacttctggtttggccacttgactcacattggccaatggatgtggtaaagtggttgtctgcccattctga

SEQ ID NO: 721380 - DNA, 1030 bp, Homo sapiens
ctttaacctacacgtccgtgttagacgcattgtgtggtttctatcttgggatggagcccaggctgctacacaccttaacccatggacattgcacttcattagattatcactattggccaaagatcatgctccaccacccttctctgcccccgactttctttccttaattgaaacccctaaatgtcctctttgcacccaaagcttacctgctcttccttccctatattcttggccacacacaaaaatctgatgctctggcaaatgcaaaaatggggagaaggcaggggaatcatttctcttcccttacgtaagcactgagggtaatgtcattccattgtgtgaggaataaaaaaatgaggcatagagagctgccatgatttgcctggaccaatgaagctgtcatggcagaagtggaacaaaggtttaggtgtcccgaatgtcagtccagctcctatgccttcagaacgtgctgtggagggagacactgggggacccactcatgctgagcactcagggttacccaggttctgacagtggggatgtgacaggctgagctgactcagtccagtcctcttataccaaataaggatggaaaccctcacataatagaagtgaagacagggaacaaatccaggaacaattaagaggctgatgcctggaaggcctgggcagaatgacagggagattggagcagaacagaggccctagatggggacaaggggaaggaagtggcctcaggggccagatggcacctgtccactgcacagaggctggagccttgagttccatctagtccttgtcaactacaatcattaygccctatggctcaacgagtcctggagaaaatgtgttttctgcagcctggggaggtgagagtaaaacaattcagcctcaagaagttgaaagcccaggaaatcatagcacgtggagatgggattcatacttaaatttcctgcccttgacttctggtttggccacttgactcacattggccaatggatgtggtaaagtggttgtctgcccattctga

SEQ ID NO: 721381 - DNA, 1030 bp, Homo sapiens
ctttaacctacacgtccgtgttagacgcattgtgtggtttctatcttgggatggagcccaggctgctacacaccttaacccatggacattgcacttcattagattatcactattggccaaagatcatgctccaccacccttctctgcccccgactttctttccttaattgaaacccctaaatgtcctctttgcacccaaagcttacctgctcttccttccctatattcttggccacacacaaaaatctgatgctctggcaaatgcaaaaatggggagaaggcaggggaatcatttctcttcccttacgtaagcactgagggtaatgtcattccattgtgtgaggaataaaaaaatgaggcatagagagctgccatgatttgcctggaccaatgaagctgtcatggcagaagtggaacaaaggtttaggtgtcccgaatgtcagtccagctcctatgccttcagaacgtgctgtggagggagacactgggggacccactcatgctgagcactcagggttacccaggttctgacagtggggatgtgacaggctgagctgactcagtccagtcctcttataccaaataaggatggaaaccctcacataatagaagtgaagacagggaacaaatccaggaacaattaagaggctgatgcctggaaggcctgggcagaatgacagggagattggagcagaacagaggccctagatggggacaaggggaaggaagtggcctcaggggccagatggcacctgtccactgcacagaggctggagccttgagttccatctagtccttgtcaactacaatcattatgccctatggctcaacgagtcctggagaaaatgtgttttctgcagcctggggaggtgagagtaaaacaattcagcctcaagaagttgaaagcccaggaaatcatagcacgtggagatgggattcatayttaaatttcctgcccttgacttctggtttggccacttgactcacattggccaatggatgtggtaaagtggttgtctgcccattctga

SEQ ID NO: 721382 - DNA, 628 bp, Homo sapiens
tttctcaagcagaactgtgaagggagtaaaggctgctttacaagcagggataaagatggaatatgagcatctccattgaaattggaataaaatgagattgsctactcattttaaaagcccacccaagtaaacccaggctgacctgggaaagtatcctggtccccagagatccgaatgaaagagaccattgcaaagagagaagagtggttggaaagctccctccttaaaacctgtatcctaggaaatgactgcctctaccagctcagtaaaaaggaggccaggaaagtaacctgctgtgtaccctttgagaactaccttctgctgcctgcagtgaacttgcctacaggcaaagagaattctgtggctattttaactgtatctagtttactttcaggagtatttagtgcctggaacaaaaatgagtagaacaaaggaataccctaggagtgtgatcacaacagcaagctgccggccacatcctgggccatacacttattagccttggcataataaatgatgtagtgtgacagagggggagttttagagtatcaaattgaaaggactgccattccagagctctaagcatttttcttctaccctttctgaatggatagaagtaggtctttac

SEQ ID NO: 721383 - DNA, 1277 bp, Homo sapiens
atacaattttgttattcaaggcaacatggatggacttaaagggcattatgttaagtgaaataagctaggaacagactkaaacactgcctgttcttctcactcttatgtggaagctaaaaaaatgttgatctcacagaagtaaaaagtataacagaggatactagagcctgggtagaatagggggaggaacagggagagatttgttaaaagatacaaaattatagctacaaaggaataagttctaccactgtaagatggttacagttaacaataatacatagtttcaaacagctagaaagagtatattgaatgttctcaacacaaaaaagtgataaatgttttagatgttggatatgctaattaactctatcttaacactacacattatatgtctcaaaacatcatagtgtaccctaatacatatatacaattattatgtgtaaatttaaaaaacagatatttaaaatgagaaatcatggagaaaaatattgttgtttaaatttgaaataattcaataaacaggataattttctaagtaaacatatttgaaaagagaatgtacaattgctaagatagtactaagtaattcacctggaataatttcgtaactctttttcatttatcaaaggatgttaaatacttcttcgtgttattaaacacaaatcaaaacattgcaagtgagtaaaaaaaaatctacaaaaaaacaaaaagaaatagaaacaggatgagaaacaatcctagcttatgaattgcacagtattgaaggtgactaacaaatagataagccattagaatacagcatgacaagggccatgataggaacaatggcaaggtcctagagggaacacagaaaaagctcctaatttttataaactgcagctgtagtttctgggtttcctcaacctagtctcaatttcaatgaatttctagaaggactcatagaattcagcaaaagcatttaactcatggttaaactttaacacagcaaaaggacacaggtgaaaattagaaataagaagaggtgcgtagggtagggcccaggagagtttcaggtgcaatttttcaaccatcctttcttaggggagttggacggagagggatttcgtctctccacgtcaatatatgtcaatacgcccagaatcttgccattcagggaagctcaccaagaatttgtgttcaagagttttatagggaagaaggaaacgggtagtcacgtagacatggctaactaactatgtggctagtcttcagtctgcaacccctccagaggtcactag

SEQ ID NO: 721384 - DNA, 1277 bp, Homo sapiens
atacaattttgttattcaaggcaacatggatggacttaaagggcattatgttaagtgaaataagctaggaacagactgaaacactgcctgttcttctcactcttatgtggaagctaaaaaaatgttgatctcacagaagtaaaaagtataacagaggatactagagcctgggtagaatagggggaggaacagggagagatttgttaaaagatacaaaattatagctacaaaggaataagttctaccactgtaagatggttacagttaacaataatacatagtttmaaacagctagaaagagtatattgaatgttctcaacacaaaaaagtgataaatgttttagatgttggatatgctaattaactctatcttaacactacacattatatgtctcaaaacatcatagtgtaccctaatacatatatacaattattatgtgtaaatttaaaaaacagatatttaaaatgagaaatcatggagaaaaatattgttgtttaaatttgaaataattcaataaacaggataattttctaagtaaacatatttgaaaagagaatgtacaattgctaagatagtactaagtaattcacctggaataatttcgtaactctttttcatttatcaaaggatgttaaatacttcttcgtgttattaaacacaaatcaaaacattgcaagtgagtaaaaaaaaatctacaaaaaaacaaaaagaaatagaaacaggatgagaaacaatcctagcttatgaattgcacagtattgaaggtgactaacaaatagataagccattagaatacagcatgacaagggccatgataggaacaatggcaaggtcctagagggaacacagaaaaagctcctaatttttataaactgcagctgtagtttctgggtttcctcaacctagtctcaatttcaatgaatttctagaaggactcatagaattcagcaaaagcatttaactcatggttaaactttaacacagcaaaaggacacaggtgaaaattagaaataagaagaggtgcgtagggtagggcccaggagagtttcaggtgcaatttttcaaccatcctttcttaggggagttggacggagagggatttcgtctctccacgtcaatatatgtcaatacgcccagaatcttgccattcagggaagctcaccaagaatttgtgttcaagagttttatagggaagaaggaaacgggtagtcacgtagacatggctaactaactatgtggctagtcttcagtctgcaacccctccagaggtcactag

SEQ ID NO: 721385 - DNA, 1277 bp, Homo sapiens
atacaattttgttattcaaggcaacatggatggacttaaagggcattatgttaagtgaaataagctaggaacagactgaaacactgcctgttcttctcactcttatgtggaagctaaaaaaatgttgatctcacagaagtaaaaagtataacagaggatactagagcctgggtagaatagggggaggaacagggagagatttgttaaaagatacaaaattatagctacaaaggaataagttctaccactgtaagatggttacagttaacaataatacatagtttcaaacagctagaaagagtatattgaatgttctcaacacaaaaaagtgataaatgttttagatgttggatatgctaattaactctatcttaacactacacattatatgtctcaaaacatcatagtgtaccctaatacatatatacaattattatgtgtaaatttaaaaaacagatatttaaaatgagaaatcatggagaaaaatattgttgtttaaatttgaaataattcaataaacaggataattttctaagtaaacatatttgaaaagagaatgtacaattgctaagatagtactaagtaattcacctggaataatttcgtaactctttttcatttatcaaaggatgttaaatacttcttcgtgttattaaacacaaatcaaaacattgcaagtgagtaaaaaaaaatctacaaaaaaacaaaaagaaatagaaacaggatgagaaacaatcctagcttatgaattgcacagtattgaaggtgactaacaaatagataagccattagaatacagcatgacaagggccatgataggaacaatggcaaggtcctagagggaacacagaaaaagctcctaatttttataaactgcagctgtagtttctgggtttcctcaacctagtctcaatttcaatgaatttctagaaggactcatagaattcagcaaaagcatttaactcatggttaaactttaacacagcaaaaggacacaggtgaaaattagaaataagaagaggtgcgtagggtagggcccaggagagtttcaggtgcaatttttcaaccaycctttcttaggggagttggacggagagggatttcgtctctccacgtcaatatatgtcaatacgcccagaatcttgccattcagggaagctcaccaagaatttgtgttcaagagttttatagggaagaaggaaacgggtagtcacgtagacatggctaactaactatgtggctagtcttcagtctgcaacccctccagaggtcactag

SEQ ID NO: 721386 - DNA, 1277 bp, Homo sapiens
atacaattttgttattcaaggcaacatggatggacttaaagggcattatgttaagtgaaataagctaggaacagactgaaacactgcctgttcttctcactcttatgtggaagctaaaaaaatgttgatctcacagaagtaaaaagtataacagaggatactagagcctgggtagaatagggggaggaacagggagagatttgttaaaagatacaaaattatagctacaaaggaataagttctaccactgtaagatggttacagttaacaataatacatagtttcaaacagctagaaagagtatattgaatgttctcaacacaaaaaagtgataaatgttttagatgttggatatgctaattaactctatcttaacactacacattatatgtctcaaaacatcatagtgtaccctaatacatatatacaattattatgtgtaaatttaaaaaacagatatttaaaatgagaaatcatggagaaaaatattgttgtttaaatttgaaataattcaataaacaggataattttctaagtaaacatatttgaaaagagaatgtacaattgctaagatagtactaagtaattcacctggaataatttcgtaactctttttcatttatcaaaggatgttaaatacttcttcgtgttattaaacacaaatcaaaacattgcaagtgagtaaaaaaaaatctacaaaaaaacaaaaagaaatagaaacaggatgagaaacaatcctagcttatgaattgcacagtattgaaggtgactaacaaatagataagccattagaatacagcatgacaagggccatgataggaacaatggcaaggtcctagagggaacacagaaaaagctcctaatttttataaactgcagctgtagtttctgggtttcctcaacctagtctcaatttcaatgaatttctagaaggactcatagaattcagcaaaagcatttaactcatggttaaactttaacacagcaaaaggacacaggtgaaaattagaaataagaagaggtgcgtagggtagggcccaggagagtttcaggtgcaatttttcaaccatcctttcytaggggagttggacggagagggatttcgtctctccacgtcaatatatgtcaatacgcccagaatcttgccattcagggaagctcaccaagaatttgtgttcaagagttttatagggaagaaggaaacgggtagtcacgtagacatggctaactaactatgtggctagtcttcagtctgcaacccctccagaggtcactag

SEQ ID NO: 721387 - DNA, 1211 bp, Homo sapiens
agagtgtcaaaccaaatgccccttagagactcctggtctctcagcagttcttcagtgtgagttaatagaatggtactttacacattcctttcttgcatgaaacccttactataaatacctaagttataacaagacagggctgaggttctgaagagacaagagggagtatgtgtttcctaacttcctgcaggttcctaaacaaccattttccctctgatttttatctctactaaccttcctggcatcttctatcttgtcattaatttgcacctgctttctatgtcacacgagcacttttaaataagtgtatgtctccgggactccatttctcctttttctgtttcatgtaatcttctggcatcttcaaattttttctttgcacaatttaattttttaatataactcttcacagtactaggtgggtaaaagtccctccaaaaaagttgctttctttaatttctctcctctgcaaccctattatttaattcaatgattaattaaacatgcactatgtgctagagacagggtttaaattggtggacacatcagacataatccccgtcttcccagggttgacaatcagaagaggaagatctatagaacattcacaagtcctctaaagagaatgaacaacatagaagataagaaatgagtggcctggtgggcatggccaagggagtcatttctgagtatgtggtccataagcagatactgaaaggacctacaggagccagctttgtaaaggcaaatagcagctcattgagtgtagctgcatcaggctaagtgaaagctctgagacacaaaagataagtttctgccaaaaatgtgtttagtgacagggaaattagaggaggagggacatgaagaaacgtcagcctctctcctggaactttgtatttacatctacaccaaagctggtggagtcacatattgacttacagcsctgaccctcaccccctgcccaggttcacagcccacgtcttcatgtgggtgcttcacacacaactaaaatcatcctacttaaatgcagatccactgtcttcccccaatgagccaagtctccctccagtgttctcttgcctagaaaagaaaactgtaccaaaaaaactcgcaaaaaaaaattgtgtctttaatattataaccacagtaaatgctgagactccttgtgacccagtctatgcaaataattgcacagaaagaagcacagtaga

SEQ ID NO: 721388 - DNA, 1970 bp, Homo sapiens
tgaagggatttcttgtggcaacagtttttatctcagacatgtaagcttgagtctcctttccttcaagtcttcctgaccctattgtgtctagttctgacaaaagcagttttatcctcgtatccacaaattccacaggcccaagaacagataagcagccaagaaatggagtatccatctagctggaagtcataaagtagagtagggccagccaacccaaagaagtagaattgggctaggcgcagtggctcatgcctgtaataccagaactttgggaggccgaggtgggtggatcacctgaagtcaggagttcaagaccagcgcttggccaacatggtgaaacccatctctactaaaaatacgaaagaaaaaattagctgggcgtggtggtgcatgcctacagtcccagctactcgggaggctgaggcaggagaattgcttgaacctgggaggcaaaggttgtagtgagccaagatcatgccactgcactccagcctgggcaacagagcaagactctgtctcaaaaaaagaaaaaaaaaatagagaaatagaaaagaaataggattgggtgaagctaagtgagcatggattaaaaagcctgaggtcaggaagagtatgtctgcaaaaacaaggtggaaggtaattggccggtgttgtcccaatattagttgtccacattcacttctttcctaaacaagagagacatgcagtggccaatgactgatagggtcagggtgtcagaaaaaggatggacatagttcctttggtgattcctgtgccacatgaacatatctgcaaggacttcaggcagaatcgctggagtagggcttggaggaaaggcaaaatggcttcatagaaatctctcctcctatctttttctggactcctatccaggatggtggtttcagatcaggtcaagcaggaatatttgttaacatgaaaggtattttatttcttagggatggtcacttgatgataatgttggaatattactattagcaaatctaaatttaatttcccttttatttccctttcatgtaatgttcagagttttcttgattaggccacttcagcatcattagccactatactcaatcacctgtgttatcagaactttgtgttgattgtttgctcatacttggctaagagttcttgtcctggggccaatgagtctgggctttcaaggatgcccttcttagagtctgtgaattattggtaactttatacaaattatatgtaagtttatatgcatttagttagtttcttgaaggagtctatgactccaagaaagtaaaccgccatactatttcctcagcctaaaatacttattttcctatcaccatctttcagtaacattatttaatcttatcctttaatgtctggctgatgccgtctacttgttaaacatattctagattgtccaagccaaaattaaataagtctttcctctcaacttccattatggtttggatgagtctctaattgacaacatatttcaatttgcctaatgctaagttgataattaaatatctgtctgtactaatggattagaagttccttggggagacaaagacccatacatcattcatctttgtgtatactaattgtartaatactttataaatagtatatacacaaaaataaaaacttctatgttactgagcaggatgctgttcattttattgaatttaacaaattctggaatatatctgtctaggtccttggtactcagtgtacttttcgtttcttattgacttaaattccacttgttcaaccatacaatagcctctgccatgcctgagcagccctattccctacttacaaccccagcccttagtctgacataacactggctctgcctctagccctaagcacatctctctgcccgccagtatcctatggttctgtgttaacttcagtttcaagtcagcctcttaacacccattcgaaaatgacttatggaaagggaaaat

SEQ ID NO: 721389 - DNA, 601 bp, Homo sapiens
tttttttctctttttggtagagatggggtcttgtcatgttgaccaggctggtctcaatcttctggtctcaggccatccttccacctcattctccccaagaactgggattacaggtatgagcaactgcacctggtccatatgcttcttatagttgaagaagtgaagggtcaatgactttactaaaatactattaaagtaataaagctaggacttagccccaattattcatccttaaagtccaatactttcaatatattaagttgctctttattatatgaattctaaatatcttttttaccttttgttatctaatctggaaatcctatataaatgtataattttatacatgctgactgatatcctctctagtcttcyatactaggacgtaagacctcatctttcattcactgaacatctactcagtgtctactatatatacaaggttctgtagtgggccagttagaaaccaatcccattttctttgagacttccctatgattctcaataatcactcccatgtttaaactcctattatagctgtgcaactatcttgacactttaacataaaacttgccatttatcttttgattcttagctcaag

SEQ ID NO: 721390 - DNA, 744 bp, Homo sapiens
tgaattacagatagtctaataagataaaaggaagaaatctgatacacagtgctggagtaattccctattatatggcatggaataaagtaataaattatcacagacaacacattttttatcccaaaattcagtttccagtacttgaaaagacktggagacaatatcctttaataggcagaagatgataataatggcttggaaaaaagaaaatataatacaggaggctgcagagaagtcatgaataaaaccctcatggggagtatcataatcaagttgaacacaactggaaattcagatacaaaagaaaatctttatagtacttttttatgtatattccttatcattgtgccttctaagtccatcaaaagaaatttcaaatctctctcatatttgtgctgtaagagctaaaaattcaaattgatgaaggtatattacgttggtaacttaaatgtcataagcagcatctccatgagtgatatgatactccaaaatagtcaataacttcatgagtatccagtgacaactaaataaaaattttttctaatacacatagtttagtttctgaaaaatagaatgtgtattataattttacaaaacacattttgtatttatatctaaaaaatgaattaggtcctaggctatatacttataaatacatatttcacttacattactgcctaccaggatatctttgatatttgacctttgttcactaagtgaaatccaaaagctctccttttctca

SEQ ID NO: 721391 - DNA, 1531 bp, Homo sapiens
gataaaatttggataatatgagtttttttgtttgttcgtttgtttttgagatggagtcttgctttttcacccaggctggagtgcagtggcgcaatctcgactcactgcaagctctgcctcccaggttcacgccattctcctgcctcagcctcttgagtagctgggactacaggcgcccaccaccacaccaggctaattttttgtatttttagtagagacagggtttcaccttgttagccaggatagtctcgatctcctgacctcgtgatccacccttctcggcttcccaaagtgctgggattacaggcgcgagccactgcgcccagccacgcctggctaatatttgatttcaccaagttggtcaggttggtctccaactcctgacctcgtgatctgccagccccagcctcccaaagtgctgggattacaggcgtgagccaccatgcccagccaagatttggataatgtttaatgtcaccctgacctatttgaaatcttagttctaacttcagagctaccacattaatatttaaaacatttaatcaatgagtttcatctcttttgttggtattgcgcttttttccctgtattgtataggtcttaaatatctgcattatgttgagagtgtgctaaaagaaggatcttcatttgagcatgtacatccagaggagacattgtccagatttttaaattccataggtaaaaatctctttaaaaaagtttgtctgcaagtatcttaaaattcacaaatagttctttccctctttattagagaaacttacatatcttacctgttacaagttttactaaggtgatttggcccagaatgtgaaaacctctaaggaaccaaacaaacatgatctcttttaaagattattaattaaggtcccataaacctatgttctgtggggtgtggtgaagtggcagatataaaacttagtaacaaaaaagtatcttggtgtatgtgaattaagatatatggtatactggtatgtagaagtactaagaacataatacatttatattctttgcctcctccatctcctcagtatcttcaaagaaaacattccttttgaggcagagacccctgagagaatgagactcgtttcttgcaatgctataatgaaatacctgagactaggtaatttataaagaaaagaggtgtaattggctcayggtcccgcaggctatatggaaagcacggtaacacctgtttctggggaggcctcaggaaacattcaatcatggcagaaggtgacgtgggagcaggaacccattaaaaggcagggcaggaggaagagacagagggggtaggtgccacacacatatgaacaaacagatctcatgagaactctatcaggagaatagcagcaaaagcatggtgctaaaccacccccatgatccaatcatctcccaccaggccccacctccaacactgggaattaccattcaacataagatttgggcggggacagagatccaaatcgtatcagaggaaaaccaaaacagatctgccttgccaaagtagaaa

SEQ ID NO: 721392 - DNA, 1092 bp, Homo sapiens
tgctggttattcaattctaatcaatagaagcaaatattcacatagcctgaccttcagcaaatttcaagaaggatagaagggcaaaataattcagagtggaataaaatagtgaccatgtcttgtaaattccaggaatatatttaatttttttgtttttattttaactgagacaggaagtgaatgaattataaaaagaaattggctttaaattggaaaaatttgtatcatagctctggaaaatattcatgaactcagcttttcttgacttctgtacattaagactggatgtaaacatgttaccatagtagtcacttttttttttttaaaccagggggtaagggaatcacttttataacttttataattccagggctagaaaaaaagccataagggaaattatcatggttttctttctctcagtcttttaaatcccggcctwacaccaactcttttatctggaacacctataaaagaatgcttgaggaaatgtctagcttagcacctcttgacctttaaaatgtgcacatgctgtcacccttatgaggaaagaagtgtttagagctaagacaaagggaaagagagacaggaaaatggaaaggcagaagaggaggctttgcaaatagaaggcaatgtttacccttaacttatatccctttcttctcctcaccttccttctttcttcacctctcttcagtgttcttgtctgactcctatcaaaactcacttccagaggggctcacacatcagtccctataactttgtggtgagttgaagttaaactgctggttttaaaacattatatttacatattttaagtgtagtctaccatcgtggagtaagatttgtcttctgccaaagcatttttaagcatcaacacgcaactggagaaatgtttattatttgggaggctatgtagttaaatgaaattgtatcccattgtcccttggaatctgcagtggattggttgcagaacccctagggaaccaaaatccacagatgcttgtctctggtataaaatggcataatatttgcatattatctatgcgtctcctccaatatactttaaatcatttctagattacttataatatc

SEQ ID NO: 721393 - DNA, 797 bp, Homo sapiens
tgggtatctgtggagaaaagtgtgttatgaagtgtgctaagaatttgtatgatatttgcaatcctttttgttatttagactcaattattttcaatttttcctaaaagacttatttttttaaatgtaatacaccaggaggaagaccatattcccttcttttccaataatttgtcattgtgttagtacttttgatgcttgtttgcwggactaatatatttcacttgcccattttatgggactgtgtattctgtgttgatttaagtaactcttgagagagagtgatttcatacaaaagaacaaaatgttcctaaccatagactaaaagcagaggcaatgggacctaaaaacttcaggtgtgttatatggaggatgatataaatctaaatgttcccagcatcagtaggaagaatacaagatattgggtggtgtcatattttgggaaagtgaatcattgtgttttataatggattgtgaaaagaacttgatctaatatatcacagttattttgattccataggtcacccagggaagtggctgataacctacttgtagctagcaagaatatatgatggaattaaatacatttattcgtaaatgagcaaaaattgtatattcaaggtgataggcactttaagttctcataagctttcagtacagttccatagagcagattttttttttcttatttattcttattgactgtgaggcagatcctaaattgatgaatatccagactttttcaaaactttagcaagataattcttttgaaaataaacccttcattaatgctacagaga

SEQ ID NO: 721394 - DNA, 797 bp, Homo sapiens
tgggtatctgtggagaaaagtgtgttatgaagtgtgctaagaatttgtatgatatttgcaatcctttttgttatttagactcaattattttcaatttttcctaaaagacttatttttttaaatgtaatacaccaggaggaagaccatattcccttcttttccaataatttgtcattgtgttagtacttttgatgcttgtttgctggactaatatatttcacttgcccattttatgggactgtgtattctgtgttgatttaagtaactcttgagagagagtgatttcatacaaaagaacaaaatgttcctaaccataractaaaagcagaggcaatgggacctaaaaacttcaggtgtgttatatggaggatgatataaatctaaatgttcccagcatcagtaggaagaatacaagatattgggtggtgtcatattttgggaaagtgaatcattgtgttttataatggattgtgaaaagaacttgatctaatatatcacagttattttgattccataggtcacccagggaagtggctgataacctacttgtagctagcaagaatatatgatggaattaaatacatttattcgtaaatgagcaaaaattgtatattcaaggtgataggcactttaagttctcataagctttcagtacagttccatagagcagattttttttttcttatttattcttattgactgtgaggcagatcctaaattgatgaatatccagactttttcaaaactttagcaagataattcttttgaaaataaacccttcattaatgctacagaga

SEQ ID NO: 721395 - DNA, 1642 bp, Homo sapiens
gcccttttatagcatgttgcagtacttcagaaaggaaaaggcccagcttcctaacattgccataaatcagggagcctatagctgtagcaatacttgcaaggttacccaactcctgagtttctgataaattttctcttatcagtgaagatagatgcggttacaattctgttctggagggctcaggtgtaacaatggcttgtaggtcattttcttaagtgaaagagaaaaaaatgctgcmttttctggctattttaacttttatcttagaaataatcatttccctcatctagcttttcagtttcacttctcacacatacacacattaacttgccatgccagaaacctttgttcctcttttttagacacctagcctatttgctgtacccagagtgcgttactctaaatttgctttaatcattttctcttatgcaaagactcagaataacttatgatgtgttgtcttccctggacattgctttttaagaaagaacaaatataaaaattctaatagtgacatttcaggcaatgtgacaggcaactgaaggcatagttttggtcatgagcttcttcttgtccccatagtacaccagatgagaggttgtgtaaatattcaaggctgacttgatgcagttcatttctcaagagaaggatattatagtgtcacagatattcctgttacttttctggccctgccatattatacttcctttctatttaccttgcttctttttgatgtatacattgaacacattttgttgacatttatttctgtttatcgatttttccaaaaattaaaatttgtcactgctgaaatttctcccttgcttttttttctatgggaagagtataatacatctatatcaatgcttgaaaactacaacaaagtgaccatcactttgtatctaggagatgtggcctgtgttggcaaaatacagaaagaaagaggaagtctcccaaaactctgaagctgcattaaaggaactagaatactcatattaaataaatgacattttcagattctcagtaacagtacaattttgaaaatagcatatattaatgaattgtactatttcattgtaagataacaaggaaactaaaaatagaatatatgaagaaaatgaacataacaatatctctatttattacttgttcatttttttttgccagacatgatgctatggaactttaattatttatctagtgaaatttcactcagcgaccctgtaagaaggtgtcattgttattccctttcacaaatgaggaaactgagcttaaagatatttggtaatacaaacaaggttacccagctgggagtaagaagggccacgatttaaacccgaggcttcttgacttgcagtgtctaattatgctgcactaagccatggctctatatgaactccatttagaaagcatgtcaaaattaagatcagaagcaccattggtctctagtagattaaaagttttcttagcaaatgaacaccgaaaatcacaattaaagtccacttttttcctttcaactaattcagagtatggctaatagaaaatgtgtaaatccaaggagtattggcagaatacaccaacaacgtctaaagcctcaaaaacttgcatttgttagaaatactctgtttggtaatctttctca

SEQ ID NO: 721396 - DNA, 613 bp, Homo sapiens
  misc_feature 6, 7, 8, 9, 10, 11, 12, 13, 14, 15, 16, 17, 18, 19, 20, 21,22, 23, 24, 25, 26, 27, 28, 29, 30, 31, 32, 33, 34, 35,36, 37, 38, 39, 40, 41, 42, 43, 44, 45, 46, 47, 48, 49,50, 51, 52, 53, 54, 55, 56, 57, 58, 59, 60, 61, 62, 63,64: n = A,T,C or G
  misc_feature 65, 66, 67, 68, 69, 70, 71, 72, 73, 74, 75, 76, 77, 78, 79,80, 81, 82, 83, 84, 85, 86, 87, 88, 89, 90, 91, 92, 93,94, 95, 96, 97, 98, 99, 100, 101, 102, 103, 104, 105: n = A,T,C or G
tgacannnnnnnnnnnnnnnnnnnnnnnnnnnnnnnnnnnnnnnnnnnnnnnnnnnnnnnnnnnnnnnnnnnnnnnnnnnnnnnnnnnnnnnnnnnnnnnnnnnngtgtgtgtataggttggatgggaagagtgactggggactaagaggcatccaggaggtggctactattatccagagagaaacaatgacatcgtgacaaaaaactttgagaacaaactccatgcaatgaacccctgactgtccacctggaagggccacatggacatctggtggagtctactcccagggccgtcccatgcaccatgagcgcatgtcattccccacacaggtgtctgacccgggggtgggrggaatgtgggctgaaatccagtctgtgctccactggccaagccaaagtgtggggctacgtccacccagaggggtgctgttctaatttacatgaaggttcactatatgcaagtgcagccctgtacattgccctttctttcagcaagagcaccccaaatttcctcaggagtaccacccctttactctgtccagatcatgtagtttaggtagggctcgactcacctccagcactagagatgggcacatgacccaagcctggcca

SEQ ID NO: 721397 - DNA, 1091 bp, Homo sapiens
tctttcttttttttttttccaagatagagtcttgctctgtcacccagactgcagtgcagtggtgcgatctcggctcactgcaacctccgcctcctgggttcaagcaattctcctgcctcagcctcctgagtagctgggattacaggcacacaccaccacgcccggctaacttttgtatttttagtagagacagggtttccccatgttggccaggctggcctcaagctcctgacctcatgatcctcctgcctcaggctcccaaagtgctgggattataggcgtgagccaccgcaaccgaacaggcacattttttctgaggataatcaccctgagatctctcaacaaagggaggcattagaaaatgaccagagtcatccccagtgtcatccatagggagcccagaacaacctcaccccagattctgccccagagcaggaggctgttccaagggcatggggtagtaggcacattagagatggggacatgagggccagtggcagagttgactgtcagaatctcaccaccacgatgtccaaagtgaagctgagaatgcttcagagaagatgatgtgatatagacatgtgttcttgattttttgctatgactccagcgtagtcagttgcctctcctagaattcacagtccaggtgcggccagctgccattttcactgcagtatcagcttcactggctccagaagccacgaggacaagggtttcrtttgtctttagtgctgatcaacaccagtggctcggttgattagcataatgactgttaaaaataaatgagttttcagaggtgaaatcagtggcttgttagccagcttaatggatgctggaaacaggcacttgttgataaaattagtgggattcagaatacacagctcggttaaaatattttagaggcacttcctcccctggcacaaattaggtgtaagaatccagcaagccccagggatggcacttcaggctgctccctggtaggtcctgggtccagccactggttaagggtgattctggcgggcacagtggctcacgcctgtaatcccaacactttggaaggccgaggcagtcaaatcacttgaggtcaggag

SEQ ID NO: 721398 - DNA, 1331 bp, Homo sapiens
  misc_feature 1021, 1022, 1023, 1024, 1025, 1026, 1027, 1028, 1029, 1030,1031, 1032, 1033, 1034, 1035, 1036, 1037, 1038, 1039, 1040,1041, 1042, 1043, 1044, 1045, 1046, 1047, 1048, 1049, 1050,1051, 1052, 1053, 1054, 1055, 1056, 1057, 1058, 1059: n = A,T,C or G
  misc_feature 1060, 1061, 1062, 1063, 1064, 1065, 1066, 1067, 1068, 1069,1070, 1071, 1072, 1073, 1074, 1075, 1076, 1077, 1078, 1079,1080, 1081, 1082, 1083, 1084, 1085, 1086, 1087, 1088, 1089,1090, 1091, 1092, 1093, 1094, 1095, 1096, 1097, 1098: n = A,T,C or G
  misc_feature 1099, 1100, 1101, 1102, 1103, 1104, 1105, 1106, 1107, 1108,1109, 1110, 1111, 1112, 1113, 1114, 1115, 1116, 1117, 1118,1119, 1120: n = A,T,C or G
gggctcacctgtcctacatcacaactacaataaatatatcctagccttgctaaacttatggagggtgagagagacaaacaagcgatgataatataaggttacatgtgctacttatagaaatctgagcatggaatgggaagcaatagggaatattgtgtctcatgacattttttattttgtttcaaaggcacatcttgttgcgagctagagaaaaggacaagattttgtgtgtgtgtgtgtgtgtgtgtgttctcacttcctgcagtagyatgggcatatttcagaaaagcatttaattgatgaagatctgaaaactcagatcaaatcaattgttaatttttttaagagatggggtctcactatgttgcccagactggagtgtagtggctattcacactggagtgatcaaagagctcactgcaacctctggagtcctctgcctaggctccagtgatcctcctgcctcagcctcccaaacagctgagactacaggcatatgccaccacaccagactccaattattaactttgacatatgtatatgaaacgtattgtcttagacacttggagttaatagacaaaaataaaaccttatttgtaattgtactagccccaagagaactttgaaattactaacaatagaagactaattaacactgggatcattaagataaaaataaaaatggaaaagtaatatattacaagggagactataattacaccagaaagacaagctaaagacggttatgacaatgacacattaaatgtgttttagagctacatgataacacaaaatcatgcaagatagatagattagatagacagacagacagacattattgtctgataaaaacagggaatcagttaaccagcacagttgaattatctggtgagatatttatttttacaaataattatgccctgcttattcgttttaatgaacaatcaggattaaagccagggtaatcagtacaaacaaattttttattctcagcagtaacttaaacggtaccgagtgcggnnnnnnnnnnnnnnnnnnnnnnnnnnnnnnnnnnnnnnnnnnnnnnnnnnnnnnnnnnnnnnnnnnnnnnnnnnnnnnnnnnnnnnnnnnnnnnnnnnnncttctctgaagatttcttcaatgttttcatactgatttattttatttctttgagttttacaatactgtgtgtgtgtgcatgtatctggaatagtatttatgatcgtctgctttgttaatagctccaacagcaaccacaatgaaaccaacagtacagatataagtgaatatgtactaagcactttctttatgccagactcatgaaaagagct

SEQ ID NO: 721399 - DNA, 1331 bp, Homo sapiens
  misc_feature 1021, 1022, 1023, 1024, 1025, 1026, 1027, 1028, 1029, 1030,1031, 1032, 1033, 1034, 1035, 1036, 1037, 1038, 1039, 1040,1041, 1042, 1043, 1044, 1045, 1046, 1047, 1048, 1049, 1050,1051, 1052, 1053, 1054, 1055, 1056, 1057, 1058, 1059: n = A,T,C or G
  misc_feature 1060, 1061, 1062, 1063, 1064, 1065, 1066, 1067, 1068, 1069,1070, 1071, 1072, 1073, 1074, 1075, 1076, 1077, 1078, 1079,1080, 1081, 1082, 1083, 1084, 1085, 1086, 1087, 1088, 1089,1090, 1091, 1092, 1093, 1094, 1095, 1096, 1097, 1098: n = A,T,C or G
  misc_feature 1099, 1100, 1101, 1102, 1103, 1104, 1105, 1106, 1107, 1108,1109, 1110, 1111, 1112, 1113, 1114, 1115, 1116, 1117, 1118,1119, 1120: n = A,T,C or G
gggctcacctgtcctacatcacaactacaataaatatatcctagccttgctaaacttatggagggtgagagagacaaacaagcgatgataatataaggttacatgtgctacttatagaaatctgagcatggaatgggaagcaatagggaatattgtgtctcatgacattttttattttgtttcaaaggcacatcttgttgcgagctagagaaaaggacaagattttgtgtgtgtgtgtgtgtgtgtgtgttctcacttcctgcagtagcatgggcatatttcagaaaagcatttaattgatgaagatctgaaaactcagatcaaatcaattgttaatttttttaagagatggggtctcactatgttgcccagactggagtgtagtggctattcacactggagtgatcaaagagctcactgcaacctctggagtcctctgcctaggctccagtgatcctcctgcctcagcctcccaaacagctgagactacaggcatatgccaccacaccagactccaattattaactttgacatatgtayatgaaacgtattgtcttagacacttggagttaatagacaaaaataaaaccttatttgtaattgtactagccccaagagaactttgaaattactaacaatagaagactaattaacactgggatcattaagataaaaataaaaatggaaaagtaatatattacaagggagactataattacaccagaaagacaagctaaagacggttatgacaatgacacattaaatgtgttttagagctacatgataacacaaaatcatgcaagatagatagattagatagacagacagacagacattattgtctgataaaaacagggaatcagttaaccagcacagttgaattatctggtgagatatttatttttacaaataattatgccctgcttattcgttttaatgaacaatcaggattaaagccagggtaatcagtacaaacaaattttttattctcagcagtaacttaaacggtaccgagtgcggnnnnnnnnnnnnnnnnnnnnnnnnnnnnnnnnnnnnnnnnnnnnnnnnnnnnnnnnnnnnnnnnnnnnnnnnnnnnnnnnnnnnnnnnnnnnnnnnnnnncttctctgaagatttcttcaatgttttcatactgatttattttatttctttgagttttacaatactgtgtgtgtgtgcatgtatctggaatagtatttatgatcgtctgctttgttaatagctccaacagcaaccacaatgaaaccaacagtacagatataagtgaatatgtactaagcactttctttatgccagactcatgaaaagagct

SEQ ID NO: 721400 - DNA, 636 bp, Homo sapiens
ccattaaattgccaagtctctgaaaaaaatataggtgtcaagaattatttttattactgtttctccttgcttataggtacatatttyaaatttatcctgcaaaccagctcctcctatcttccctgggtctattatcccatcatgtaagacaaaaggttgaggtcaccttactttgggtctctcttctttctatctataatcagctgttgctaagccccataaatatctctcagaatattttaagagcataacaacagtaatagtgataacagcagctgtagttgacagtttttattgagcatttgctatatgccaggcaatgacctaaaatatttacagcattaatcttcattataaacccaaagccagatcgtcttcatttgatagatgagaaaaataaaagcacattcattggaaaggataatactttgttcagtgccacaactggaagataggagacccaggaattgtacccaggttctcagtccactaattctcttgatttattgctttctcacgtgcgtgtgtgtgtgcgtgatatatgtgtatatgtgtgtatatacatatgcatatatgtatgcatatacaggatatattgagatacatgcatacatgtccacatatatacatacattt

SEQ ID NO: 721401 - DNA, 1347 bp, Homo sapiens
ctacacatgacacatccacaattctgtcagtctttaccaacatgatcaaaagactataaagagacagaacggttctccataatttcttgaaatgaaagcacatgccatgattatccccaaagtttaagatattttgctatgagtagtggtttggaggattaatttgaaagaatacaattttctcagtgaacaccatccactaagctcctcatttctcttacatttcttaaataggacctaaaacatgggtcggcagttagcagtggcatctacaagggccatgactgtggaattgtgttctattctagaacaacagtaatatcgtttggacctgtgtccccacccaaatctcatgttcaactgtaatccccaatgttggaagtggggcctgtgggaggtgattgaatcctgggggcrgtttctcataaatgggttagcaccatccccctttgatactatccttttgataatgagcaaattctcatgagttctagttgtttaaaagtgtatagcacctcgcctcctctctccttttctgactctggtcatgtaatatatgcgctcccccttcccttccgccatgattgtacgtttcctcaggcttccccagaagtgagcagatgctgccatgcttcctgtacagcctgcagaactgtgagtcaaataaaccttttttctttttaaatagccagatgtcatgtatttctttataagagtgtaagaatggactaataccaagttgtatatagcttctctaggatgattaatggcaagaaagacaccagagagacttccaataggtattttggataatcccttagtcaacagataagagcaacaagaaagattccatacatagctatgctgtatattcagaaacagagactaagtggacaagaaaagtgagtgatagaacagcttcaccaacgctaagaaaccataaagagatcaagttcctctgcatagcagcctgcaactacagattctgccccacagttttccatctagaaaatctctagactgcccatacctatttctattattcggctctccagattaagatttgagattttaagataattttaagagtgtccctgtgagaatgatataagcataggaggtttttattgtcatgtttgtagacaagatcaggccaagggtagactctcacatgtacagatgagtatataggaaatacccaaaataaaatataaaacatttctataaaaaaggaaagatgagaacatataattcaggagaggaaagaggagctttttttgataaagaactctttaggcaaagaaaaaaaaatattagagaaattatgcctggtgatttccataaaat

SEQ ID NO: 721402 - DNA, 1347 bp, Homo sapiens
ctacacatgacacatccacaattctgtcagtctttaccaacatgatcaaaagactataaagagacagaacggttctccataatttcttgaaatgaaagcacatgccatgattatccccaaagtttaagatattttgctatgagtagtggtttggaggattaatttgaaagaatacaattttctcagtgaacaccatccactaagctcctcatttctcttacatttcttaaataggacctaaaacatgggtcggcagttagcagtggcatctacaagggccatgactgtggaattgtgttctattctagaacaacagtaatatcgtttggacctgtgtccccacccaaatctcatgttcaactgtaatccccaatgttggaagtggggcctgtgggaggtgattgaatcctgggggcggtttctcataaatgggttagcaccrtccccctttgatactatccttttgataatgagcaaattctcatgagttctagttgtttaaaagtgtatagcacctcgcctcctctctccttttctgactctggtcatgtaatatatgcgctcccccttcccttccgccatgattgtacgtttcctcaggcttccccagaagtgagcagatgctgccatgcttcctgtacagcctgcagaactgtgagtcaaataaaccttttttctttttaaatagccagatgtcatgtatttctttataagagtgtaagaatggactaataccaagttgtatatagcttctctaggatgattaatggcaagaaagacaccagagagacttccaataggtattttggataatcccttagtcaacagataagagcaacaagaaagattccatacatagctatgctgtatattcagaaacagagactaagtggacaagaaaagtgagtgatagaacagcttcaccaacgctaagaaaccataaagagatcaagttcctctgcatagcagcctgcaactacagattctgccccacagttttccatctagaaaatctctagactgcccatacctatttctattattcggctctccagattaagatttgagattttaagataattttaagagtgtccctgtgagaatgatataagcataggaggtttttattgtcatgtttgtagacaagatcaggccaagggtagactctcacatgtacagatgagtatataggaaatacccaaaataaaatataaaacatttctataaaaaaggaaagatgagaacatataattcaggagaggaaagaggagctttttttgataaagaactctttaggcaaagaaaaaaaaatattagagaaattatgcctggtgatttccataaaat

SEQ ID NO: 721403 - DNA, 601 bp, Homo sapiens
caaagtccgtctcaaaacaacaacaatgaaaacaatttggatgaatttcaatattatgcagaatgagagaagcctgactgaaaacaaataaaaaggcaattacatactctatgactccagttatacaaaattctagaaatctaaactaacctatagtcacagaaagcatatcagtgtttctagggatgggtggagggaaggatggattacaaaggagaaaaagaaaacttttgagagtgatataaatgtctgttcgcttgtgattatgatttcatgaatgtatatatttgtcacaattaatcaaatggtacgttctaaatacctgcagttaatgttacgtcatgtttttccaatggtgtatttttaaaataaatgaataattccacacactttccttaaaaaaataaaatcagcaaaygaggtatagaaggaaactttttaaatctgaaaatagatatctatgaaaacctacagctaatttccaatttaatagtatatactgatggtttgccccaagtgtcagtaataagactaatatatttattcaaacaacttctatcaatactagactgaagcccttagctagtgcaataagataagg

SEQ ID NO: 721404 - DNA, 607 bp, Homo sapiens
tttaacaccatagatttttaaatttaacaccatatgcatatttgatgcataataagcactcaaaagttattgtcgttgatgccattactgttagttaatcctcagtttaattacatatggtgcattttcatttctctgcattttcattgaagtaaaaattctgcgttttctaattttggagaataatcttaattaaaatatgaatatttgtactgcacagtccaactcctacgaagctctgccttgcagcagattggaagagagaaactgatcaactgccgatgaagttggcttttcagtatattgatggagagagaagcttaggaagctctttggggaaacttttggtgacaagaaaataaraagtttatcccagagtttttcttttgtaaatctttgtgttttctctttcacctgcagatgttgcagttgggtttgtcttaatttcagtctctttgtgagggaccaccatttggctttcataatttaacgtggttacagagcctatgtataccctggctttccattttatggccttaagtgctgcagtggatttacctttagtaatggcagaacgtagtgtataatcattccttgcaagctcctg

SEQ ID NO: 721405 - DNA, 607 bp, Homo sapiens
tttaacaccatagatttttaaatttaacaccatatgcatatttgatgcataataagcactcaaaagttattgtcgttgatgccattactgttagttaatcctcagtttaattacatatggtgcattttcatttctctgcattttcattgaagtaaaaattctgcgttttctaattttggagaataatcttaattaaaatatgaatatttgtactgcacagtccaactcctacgaagctctgccttgcagcagattggaagagagaaactgatcaactgccgatgaagttggcttttcagtatattgatggagagagaagcttaggaagctctttggggaaacttttggtgacaagaaaataaaaagtttatcccagagtttttcttttgtaaatctttgtgttttctctttcacctgcagatgttgcagttgggtttgtcttaatttcagtctctttgtgagggaccaccatttggctttcataatttaacgtggttacagagcctatgtataccctggctttccattttatggccttaagtgctgcagtggatttacctttagtaatggcrgaacgtagtgtataatcattccttgcaagctcctg

SEQ ID NO: 721406 - DNA, 639 bp, Homo sapiens
tagctcacacctgtaatcctagcactttgggaggccgaagcgagtggatcacttcaggtcagcagttcgaggccagcctggccaacgtggtaaaaccccatctctactaaaaatacaaaaattatctgggcatggtgatgcatgcctgtagttgcagctacttgggagactgaggcaggagaattgcttgaacctcagaggtggagtgtgccatcagctgaggttgtgccactgcattagtctgcaatctgggcgacagagcaagactccgtctcaaaaaaaaaaaggtaaaaaaggtaagaaaggactgtattttagtggtcgtagtggtgggaacacttcagcaaatgcatatacacaggtctaagtgtaccttatagattttacgcagattaaaaartaagaaatacttgtgagaaaagacagcaaagtatcctctgaggaaaggttgggcacgctgacagggcagaaatctcagagttttctagaaagtggaagtcttcattgagcccagcccaagtggcctagggtccagttttatattaactcgatgatatctctggcttacttaactctcaatggcccatataaaaagaaagggcagcaatgctcatcttagtccacagctactagccaggt

SEQ ID NO: 721407 - DNA, 605 bp, Homo sapiens
gaagaaagaagtgtcataaaggtaggagataaacagcagagtacagtgacgtgaacagtatagcaaagaagtatgctgaggaagtgatgtttaacaatattagatgaataaaaacctttatagcccccccaccccacaaagccattggtgacattagtgagagaaatgttggtacaacttgggttctagtaatcatattgcattgaggatagaatkactgaaaaattaaaatactaataaactaatatcaagctcttaactaggttccaaacactgagtttagtggtctgtatataggttaactcatttaatctagacaaaaccaaacaaatctttgagtttaatattgtgcctttgccaacttttaggaatgaacacttgaggattgagggatgtaaagtgaagtttctgagtcacaaggttaaagagtgaaagactggagaactcaaactcctatctgtctgattcacacgtgctttgttgtgcagtttggcagatcggaaaaactagagacagaaatatcatgagaagacacctacaatgtactacaatgtaaaagagattggccagtgtagaaggacagaatggaggtgacagctaaaaat

SEQ ID NO: 721408 - DNA, 605 bp, Homo sapiens
gaagaaagaagtgtcataaaggtaggagataaacagcagagtacagtgacgtgaacagtatagcaaagaagtatgctgaggaagtgatgtttaacaatattagatgaataaaaacctttatagcccccccaccccacaaagccattggtgacattagtgagagaaatgttggtacaacttgggttctagtaatcatattgcattgaggatagaattactgaaaaattaaaatactaataaactaatatcaagctcttaactaggttccaaacactgagtttagtggtctgtatataggttaactcatttaatctagacaaaaccaaacaaatctttgagtttaatattgtgcctttgccaasttttaggaatgaacacttgaggattgagggatgtaaagtgaagtttctgagtcacaaggttaaagagtgaaagactggagaactcaaactcctatctgtctgattcacacgtgctttgttgtgcagtttggcagatcggaaaaactagagacagaaatatcatgagaagacacctacaatgtactacaatgtaaaagagattggccagtgtagaaggacagaatggaggtgacagctaaaaat

SEQ ID NO: 721409 - DNA, 592 bp, Homo sapiens
ggaggcttatcaagcactggggtaccccgatcacaagcccaagggctggccccaacacagatgatggtgtctccgtggccagaagacagaagccacgggagacacaggtggctgcactcagccacactcaagaaccagctacggccagcagcactgtccgcctccccagagtgggcctggggctctccattcatccttcagccttcacaccaaccctactgggggcccctaccaccaggcccattttccagattgagaagctaaggataggagacaaatccctcatgatgcaggctccgggggctcaggcccaggcaatgctcaactcccacrgtgctccccacgcgcccagctgggcctcatcacacttcagagccctcctcctgtttcaaggctcttcctgggcaacaatgtcagcatagccaggggggcgcccccgattcacagatgagcaaccagaagcccgacaaggtgtgagacctgggactggcagggtctgcctgagcacatgggtgctcccctccacatccctggcccggcacaggtgggtggcaccacttcctcaccagcacacagacctgggcgggacgca

SEQ ID NO: 721410 - DNA, 592 bp, Homo sapiens
ggaggcttatcaagcactggggtaccccgatcacaagcccaagggctggccccaacacagatgatggtgtctccgtggccagaagacagaagccacgggagacacaggtggctgcactcagccacactcaagaaccagctacggccagcagcactgtccgcctccccagagtgggcctggggctctccattcatccttcagccttcacaccaaccctactgggggcccctaccaccaggcccattttccagattgagaagctaaggataggagacaaatccctcatgatgcaggctccgggggctcaggcccaggcaatgctcaactcccacggtgctccccacgcgcccagctgggcctcatcacacttcagagccctcctccygtttcaaggctcttcctgggcaacaatgtcagcatagccaggggggcgcccccgattcacagatgagcaaccagaagcccgacaaggtgtgagacctgggactggcagggtctgcctgagcacatgggtgctcccctccacatccctggcccggcacaggtgggtggcaccacttcctcaccagcacacagacctgggcgggacgca

SEQ ID NO: 721411 - DNA, 592 bp, Homo sapiens
ggaggcttatcaagcactggggtaccccgatcacaagcccaagggctggccccaacacagatgatggtgtctccgtggccagaagacagaagccacgggagacacaggtggctgcactcagccacactcaagaaccagctacggccagcagcactgtccgcctccccagagtgggcctggggctctccattcatccttcagccttcacaccaaccctactgggggcccctaccaccaggcccattttccagattgagaagctaaggataggagacaaatccctcatgatgcaggctccgggggctcaggcccaggcaatgctcaactcccacggtgctccccacgcgcccagctgggcctcatcacacttcagagccctcctcctgtttcaaggctcttcctgggcaacaatgtcagcatagccaggggggcgcccccgattcacagatgagcaaccagaagcccgacmaggtgtgagacctgggactggcagggtctgcctgagcacatgggtgctcccctccacatccctggcccggcacaggtgggtggcaccacttcctcaccagcacacagacctgggcgggacgca

SEQ ID NO: 721412 - DNA, 1034 bp, Homo sapiens
tatgtctcttttatattgagaacacagcaatattaatgaccagatgatgaccttcaacctaaactggaagttgtgtgacaaagtccatgttggtttggaagctaaaggtggaaagtgagattaaatactatagggcatggaatggtagtgacctgcaacttggagctgatgtaaggacttgataagtcaaagctcactaggatgcaatactagaaaaaatggtctkggtgtatcacatggattaagtgagattaaaagtagtttttttattagatctcaccagtaatataccaggctaataagtctttccatgtacaagcgagggtgtcaaagaggagctggtcataaagacaaccttgcaagtcttcacactttagagctaaacatgcaaaatatattcatagacaagatgaatggtggctttccttttggaagtgatattgatctggggagagggggagggtgatcttccaaagactttatttcttttgttatcaagtgattggtgtgagtgcacccttttgatcagaggtatgtagacatgcttgagtaacagctctctctctcctcttattgaactgctttttgtgattgatttttaaaataaacgaattgtttgcttcagctaatcagggactagttagtgtatcctgaaaaaggaagtttatataagtgctctttattacctttactgagtgagtgggcttttttgtttttgtttttgtttttgttttttaaattttcagttagttgccccattgacagacaatagagataacagtgagtccatggaatacctcatggtggaaaatgcacagccgattagaaaaatgttctacttgagcgtaccaaactaatcccaaacagtgaattctgatcccctttctgtctcagattttctctatgatcacgtcttacgataataagaagcaaagtctctaatggaagttcatcagtggcaacaactgtggctaacctgacaacccagcacctagtacagtgctcacaggcagctggtgttcaataaaagcttc

SEQ ID NO: 721413 - DNA, 1335 bp, Homo sapiens
gttttattttttatctatagtttctagtttgggccttctatgctaatatgtggaatttctagattcctagatactgaaagttactgaagatttctttgtcccatagtaccctatatcatttataatgaggaactgttatgattgtttcacatgggcaagttccatcttctctgagatttgattttaagttaaaaaagaataataattataccctccaactaaatacatgtcttataaaaatcaaatgagctaatggatatgaaaactataaacacattttaaaaggctaggtagtttttttccatttcatgtaagctattatattcagtgatgcacaaacattgcaatatatactcatactgtaccataacatgtctaatttatgtactcattcattcaatcttagctctgcaccaggtactatattaggcatacatgacgtaaatatgaaggggagactactcctgctctgctcttgtgaaatgcacaagggatgatcttaagcaatttactaaaccttctctgtgcctccgtttcrtcctctgtagaattaggataataagaataactattgcctagtgctgtgataattgaattagatactacctgtaaaacccttggaatagtaactcccatttcatttgaaaacttacagaaattaccagaagaacacattcgtgagaatatcaagaaaggacactctaaccaagataactgggtcttacccttggaatctactttggtaccacatttcctttgaaaagtcaggcaagagactgctgtatacggaacaaactacaaaagaaatctctaatggtttcataatagcctaatgtgctcaatttgtgctggaaaactcctttttgtccttagctatatccttccatacagttcacgtgcacatgaacgattgcgtgaatatgcaccatgtgcttcagcctctaggtaagattaatcatactgccctttctcaggaacactttttctttctggagggagctcacccgaaagatgtcctagaacactttaagcctgggggtaaatgctatcctaaccctcacaccttgatagagagcatctactacattcaagctgttttaaattttgcctaattatctgcatgccagagggcacaaggaggaacaagtagccatagcttatggaagaagtgccgttatgcctcaccaactttggctgagcacagaatatatttgtcatagacttaatattataatgaaaatatgctacatcacatttgttaactcaggcctacaaaatgatttgttgctttatccatacggatacttgcagtgttcgtttgttcttttacctaca

SEQ ID NO: 721414 - DNA, 1335 bp, Homo sapiens
gttttattttttatctatagtttctagtttgggccttctatgctaatatgtggaatttctagattcctagatactgaaagttactgaagatttctttgtcccatagtaccctatatcatttataatgaggaactgttatgattgtttcacatgggcaagttccatcttctctgagatttgattttaagttaaaaaagaataataattataccctccaactaaatacatgtcttataaaaatcaaatgagctaatggatatgaaaactataaacacattttaaaaggctaggtagtttttttccatttcatgtaagctattatattcagtgatgcacaaacattgcaatatatactcatactgtaccataacatgtctaatttatgtactcattcattcaatcttagctctgcaccaggtactatattaggcatacatgacgtaaatatgaaggggagactactcctgctctgctcttgtgaaatgcacaagggatgatcttaagcaatttactaaaccttctctgtgcctccgtttcatcctctgtagaattaggataataagaataactattgcctagtgctgtgataattgaattagatactacctgtaaaacccttggaatagtaactcccatttcatttgaaaacttacagaaattaccagaagaacacattcgtgagaatatcaagaaaggacactctaaccaagataactgggtcttacccttggaatctactttggtaccacatttcctttgaaaagtcaggcaagagactgctgtatacggaacaaactacaaaagaaatctctaatggtttcataatagcctaatgtgctcaatttgtgctggaaaactcctttttgtccttagctatatccttccatacagttcacgtgcacatgaacgattgcgtgaatatgcaccatgtgcttcagcctctaggtaagattaatcatactgccctttctcaggaacactttttctttctggagggagctcacccraaagatgtcctagaacactttaagcctgggggtaaatgctatcctaaccctcacaccttgatagagagcatctactacattcaagctgttttaaattttgcctaattatctgcatgccagagggcacaaggaggaacaagtagccatagcttatggaagaagtgccgttatgcctcaccaactttggctgagcacagaatatatttgtcatagacttaatattataatgaaaatatgctacatcacatttgttaactcaggcctacaaaatgatttgttgctttatccatacggatacttgcagtgttcgtttgttcttttacctaca

SEQ ID NO: 721415 - DNA, 2329 bp, Homo sapiens
  misc_feature 1178, 1179, 1180, 1181, 1182, 1183, 1184, 1185, 1186, 1187,1188, 1189, 1190, 1191, 1192, 1193, 1194, 1195, 1196, 1197,1198, 1199, 1200, 1201, 1202, 1203, 1204, 1205, 1206, 1207,1208, 1209, 1210, 1211, 1212, 1213, 1214, 1215, 1216: n = A,T,C or G
  misc_feature 1217, 1218, 1219, 1220, 1221, 1222, 1223, 1224, 1225, 1226,1227, 1228, 1229, 1230, 1231, 1232, 1233, 1234, 1235, 1236,1237, 1238, 1239, 1240, 1241, 1242, 1243, 1244, 1245, 1246,1247, 1248, 1249, 1250, 1251, 1252, 1253, 1254, 1255: n = A,T,C or G
  misc_feature 1256, 1257, 1258, 1259, 1260, 1261, 1262, 1263, 1264, 1265,1266, 1267, 1268, 1269, 1270, 1271, 1272, 1273, 1274, 1275,1276, 1277: n = A,T,C or G
tgcatgatttggtttgtaagcaaatgtgaaatccagagattttcatcatttccaacaatgcaaaaatgttgaatcttagactagaggctctttgacctcttcctggatttattctgtttctctttttacattcctgcaaggaaggactcttgatatatttttgccttgtagaaatattcatttctaagttggtttgaaattagcctgtcatctgattcactgagatagagttaaaataaattcccctggcaaaaaaaaaaaagaaaggattttatcatctatatggatcaattccaagagttcgcttcagtttactgatccgttttccctacagtataggatattcaattaaaccttccctcaaattggccatgaattttgatgaaaatgaaagaagtttcgtttagcaaacagtttctatcagggactataataatagaatgcaataagaattattttcacctatgcacctgaacgaacgtgttttgtctggtttttggtttgatttctatctgtatctttatttttctctttttgtttttcacccagattttgtgtagcttgtccaaagtggttgagatgtgggatcaggtgaaattgctcatagatacaataatgcttcataccagtgttttcaccactgatttagtagtgtctttgataaactcttataatattccatacttacatctttctgttttaaatagaactgctgggatatgagttatgtctggtactcccttatttttattaaagcatatatagaaatttttcataccctttgcttcaggccttccttgccccacttagcatctgtagagtggacataggcaggaagagcccactctacaaaatgcatccagtatattttgagtagagactgattatggttactgatcttggtcctggaaatragaaatgaattagatacagatggtacctctgtggaactttagagcaggagatgaagcaaaacgagggagaagacataagtgaggataacagcacacaaagtggtgagcattgccagtgaaaatgcagtggttttccccccagcgtggggtatcatagatgaaagggcgtttgagctgcaattcagaaggttctgaagatccacttatccaatttgtgttttgctttctctgtgaatggtttgagccagagctatacagggaggnnnnnnnnnnnnnnnnnnnnnnnnnnnnnnnnnnnnnnnnnnnnnnnnnnnnnnnnnnnnnnnnnnnnnnnnnnnnnnnnnnnnnnnnnnnnnnnnnnnnaatagacttctgtcgtgaaggtccactctagaggatccctctactctcatccttttatcagtgagcacttatacacgataatggacacctttttcttcaaataaatgaataaattaacaaatatcttatgtcactatctgacgttggtatgaattcttgagagtcaatagtgtactaatttgaaataacgtattgctactctactctattagccaattatctttatgaaggcttttaaggatatcctaagaattttccccctcattttaggacttaacaatcatacaaatcaccaccaccacttattgtatggcttctagatacttcaaatacattatcctgtttattgcccatgtgatgtcacaaggtatgtattaatatcttcattttaatattcagaagggaacactaagcttttgaggaaattaaatgacttacacaaagttcatcacatctagtaagtgatagagctaccattcaaactcttattagtctcactccaaagtttctactcttcaacctctctttccatccaacataataactaaaaaataaaataaaattgatttctaagtaataaccaactgtggctcatgcctgtaatcccagcactttgggaggccaaggcaggaagattgcttgagcccaggaattcaagaccagcctgggcaacatggtgaaacccagcctctacaaaaataaaaaaattagctaggtgtcatggtgtgcacctgagccgagatcgcaccattgcactcaagcctgggcgacagagtgaccctgtcacaaacgaaccaacaaaaacaaacaaacaaacaaacaaacaaaacaaacaacaccacaacctgaaaaggaagccattaaatattggtctaagattcaagccatttcaacatcgtgatgttattaaaatcattgctctaactaccctccccccaccagataaaaatcataaaaacgtggcttgcttcctgaaaatgctttcattgtcagctatatataaaacaattactttgttgatcatttcatcatctgaaggaaataaatgctac

SEQ ID NO: 721416 - DNA, 626 bp, Homo sapiens
gattamaaataataattatagccaaattttttgaagtgcttaaaatgcacagaatgggagaaaatatttgtgaatcatgtatctaataataatctagtattcaacatatgaaaagaatcttacaactcaataatgataaaacaactcaatttaaaaaataggtaaaggacttgaataaacacttctccaaacagagatgtataaatggtcaataaacacatgaaaagatgctccacattattagatattagagacatgcaaatcaaatgagatagcacttcatacccagtagactggctattaaagaaatacataccaaataccaaaacaaaaaaacccagaaaataaatgatggcaagaattattggagtgattacatgaagtcagaaggctcaaatgttgctggtggtaatgtaaaatagtgtagatactatggccaacagtttgcagttgctcaaaaagttgatccagaaatttcatccctaggtatatacttgtgttaggagtccccgaaaccaaccccaggtttgatgttttactaggaggattcacaggacttggcatatattcatactcacagttatgacttattagatcataatgtaaaaggatacagagaaaaatca

SEQ ID NO: 721417 - DNA, 626 bp, Homo sapiens
gattaaaaataataattatagccaaattttttgaagtgcttaaaatgcacagaatgggagaaaatatttgtgaatcatgtatctaataataatctagtattcaacatatgaaaagaatcttacaactcaataatgataaaacaactcaatttaaaaaataggtaaaggacttgaataaacacttctccaaacagagatgtataaatggtcaataaacacatgaaaagatgmtccacattattagatattagagacatgcaaatcaaatgagatagcacttcatacccagtagactggctattaaagaaatacataccaaataccaaaacaaaaaaacccagaaaataaatgatggcaagaattattggagtgattacatgaagtcagaaggctcaaatgttgctggtggtaatgtaaaatagtgtagatactatggccaacagtttgcagttgctcaaaaagttgatccagaaatttcatccctaggtatatacttgtgttaggagtccccgaaaccaaccccaggtttgatgttttactaggaggattcacaggacttggcatatattcatactcacagttatgacttattagatcataatgtaaaaggatacagagaaaaatca

SEQ ID NO: 721418 - DNA, 626 bp, Homo sapiens
gattaaaaataataattatagccaaattttttgaagtgcttaaaatgcacagaatgggagaaaatatttgtgaatcatgtatctaataataatctagtattcaacatatgaaaagaatcttacaactcaataatgataaaacaactcaatttaaaaaataggtaaaggacttgaataaacacttctccaaacagagatgtataaatggtcaataaacacatgaaaagatgctccacattattagatattagagacatgcaaatcaaatgagatagcacttcatacccagtagactggstattaaagaaatacataccaaataccaaaacaaaaaaacccagaaaataaatgatggcaagaattattggagtgattacatgaagtcagaaggctcaaatgttgctggtggtaatgtaaaatagtgtagatactatggccaacagtttgcagttgctcaaaaagttgatccagaaatttcatccctaggtatatacttgtgttaggagtccccgaaaccaaccccaggtttgatgttttactaggaggattcacaggacttggcatatattcatactcacagttatgacttattagatcataatgtaaaaggatacagagaaaaatca

SEQ ID NO: 721419 - DNA, 925 bp, Homo sapiens
cagtcaggcctgttaactcttttttgcacaatacccaagagaattgaaaacacaggtctgcataaacacttttacacaagtgttcatagcagtattattaataatagccaaaaggtagaaatagctcaaatgtccattgactgatgaatggataaacaaatgtcatagatcaatacagtggaatattattcatccatgaaaaggatacatgtgacaatagagatgaatcttgaaaatattatgagaagtgaaagaagcagatacagaaggtcacatattgcataattccattcataagaaatgtccagaataggcaaatacatagacacacaaagcagactagtagttcccagtatatgagggaaagaaggtgttggaaagggctactaggtggtaaggggtttctttttgggggtaatggaaatattctggaagtggatagtggtgataktttcacaaaattgtgtatatgctaaaaagaactgatttatacattttaaaactactaaaatggtaaaatttaatagaagaggcatatggagtgtatctcttctccaataaaaataataattatagccaatttttatgaagtccttaaaatgccatgggccacagagaatgggagaaaatgtaaatcattttcatgatacatgacacatacataatcatacatctatgaactacccagtttacagtattttgttatgacagctctagctgactaagacagggactacgcaatgtgctttacatagagtatctcacttaatccttaaaacaatcttgtaagataaatcccataataataatataataatattagatatatcatataatatacaataatgatatatgataatgctgtgctttatctcaattacaatatattaagaaatgttaatagaagttatatctttgagttaaa

SEQ ID NO: 721420 - DNA, 925 bp, Homo sapiens
cagtcaggcctgttaactcttttttgcacaatacccaagagaattgaaaacacaggtctgcataaacacttttacacaagtgttcatagcagtattattaataatagccaaaaggtagaaatagctcaaatgtccattgactgatgaatggataaacaaatgtcatagatcaatacagtggaatattattcatccatgaaaaggatacatgtgacaatagagatgaatcttgaaaatattatgagaagtgaaagaagcagatacagaaggtcacatattgcataattccattcataagaaatgtccagaataggcaaatacatagacacacaaagcagactagtagttcccagtatatgagggaaagaaggtgttggaaagggctactaggtggtaaggggtttctttttgggggtaatggaaatattctggaagtggatagtggtgatattttcacaaaattgtgtatatgctaaaaagaactgatttatacattttaaaactactaaaatggtaaaatttaatagaagaggcatatggagtgtatctcttctccaataaaaataataattatagccaatttttatgaagtccttaaaatgccatgggccacagagaatgggagaaaatgtaaatcattttcatgatacatgacacatacataatcatacatctrtgaactacccagtttacagtattttgttatgacagctctagctgactaagacagggactacgcaatgtgctttacatagagtatctcacttaatccttaaaacaatcttgtaagataaatcccataataataatataataatattagatatatcatataatatacaataatgatatatgataatgctgtgctttatctcaattacaatatattaagaaatgttaatagaagttatatctttgagttaaa

SEQ ID NO: 721421 - DNA, 1300 bp, Homo sapiens
gattctttcttttgcacgttatcggttttaatatcatctgttgaaaagatggttctttctctcatgaatggtctggacacttttgccgaaaatcagttgacctcaaatgtaagggtttatttcagggccctcaatttcattccattgatttatatgtctgtccctaggccagtaccacactgtgttgactgctgtagctttgcagtaagttttgaaattgggaggcagctgttaatagtaccttaagatcaaagaaatatgatgctcacatcgcatgagctatggactctatcctacattccctgcaagcaaaacatactgcctttggatatgtaatataaaattcaatatcaataaattctgggctgtctgatttaggtaaccacacatttggagccctgacaatctaatccactgtttccccaaatttgaggtagaactcatttgtccttactccttttctcagggtctcagttctattgtctgcaaacaaccactcaaacaagaatgttagtgatttcctaacagcagtcactattttacaggccaggcacaatctaaatccatagagaagaaatatttttctctaggcatgaaaatcctaggagaactgttaaataagcaagaggaccatttaacattgtccagctgggctccatttctaacttttccaagaccagtggagaggtaattgctgtatatttgcataactaaaaggcccaccytgtactcgttttctaagaacaatggacactgacccaaggtttattttaaatgggcggtttttctatctctaccagagtactctgtaataaataatttctcctaaattttcttaggtctttcagtcttcctgttggccttgtacttgctattccctttatctaggaccacagaaaggctgtgaccttcagtaagtttctatacccctctgaattttgctgccttcatctattgaatggacataatgatagtatttgagaattatttaagttacatagtatccttcagagttgtgaggattaaatatgcctggtaagtgtaacctgtgtgtgtgtgtgtgtgtgtgtgtgtgtgtgtgtatttgaacaggttttcacctagtcacatgtagatgtacattaacatgtgaatgctctgatttcttatctcttttgtctgtgagtattctagtatttattatgctatatgataattacagggtatagttttgtctggctctctcactggtccacatacaccctgagaactgaattggatccatgtttttatattttacttggtattaaacattggtaca

SEQ ID NO: 721422 - DNA, 1300 bp, Homo sapiens
gattctttcttttgcacgttatcggttttaatatcatctgttgaaaagatggttctttctctcatgaatggtctggacacttttgccgaaaatcagttgacctcaaatgtaagggtttatttcagggccctcaatttcattccattgatttatatgtctgtccctaggccagtaccacactgtgttgactgctgtagctttgcagtaagttttgaaattgggaggcagctgttaatagtaccttaagatcaaagaaatatgatgctcacatcgcatgagctatggactctatcctacattccctgcaagcaaaacatactgcctttggatatgtaatataaaattcaatatcaataaattctgggctgtctgatttaggtaaccacacatttggagccctgacaatctaatccactgtttccccaaatttgaggtagaactcatttgtccttactccttttctcagggtctcagttctattgtctgcaaacaaccactcaaacaagaatgttagtgatttcctaacagcagtcactattttacaggccaggcacaatctaaatccatagagaagaaatatttttctctaggcatgaaaatcctaggagaactgttaaataagcaagaggaccatttaacattgtccagctgggctccatttctaacttttccaagaccagtggagaggtaattgctgtatatttgcataactaaaaggcccaccttgtactcgttttctaagaacaatggacactgacccaaggtttattttaaatgggcggtttttctatctctaccagagtactctgtaataaataatttctcctaaattttcttaggtctttcagtcttccygttggccttgtacttgctattccctttatctaggaccacagaaaggctgtgaccttcagtaagtttctatacccctctgaattttgctgccttcatctattgaatggacataatgatagtatttgagaattatttaagttacatagtatccttcagagttgtgaggattaaatatgcctggtaagtgtaacctgtgtgtgtgtgtgtgtgtgtgtgtgtgtgtgtgtatttgaacaggttttcacctagtcacatgtagatgtacattaacatgtgaatgctctgatttcttatctcttttgtctgtgagtattctagtatttattatgctatatgataattacagggtatagttttgtctggctctctcactggtccacatacaccctgagaactgaattggatccatgtttttatattttacttggtattaaacattggtaca

SEQ ID NO: 721423 - DNA, 1300 bp, Homo sapiens
gattctttcttttgcacgttatcggttttaatatcatctgttgaaaagatggttctttctctcatgaatggtctggacacttttgccgaaaatcagttgacctcaaatgtaagggtttatttcagggccctcaatttcattccattgatttatatgtctgtccctaggccagtaccacactgtgttgactgctgtagctttgcagtaagttttgaaattgggaggcagctgttaatagtaccttaagatcaaagaaatatgatgctcacatcgcatgagctatggactctatcctacattccctgcaagcaaaacatactgcctttggatatgtaatataaaattcaatatcaataaattctgggctgtctgatttaggtaaccacacatttggagccctgacaatctaatccactgtttccccaaatttgaggtagaactcatttgtccttactccttttctcagggtctcagttctattgtctgcaaacaaccactcaaacaagaatgttagtgatttcctaacagcagtcactattttacaggccaggcacaatctaaatccatagagaagaaatatttttctctaggcatgaaaatcctaggagaactgttaaataagcaagaggaccatttaacattgtccagctgggctccatttctaacttttccaagaccagtggagaggtaattgctgtatatttgcataactaaaaggcccaccttgtactcgttttctaagaacaatggacactgacccaaggtttattttaaatgggcggtttttctatctctaccagagtactctgtaataaataatttctcctaaattttcttaggtctttcagtcttcctgttggcyttgtacttgctattccctttatctaggaccacagaaaggctgtgaccttcagtaagtttctatacccctctgaattttgctgccttcatctattgaatggacataatgatagtatttgagaattatttaagttacatagtatccttcagagttgtgaggattaaatatgcctggtaagtgtaacctgtgtgtgtgtgtgtgtgtgtgtgtgtgtgtgtgtatttgaacaggttttcacctagtcacatgtagatgtacattaacatgtgaatgctctgatttcttatctcttttgtctgtgagtattctagtatttattatgctatatgataattacagggtatagttttgtctggctctctcactggtccacatacaccctgagaactgaattggatccatgtttttatattttacttggtattaaacattggtaca

SEQ ID NO: 721424 - DNA, 639 bp, Homo sapiens
ggacctgttctgtagcttaatggttcctagattgtcaccatttgcaatgttcttaatgctcaaccgtcactagtgactgggccacagaaatgtttagctcactggcctgggttcaggagatggctccatgcattcccagtgtggttacaaagacccacgtagggagctaagtttgagaaacacttaactagggaaatgggcattctctgaaaaatattcagctggtaactggatgagactattcacgcctctaaccttgctgaagagttaaccttgctggatgtttcctcattatcaagctgtctgcactgatatgctgtgttaataagtgtgggctcaagttacgggccttgtccaataacaggaatcacatytcattccagagtaaatatccctgtccttctaccaccatcaaggagctgtgtgcatatgatacacttctgtttgtgtgtatacacatatttgcaattattttaattccatgtatttggagtgataaaatacagcttgtgtaatcggtaattggctggtgccgagcctggcatgactcgtacctttcacatcaaatgattcctttggttcttgggtggagggtggtgcctgaggaccttctcatttggttgaatgacaaactgtgtt

SEQ ID NO: 721425 - DNA, 664 bp, Homo sapiens
gtcttactatatctatgaagtgtcaatatcaggcagcggcttcaaagccaaagtggtggttagatgttttgtgaaattttagttggcagaggaggcagatagtgagaaatgttgaccgaataatgatgtgaagtccatgaaagcctgtggctataaagaatgttgagccataaattccatcagagatagtaaaaggggccttggaatattctgaaacttgtaggagggtgaagtatatgcctaaggtaattgcgatggcgactaccttccatcaggctgtggtgagctcaagtaattgaaactcctgatgcaagaatggggtaaggccacagtggagtgggtctgaatggcaaatgcccctctgagacagggcatacgctatccatttccctgcaacyccaccatgcccacatcactcatatgtgttgcctgttcggtctcacttacctttggagctgttgactcctgtcttaaggtctgggaagaggaaaccattaagcttttggtgccagtgatttcctggccttgcagataccatggtgataacacacctgggctgggatgcagtcctagctcctggagaaagcatctgtggctaccatcaaaggaaggactgcctataggcaaaactttgtctaaggtggtggccatagtgtttccaaaa

SEQ ID NO: 721426 - DNA, 761 bp, Homo sapiens
ctgtgctcttcccttgagcagcacagagtgttcgcttgtccaaattctcgtcctgtttgaatgtttcctgaagagagagaaaggagagcgatcaactgcattttgccagatggagaracaagtgtaacacaattaagagacttatcagcccttgaatgaaagagctgggcttggtatcttgactccagtcattccctaataccatcatttgatgagaattaactcctttcatgtgaaagcccaagcgaacttgacaaagtttacagtttaaaatacattagcagtgtcaaaagatgattttacagaacagacgtgatcgtggtggggatattttacaggagatctgctagcagagtcttgggatctcttcaccacctacaaacacattcaaacctcaggtaacaccagggttctgaggtggctcagtgatgtcttcagctctgataaacacattgaccaagcattgcactgtgtttttcctctagtatttctgttttctagcttttcctcaagaccactcttttggttcagagcaaaggacctataggaaagtgggcctcaagagaccccataacttctctgtcttgctttctggctcaacagccacctattctttctctgtttcctccatgcttggttcttctagcttgctattttacaaaaccatccatctctccaagtctagggtgcccaggactgagggtcacatggagctagagctgtcagttggccaacagatgctagatcagaagcccctactg

SEQ ID NO: 721427 - DNA, 1439 bp, Homo sapiens
  misc_feature 319, 367, 375, 389, 392, 397, 413, 428, 429, 430, 431, 432,433, 434, 435, 436, 437, 438, 439, 440, 441, 442, 443, 444,445, 446, 447, 448, 449, 450, 451, 452, 453, 454, 455, 456,457, 458, 459, 460, 461, 462, 463, 464, 465, 466, 467: n = A,T,C or G
  misc_feature 468, 469, 470, 471, 472, 473, 474, 475, 476, 477, 478, 479,480, 481, 482, 483, 484, 485, 486, 487, 488, 489, 490, 491,492, 493, 494, 495, 496, 497, 498, 499, 500, 501, 502, 503,504, 505, 506, 507, 508, 509, 510, 511, 512, 513, 514: n = A,T,C or G
  misc_feature 515, 516, 517, 518, 519, 520, 521, 522, 523, 524, 525, 526,527: n = A,T,C or G
ttaactcttccttgattaatattttctgctcagtttatccattttcagattcttgtctggtgagaaaacattgtgaatacaaaccattctcagtgcaaaggtagaatctgacatacatatttgctttacagaaaacctttcagcaatgcattgactttctgttttaggacacctctttagaagtacttaggtgttttggattggtttctttcttctttcttttctttctttctttttctttctctctctctctccctctctctttacttccttccttcgttccttccttccttctttttttcaagagtctcactttgtntacccaggctggagtgcagtggtgcgatctcattgcaatctccgcctnyggggttncaagtgaggggatnctntaagngtacaacctggcaggncagcaagtaaaggcnnnnnnnnnnnnnnnnnnnnnnnnnnnnnnnnnnnnnnnnnnnnnnnnnnnnnnnnnnnnnnnnnnnnnnnnnnnnnnnnnnnnnnnnnnnnnnnnnnnntgaaaagtgggacgtagaaaagttttcttcaacacagaagagctcaggatccaaaggaagaggtttttaagagagtccatctttacatataaatgcctgttgtgttagggacattttcaaaaagagtcaaatccaattgccccaaacaggaacacaatggctggctactggagtgtctcatattccaatcagttgaatttctttttgtctccagatatgtttgaataggatttgagcactgagctaggcagtacctatgaatgtttagctgttttaccattcatattcttaagaggcctttctcaattatatttggcttatgcccatttaactaataaggataaacacagataaatatgcctagtgtcactggaaattttataaaggttctgcttttctcatccttttttaagattgagggaaaactcagcagcacccttttaatgtaaaaatagaagaaaagtccatttcaatttgggaatttgtgaatagtgacacaaatattcttgaagattgatccagtttgaagcatgttgtgcatgggtttactgttcaacttgcaagtaatttgtaaagccagagtcagtcttgactatgaaacattgtatcactgtgattggaatcaatagttcttgcactgtcatttgtcacatatttacaagcttgaaaaatagttcattttgtcctcatcccataactcaaaagattgaatcagagccctggagggatctgccaacaggacacattcattactgatcacccgctttggtgaggctataatcacaaccacagcaaaaatagaatataaataaaaattaaagcactagtcatttggtacacccttaaatattttcagtttcaagtatttaaaagtctgctgggagacttcaatcaccttcatgacctacctca

SEQ ID NO: 721428 - DNA, 1855 bp, Homo sapiens
  misc_feature 1816: n = A,T,C or G
cggcaggaaaagcactaaagatggatagtcctgccttcctaatttgaatgctcttattctctacaggttagggtcaagttattcagtaaaacaggctatcaggaggttaagcccaaacagtgaggaaacaaattttatgatgcttgtttgactaaatgcatgcagtttacctcaagattaagggatttaaaaaaggttagaaaacagtgtaaccctatctcctggatatatctacagacttgtatttaggaattatgccaggctgttatttctaacagagctgatgatcatagatgtggcctttaaggcaggactgggtatttggttcttaaaaatgattctgtgcctgccaatcttaggaataaataatgctttcaatgatctacattctctgtctacctaaaaagtacaaagaaaaagaatatatttaatcaaagagagatgtgtcccaggtagatggtaagcaacgggaataaagtcatgatatgcccagaataaccaatgatgaatgttattagccaggtagccaccattctagtcttagtaaaataagcatcccataaatgtttatataattttaggtgtcagaatacacatcaggacaatctggactaaggaaacctgaaatttaattctgaaattaattaagtaaccatgcctaaggtgagcttgttttcttaactgtaaaatggaagtgcaacctttaactttcctcagtggctcagatgaaatactgtgaaggtacagagtaatgctatatggcacaaagcaaaaagtgctgtgcaaaagaagacagtrtgctaaatattaggaaatttctgagttccagaaaatttggatttttaagaaactatgtcatgtcaagatgtgctttggagtaacaattttcccaatattatattaagtatatactaagtatatattagaagggattatataaaaggtgttcaaaaaacaaatatcaggaaaacactaatttaagcagaatttaacaattgtttttaacttcagaatttctcagagctttgaatattatataccatgaatctccaggaaaggacaagtgagcttatgttccccaaacttatatgaccacctaatcctttttacatggaccttctcagtggagcagtgttccatagaacacacattcttactctctatttttccaaaattcctactgtttgcttcaatacaaaatcataagacactgtggctagaaattttttttcatataaacataaacgtgtactgacacatgttggtaagcattttataggttgtctattctagctttcaaataacatgactctaaatctgtaaagaccagatcactaacatagcctctttccagaaggccataatgagtacctcctcatcagatagagaatgtaccctttaagttttgtaggagtcaagtacccctttgtcttggggacagatttctgttaagacagacagaaactcttcccttgctggtccagcagcagttttcttgttccctggaccagccagaataaaaagatgacttctgccacgcatcattttgttgtttgtctaacactgaatcccaaataaaatttcattcctgattaatagatctgaccttttaaactagacaagcagcagcaacctgagatggaattgttaagagaaaaatatggtaacattcttagctaaaatactgagagaaacggagagtttaagtctactactgtctacagtacttatgtgaatgttataaaagatctgttaaaaactggtggggatgccaacagggcctacaccagttcttaaatcctctctaatagctagnagaaaagggataccaaggtttggcaaacaatcctgcatg

SEQ ID NO: 721429 - DNA, 600 bp, Homo sapiens
gatctatctgggcagtgggcaaaattaacccattgggtgtttrtgctaccttttctccctctctgtctctttctctttcttttttctccacttcctcctccctctcttgttttgtgttccttcttttagaagacacttcttttatttatttttttctcttatgcttcatgaaatacctacccttcttgtaatatctgaaaactagcaatcgcctcagtatcacctgaactagtctttgtatctgttaatgctccaaagtcctgcaactagtgctgctaaattctcggaactatcaccttgagcctgttatacgttttcaagggtaactctcagataactgaaaatatcttaagtggttcctgcattgctataaagaagtacctgagactaggtaatttataaagaaaagaggtttaattggctcatggttctgcaagctttaaggaagcagcatggtgctggcatctgctcagcttctagggagacctcaggaaacttacaatcatggtggaaggcaaagcaggagggagcagacatatcacatggcaaaagcaggaacaagaaagagagaaggtggggggtgggggatgccacacactt

SEQ ID NO: 721430 - DNA, 1504 bp, Homo sapiens
aattgaaatgggaaaaggaaaagagtaaagaaaaacataggtttaatggctctaattacaaacctgagatgagtgggggattgcttttcgggagaacaaataaaggtcacagtagtcatgagccggttggaagcatctagacaaacataccacactgaaatccataatcaagaaccttccataataacaagaacagcaatcatttcactcagaatgaattgcaaaaagaaaacttatgactgaatatatagtaagaggacaactgaaattggaagagctttatgaaaggattgatgcaggatttttcttggtccctttgctggactcatggcaggggcacctcctctacttggccctctgcactcaaccccttgtgggagggagcatcagagtgagtcagtccaggacctggctggctgtgcagggtgccgacacaggaacaagctctatgcagggcccatagccagactaggcatgtcgcctcaaggggaatgtggcagcaaccatgcgagggtgactgtgaccctgaagccccagaaaggggtgttacggtgttcctttagttctgctgtccatggatggtggtgtgttagcagctctgttggctctttgcctcagcacatggggcagctgccctccaccaatgagggcaaagggctggtgtggcagcctttctgggtacccacactcggtgggtcctgagctcttgtccagcatccaagaagattgaagtcacatggactgttgaaagatggtgaaggtagagaattttattgaccaatgaagatggctctcagaggagagggagctagagaagggacaggaaaggtatactggtaatcttcccaaaaatcaggttgtcttttcccaaagtcagttcatttccacctccactgactgagtctggggtctttataggcacaggatggggagtgtatgctgattggtttgtgagtatgtaacaaaggttaaagtaaaaacaccagtcaaaggtgggcacaaaagcatagaaaaccaattaggaaagggtaggtatatgtaaaataggtgaagggtggggattaatcagaggaaagcacaccaaacaggaggacaagttctcaatctagtcccaggatttagcttgtagcttggatttcaggtttaaactgtcttcagcttggaggtgaggtttcaccgggtacctgcccctatctgcctaggcatttggctgcctcctgtcactatcaggatgaccaattataaagaaattatgctatagggaagtaaaagtcttaataaaaagactagaatgattttgttatcccttagatagctcaaagttgcattaactcatgatgtttcttcttttttcttttgggtaatattacttcctagaacaactacaaagtaatattacttaaaagaaaatggactgtggctctcaggtttgcttggtctatgtgggcctggaaattctagtaratctatttgctcaatagggtttcctatctattattcatca

SEQ ID NO: 721431 - DNA, 2314 bp, Homo sapiens
ttgtttgatacaagagtaattttattagttatatttttattgatttttgtcattactaaacaatgcagctagaacctgctattaatgtttaatattccatattgtccacaatccatacaaaaaggtatttaaatattaagggatattttctaacattatagtatgggtttccatttcttggtatagtaaatgagtgattttgcagtagaatttctaggaagctctcgataatataaccgcaatgaaaataatgattcattttcatactcaaaacatggttataaaatatgccttgttattgcagtaaatagtatcatattcaaataattctcatcttggtaatttgcattttttaaaattaaggaaacagatgttataggaatatttcaagcaaataggaaaatagaaaggcaaaggaaataggattcctggcacccatttcttgtatgttatttaaatacattttcttttttttccccaaagtacagtgccagttttaagcatgaggaaagtaaaatctagtccccacctgctcaagccagaagcattttagcctggaaggagggatgaggctcaggatgagaggctggggtgagaggctatagaaggacagtaaaggacagcggtactgaaggtaaactagagctagtgagtacatccaaggattattgaacctgaacatgggctagagcttttctccatgaggaaatattaagcctgatgcatacttctgtctacagttagaaaagatatttgatcatacctgaagtgcaagtctttaaaggagaattgagtttcaatgattccagtcgttttcactcgagaatggagaacatcttgttcatttggcacatacccagatgctgttattctatctaaatcattaaggtagctaataaagacaaaacaaaattatatatgtgtatatataatacataaatacatacatatatgtatatatacacacatacatacatatatatgtgtgtgtatatatatatatttttaactttgcgtttgaagaaaccaggattcagtagaaatgaatttttagcgtaggttctatgaaaaatgataaattctagacaggcgctttccaaactatgctcatcgaattaaaagtttggtagctggaatgttgcagaatgcagagtgctgaatgtggcacacagctgacccccagcgtcctcttctaaaggcacctaaatcaacattgccttaacctgtattttatgtggtttgtgtgataaatttgcttgtatatggataggagtatgaaagaaaatttctctttatagtgcctggatcattacaaaactaaaagttgccttatagtggtagtggctagattatcctcgaaattctgtagtttgaatttaggcattttcggttttatgagagtgattggttcgaatgtactaatttgaaggttgtttgttatttttgcatgaatttgcctcatcaagactcagccatttccattaaatgccattgcaatatctagttagcgcaataaaagaagtaccatttgtctctcttcctggtctatgctggaagtgactcatgaatttgcaaacccaccctgacctggctctcctggggacagaagggtgaacgtacccactgtccccactcccacctcctcttccatcaatgcatcactgtgtctttaccccttccaggaagctatattaaaaattgttagtattaacaggctgaatatggtgtttttttcccctcacaggatctaggtgtggtgatgaacaggaataagtctaattaaattgtgtatgctataacagtctgctaaattagaggaaaaaaaacctgctctcagcttcctaactcttgaaacgagataatgtcttcatactaaaaaaaaaaaaaaaaagtgttttattgctttaaaaataatttgaaaaccactggtctagacttttgatactaagcttttagtggcttarcaatatcactatttctgtaaaactttcagatacaaatagtaatagcatggtaatgcctttatgacgaatttcgccattacactgaaccacatttatagaaagataagatccaagtgcttccatcgagacagaatttgtgagtagaatccagctgaatgttagtcagtgttaaaaattgtttgttcagtgattaagctgagaagctgttacgccttagcacctagcacaaagattgaaaaaacaaaattattttattagttaaaaaaattcattattaatataggtaatttattcttggaggatctttttccttttaagctgaaacaaattaaggttggacaagtgtccca

SEQ ID NO: 721432 - DNA, 1214 bp, Homo sapiens
tggcagttaattacttctcagttctggtctgcatggaaaaatatcaatggcaaaagaaacaaacaggatccaggccaagaaatggaggattcctgtaacagggttgagggcggtagggagtgggtcccaccagctaactccttgtcctctccctgagttgtaaatgttatctaagtatatctaagtaattttgcactactgtttaaataaaaggattcttctaaaaatttcctcaggtgcttagaatttaaaattgcctgctgagcagcatttattgatagaactggaccacttggtaaaataaagaaaaaagtagtgattttactggcaacaagagcagttttgccttcagtagttggatatggtagagaactgggactctatcctattttgtcatcccttcataaggcaacgccgtactgcttagataattcacttgttcccaggagatgtctagcctaacaacacmgccagaagggccctactattatgagtgaagagtagctataaaaataaacaataatagcaaccaacattcctttgttctgaatgggaagcttattattccatctacctttgagcaacccacagcccaaaatgtagtgtataattttgctttttaacagtttcatattaaagagtgcttgaaaatacctggtttctctgaaacagatggaaaagaaggcaataaaagaattaaaaaaacaacaacccccaccccccaactctacctctgtgaacatacttgcctaacataaggtttctctgaaatgagatattttcaccccaggaaaaatctgtggatttggttaacattgctatctaatctggcactgcatactcaacataaactaattccaccaaactccatcttattctgaccacactgcagaatttctaagcctattattgcctggtttatgctttttctttaaacattcccaagtaataggacctgacctcacagaaaagctgttttaatattgccattttattttcacatcaggacattttgttcagacgtagacatcaaaggccattgccaaagaggccttttataaatgcttcttgctctttccatactatccttcatattaatgaaagtaaaattaacacagctctttctgtttcacaaggtagtcctgtttacaggactgagctgagttcagtgtttacaacacagagctgagttcatttcattttacttagcagac

SEQ ID NO: 721433 - DNA, 638 bp, Homo sapiens
agcctggccaacatggtgagaccctgtctctactaaaatacacaaaattagctgggtgtgttggtgcacgcctgtaatcccagctactcgggaggctgaggcaggagaatcgcttgaacccgggaggcggaggctgcagtgaggcgagatcatgccactgcactccagcctggtcagcctagtgagactcggtctcaaaaaaaaaaaaaaaaaaaaaaaaaagaaataccatgcaagtcagctcttggaaactctgtgagatgcaaggaaggggcacaggcagcaccgaccagcgaaaatactggtgcgaaggtgggagtggaggagcagtagagggtgaggtatggtcaccaagggactgayaaaacacaactcagaatgacaactgtgacgacagtgtggaggctggattaaagaaaagacaggcagaaggcagggcaacccaaatggaaagcttagtctaaggagaactgaagagagcttgaatttgggccctgatggtgggaacagagtgggggaatgagagtttatacttcattttaaacaccttttgatccaatttgttctttaaataaatgattcttaaacaaataagtcctttctgatcaagaaaatgtgactctctcctgaacgaacta

SEQ ID NO: 721434 - DNA, 1036 bp, Homo sapiens
  misc_feature 1032: n = A,T,C or G
ggaaagtagaaaagtaaaagtgttccaaattctcatctcatctgaagagggagagtggggaaacagttatgaaatagagctttagtggagggaaataattgctatcttgcatacatatgacaatgacaaacatatatttgaatatgaatgtcaggagtgggaaggtaatcattaatacaatgaaaagaggacaatagacccacctaattagcagtgaggaaagggattgactagcagtctgaccaatttagcaaaaacagctccaaggaaaaaaaggcaacaggaaaaatcatgaataatcaaaaaacaagatgaaaggagtcaaatctactctattacctatcacctaaaatttaaatgtactgcattttggccgggtgcggtggcttacacctgtaatcccagcactttgggaggccgaggtggatggatcacttgaggccaggagtgcaagaccagcctggccaacatgcagaaacccggtctctactaaaaatacaaaagttagccaggtgtggtggcaggagcctgtggtcccagctactcaggaggctaaggcacaagaagcgcttgaacccttgagatggaggttgtggtgagccaagatcaatgccactgcactccagcctgggtgacagagtgagctctgtctccaaaaaataaaataaatacatgtactgcattttgacataaactactcaattgtttcrtaaaagttattggtatttttaagacatacacttaaaatggtaaagaaaatggttgagaataaagatatattaggtgaatacaaacaaaaagaaaggaggaatggcagtattaatatcaggaaagatggaatttatgatgaaaaactctcagtaggataaaaaggaccactgggtaagtgatgaaaggcatactgtgcagaagaagaacattcttaaaatgcgtaccttaaacaataatatagtagctaaatttataagcaaaaactattaaaaaaagaaagattgttaaaacacgttagtagtgaaatattttgattcactncttt

SEQ ID NO: 721435 - DNA, 626 bp, Homo sapiens
  misc_feature 316: n = A,T,C or G
cagttgaagcaggtccaaattagggaaaagaaaaagatgtaactttgaatgaatttcaaaatttttactattacagtgaactagatatattaattattgaactaaggctgttttaggaaatcaagtgcccagaggagacagattttattgtctaattgtaagcatakaagatatgagctctacccaagatttcatctgagagcagaggaagatgtaacagcagagagtacaggcaataaagagaaagcacaaagctgttctgattgcaccccactttgtgctatctgtccataggtcctgctgaaaggagataatntgtcccttgtgatgccacctcattcccaactcctggccatagttcattagcccagggaaggctatctgaccaaagtcagccaaacaatagcccagccagtgacctgtgacatagccttgagaaaaagataaaataaatcattttccttggtatgacagtaggagaaaaacaaataaacaaacaagagaattagtgtacttcgccatgagagttgaagcaaaaatatcattcattaatccaacaaatacttatggagaacagaactatattataacaaagaattaaaaacataaagtccctgtcttcaagg

SEQ ID NO: 721436 - DNA, 1772 bp, Homo sapiens
ctgaagtcgtatgtgcaaggcataaagtgggattttctttctttttctgagacactatagtgatttatgaggcactttcttaaatctttcaccattctttgtccaaaaccacacaacagataataaatctcattatataattctgcctaagtgtcacagggcaagggagccccagaattggagctccaccctagaaggttcttggtttcccccagtaaggaattcgagggtgagccagtggtagaggaaaacagctttgctggggcggcagtgtcacagctccgtgactgctcctgcagagcggggctaccccataggccrtgcatcgagagtagcagctcaggggcaggtctgcggtcacatccatacccacttataattacgtgcaaattaatgggcaggttattcagaaatttctagaaaaagggtgataaccttcgtgttgttaccaggcaatgggtaaactgtcatggcactggtgggcatgtcagccagtcttcaatttggtctggagtcgagtcccacctcctacctcctatgtacttatttttgataccacagaataaactttagttttattatctcattttatccaagactgctacagtaggtcatggccagcattatgccacatttgtgacaattacaaaatgctactctctgagtgaacaaattagaaaagccatcccattctcaggattttagccccacctgccccctccaccagttgcctttgagcacgtgctgtctgcacaccacccggggaggaatgctgatccctcccagtgtcacctactgtcccaggcctgggccacctcccctggaagaagtcatttcctgcatctgccatgtctctggggactggtactatcctgactgccctactcacacccacattggctgagccaatcactggactgcccatggctgccgcatccccttcttccttggtccagaaatattcctggcatcccaggtattttctaaaaagcatcttggttgattcttacaattattctcaagtgttctcttcaatattcttctactcctagtccagagaacctctggatccccaaaatgccttgagttgtaagaatgccaggctgggcgcattggctcatgcctctaatcccagcactttgggaggctaaggcaggtggatcatgaggtcaggaattcgagaccagcctgaccaacatggtgaaaccctgtctctactaaaaatacaaaaactagccaggcatagtgatgggcgcctataatcccagctacttgggaggctgaggcaggagaatcccttgaacactaggaggcggaggttgcagtgagctgagatcacaccactgcactccagcctgggcaacagagtgatatgctgtctcaaaaaaaaaaaaaaaaaaaaaaggaatgtcagtgaccttgatcctttatgcagcttgcaggatgtctccctcaccccaatcctatacttctcccaactctattgatagaaggtggagcatcccatccccaaacatgacagaagagtaacacaaaacacactcagcacggagttagcttatttgccacagaaagcccattatgctaagagcatgggcttgagaaaattgggagaagatggtggtaggagcacatgtctcagatcccctctctgacttaaaacccaacaccagtccgggaggtgaggggcgcctctgcccggccgcccctactgggaagtgaggagcccctctgcccggccagtcgccccgtccgggagggaggtggggggg

SEQ ID NO: 721437 - DNA, 1772 bp, Homo sapiens
ctgaagtcgtatgtgcaaggcataaagtgggattttctttctttttctgagacactatagtgatttatgaggcactttcttaaatctttcaccattctttgtccaaaaccacacaacagataataaatctcattatataattctgcctaagtgtcacagggcaagggagccccagaattggagctccaccctagaaggttcttggtttcccccagtaaggaattcgagggtgagccagtggtagaggaaaacagctttgctggggcggcagtgtcacagctccgtgactgctcctgcagagcggggctaccccataggccgtgcatcgagagtagcagctcaggggcaggtctgcggtcacatccatacccacttataattacgtgcaaattaatgggcaggttattcagaaatttctagaaaaagggtgataaccttcgtgttgttaccaggcaatgggtaaactgtcatggcactggtgggcatgtcagccagtcttcaatttggtctggagtcgagtcccacctcctacctcctatgtacttatttttgatrccacagaataaactttagttttattatctcattttatccaagactgctacagtaggtcatggccagcattatgccacatttgtgacaattacaaaatgctactctctgagtgaacaaattagaaaagccatcccattctcaggattttagccccacctgccccctccaccagttgcctttgagcacgtgctgtctgcacaccacccggggaggaatgctgatccctcccagtgtcacctactgtcccaggcctgggccacctcccctggaagaagtcatttcctgcatctgccatgtctctggggactggtactatcctgactgccctactcacacccacattggctgagccaatcactggactgcccatggctgccgcatccccttcttccttggtccagaaatattcctggcatcccaggtattttctaaaaagcatcttggttgattcttacaattattctcaagtgttctcttcaatattcttctactcctagtccagagaacctctggatccccaaaatgccttgagttgtaagaatgccaggctgggcgcattggctcatgcctctaatcccagcactttgggaggctaaggcaggtggatcatgaggtcaggaattcgagaccagcctgaccaacatggtgaaaccctgtctctactaaaaatacaaaaactagccaggcatagtgatgggcgcctataatcccagctacttgggaggctgaggcaggagaatcccttgaacactaggaggcggaggttgcagtgagctgagatcacaccactgcactccagcctgggcaacagagtgatatgctgtctcaaaaaaaaaaaaaaaaaaaaaaggaatgtcagtgaccttgatcctttatgcagcttgcaggatgtctccctcaccccaatcctatacttctcccaactctattgatagaaggtggagcatcccatccccaaacatgacagaagagtaacacaaaacacactcagcacggagttagcttatttgccacagaaagcccattatgctaagagcatgggcttgagaaaattgggagaagatggtggtaggagcacatgtctcagatcccctctctgacttaaaacccaacaccagtccgggaggtgaggggcgcctctgcccggccgcccctactgggaagtgaggagcccctctgcccggccagtcgccccgtccgggagggaggtggggggg

SEQ ID NO: 721438 - DNA, 1772 bp, Homo sapiens
ctgaagtcgtatgtgcaaggcataaagtgggattttctttctttttctgagacactatagtgatttatgaggcactttcttaaatctttcaccattctttgtccaaaaccacacaacagataataaatctcattatataattctgcctaagtgtcacagggcaagggagccccagaattggagctccaccctagaaggttcttggtttcccccagtaaggaattcgagggtgagccagtggtagaggaaaacagctttgctggggcggcagtgtcacagctccgtgactgctcctgcagagcggggctaccccataggccgtgcatcgagagtagcagctcaggggcaggtctgcggtcacatccatacccacttataattacgtgcaaattaatgggcaggttattcagaaatttctagaaaaagggtgataaccttcgtgttgttaccaggcaatgggtaaactgtcatggcactggtgggcatgtcagccagtcttcaatttggtctggagtcgagtcccacctcctacctcctatgtacttatttttgataccacaraataaactttagttttattatctcattttatccaagactgctacagtaggtcatggccagcattatgccacatttgtgacaattacaaaatgctactctctgagtgaacaaattagaaaagccatcccattctcaggattttagccccacctgccccctccaccagttgcctttgagcacgtgctgtctgcacaccacccggggaggaatgctgatccctcccagtgtcacctactgtcccaggcctgggccacctcccctggaagaagtcatttcctgcatctgccatgtctctggggactggtactatcctgactgccctactcacacccacattggctgagccaatcactggactgcccatggctgccgcatccccttcttccttggtccagaaatattcctggcatcccaggtattttctaaaaagcatcttggttgattcttacaattattctcaagtgttctcttcaatattcttctactcctagtccagagaacctctggatccccaaaatgccttgagttgtaagaatgccaggctgggcgcattggctcatgcctctaatcccagcactttgggaggctaaggcaggtggatcatgaggtcaggaattcgagaccagcctgaccaacatggtgaaaccctgtctctactaaaaatacaaaaactagccaggcatagtgatgggcgcctataatcccagctacttgggaggctgaggcaggagaatcccttgaacactaggaggcggaggttgcagtgagctgagatcacaccactgcactccagcctgggcaacagagtgatatgctgtctcaaaaaaaaaaaaaaaaaaaaaaggaatgtcagtgaccttgatcctttatgcagcttgcaggatgtctccctcaccccaatcctatacttctcccaactctattgatagaaggtggagcatcccatccccaaacatgacagaagagtaacacaaaacacactcagcacggagttagcttatttgccacagaaagcccattatgctaagagcatgggcttgagaaaattgggagaagatggtggtaggagcacatgtctcagatcccctctctgacttaaaacccaacaccagtccgggaggtgaggggcgcctctgcccggccgcccctactgggaagtgaggagcccctctgcccggccagtcgccccgtccgggagggaggtggggggg

SEQ ID NO: 721439 - DNA, 1772 bp, Homo sapiens
ctgaagtcgtatgtgcaaggcataaagtgggattttctttctttttctgagacactatagtgatttatgaggcactttcttaaatctttcaccattctttgtccaaaaccacacaacagataataaatctcattatataattctgcctaagtgtcacagggcaagggagccccagaattggagctccaccctagaaggttcttggtttcccccagtaaggaattcgagggtgagccagtggtagaggaaaacagctttgctggggcggcagtgtcacagctccgtgactgctcctgcagagcggggctaccccataggccgtgcatcgagagtagcagctcaggggcaggtctgcggtcacatccatacccacttataattacgtgcaaattaatgggcaggttattcagaaatttctagaaaaagggtgataaccttcgtgttgttaccaggcaatgggtaaactgtcatggcactggtgggcatgtcagccagtcttcaatttggtctggagtcgagtcccacctcctacctcctatgtacttatttttgataccacagaataaactttagttttattatctcattttatccaagactgctacagtaggtcayggccagcattatgccacatttgtgacaattacaaaatgctactctctgagtgaacaaattagaaaagccatcccattctcaggattttagccccacctgccccctccaccagttgcctttgagcacgtgctgtctgcacaccacccggggaggaatgctgatccctcccagtgtcacctactgtcccaggcctgggccacctcccctggaagaagtcatttcctgcatctgccatgtctctggggactggtactatcctgactgccctactcacacccacattggctgagccaatcactggactgcccatggctgccgcatccccttcttccttggtccagaaatattcctggcatcccaggtattttctaaaaagcatcttggttgattcttacaattattctcaagtgttctcttcaatattcttctactcctagtccagagaacctctggatccccaaaatgccttgagttgtaagaatgccaggctgggcgcattggctcatgcctctaatcccagcactttgggaggctaaggcaggtggatcatgaggtcaggaattcgagaccagcctgaccaacatggtgaaaccctgtctctactaaaaatacaaaaactagccaggcatagtgatgggcgcctataatcccagctacttgggaggctgaggcaggagaatcccttgaacactaggaggcggaggttgcagtgagctgagatcacaccactgcactccagcctgggcaacagagtgatatgctgtctcaaaaaaaaaaaaaaaaaaaaaaggaatgtcagtgaccttgatcctttatgcagcttgcaggatgtctccctcaccccaatcctatacttctcccaactctattgatagaaggtggagcatcccatccccaaacatgacagaagagtaacacaaaacacactcagcacggagttagcttatttgccacagaaagcccattatgctaagagcatgggcttgagaaaattgggagaagatggtggtaggagcacatgtctcagatcccctctctgacttaaaacccaacaccagtccgggaggtgaggggcgcctctgcccggccgcccctactgggaagtgaggagcccctctgcccggccagtcgccccgtccgggagggaggtggggggg

SEQ ID NO: 721440 - DNA, 618 bp, Homo sapiens
gccagagccgtgggggtggagcccctggtgtgagccttgcggtcactcgctggcaggaagacgggggtggccattcatcctgtggcttggcatcccatggggcatggggctcatggtggcaggtggactgtccgtgcctggaggcggtgccctcaggctgtgcttcccttcccgtccttcccgcagttcaccaaccgctgyctgctcaagtggctgaagttgtgggacctggtggtgtttggccacgagaggccttcccggaagcccaggcccagtgttgagccggcccgggtcagcaaggaggccacagccccaggcaagtggaagagccacgaacaggtgctggaggagatgctggaggctgggctggacccgagccagcgaccgaagcagaaggtgagccccgctggctgtgccgccgggaacaagcctgaggctttgcactcggcgccggcacccttgcagcctgttgactttctccaggagccgtgggtgtggtgacgtgtgggtcttggcgtgaagcgccattagcgtgagttagaactggagcgttgcagtaacaactcgggggaagtcgttgtccctgaagggctctgcggctggccaggatgatctggg

SEQ ID NO: 721441 - DNA, 919 bp, Homo sapiens
tgactgttttaaagaagctaatgggcagggcaaattccaggtaaaattaagtgtaagtgtctcttaggctcatgtccaccctttaagctttctcttgtagggccaccaggcatcagatacccagcgttgtcttagctatgcttgggctcctggctccctctgccgtcactgttatttcctcctttcttttggcactttgggaggccaaggcaggtggatcacttgaggtcaggarttcaagaccagcctggccagcatggtgaaagcccatctctactaaaaatacaaaaattaggagggcgtggtggtgcatgcctgtaatcccagctactctggaggctgaggcaggagaattgcttaaacccagcagaaggaggttgcagtgagctgagatggtaccactgcattccagcctgggcaacagagcaaactccatctcaaacataaataaataaatacataaaataaaatctctcatatgctcctttctctatagtgttagcctttctgacacagaagcccaaatgtgagattctcctctcttatacagcaaggagctcttgctgtctgggacacacagatgacaccactacaaggagagacatagccactcgaccagcgcagaagcaacatctagactggcaaatttctaccagaagtgcctgaaagtgctgatgatttaaagttaatccagttaatataaagttaaactggttaaaaggataagctccttaaagaagattcatttaagagggaattttaatgctggcaatttctacaaggccttatgaagagacactctgagggctgaggaacgtcatcctccattatcagcatcctcaattacaacaatttgtatttgtcctgatggacattagtggatcagtttatacatgtaatattatatcagatatgcaat

SEQ ID NO: 721442 - DNA, 1737 bp, Homo sapiens
ttttaaaaattatttatttatgtattyaattgtactctttgattctgctctgctactaattgaacatgatggaattatccatagatcaattcatatattgatctaaagtgcacataagtatataacatattataacatatttgggccttatttgtcaaagagaaatatttgccatcaaatgggttttaaatattcctgttagaagcttatttctaagattaaattgccaatgttcacatttactttacttttgttccaaatctagatttctgcatagtcagaatattgtatgctggctactaaaatactgactttctgttcttcagttcataaaattatagatatgggttgatgtatataaaccaaaattggatttacataaaaaagaacattttaaaaaataaggaaagtaaagaaaaagaataattttcttaggatgtttcatccttgaaattttgaaaaaatgtttatattgccatgacagtggctcaaagaatatagcatgtcagtatttatgcatcatctgacaaaattcaaccaactttatcaccttgtgttatgtcacggtacttcaacatcaataacaaaaactaaaagcaaaatttttcaaagatcagagctgtcattctctatttggctagcaattactctgtctgaaatcctttgtgaactagtatgaactaaacgtttaaaggaaaaaaaatacagccatttcccccttactagtatcacaagatgagcttgaatgtatgtaatagagacaaacacatctctaggttacatgcaagcaagccacattcttcaaataaatataccaccaaatataagacgttaacatttctcttttttcctccttctattaattatataatttaaaattctttataattcctttatctatttttcatcaggtctacttttatagtaacaccattaacagtgaacagattgctatttgatattatcttctgaaaccttaatgcatatcagtaagtgatagagataaaaaataaataaattatggactatataaacgatcatgatggtcccatttattatacacctatatagtaaagtcttcaaggcaatgcaacctagttcaattaacatgctcaaactttcactcttggaaaaaaaaaacccacaagtctttgtttatgactaagaaaaaaaacccaacaacacaactctgtttataactaaaatgtaagaaaaagtacatgacaattttaatatgaactatgcacgagaaacactaaccatctttatcctacccaaagacaggaatacggtgatttaattacccatcctgctggcctagagtttgcagctcagtgctgtgtaaattgtggtggagaaacacattcttcctgctgtacatgtgtaaagagattggccctctgggtggctgtccaaacctgcctgtaaaggtcgaatgctgtcgggccgtagcaacttggtcctttggtttctctaagaacgtggagagcccttctgtcttagctgttggcttcagagagctctgcccaacggtggcccgtaagttctgtgtaacgtctgaagtgagggtttcataagttcctcttgaatgtttgataacttctgctagttccttgtccttcaggaaattacttaaacagagacttgggagttgacaggtcttgtttttgtaggggcttgtctggtccgctgccgaatacctaaaacggtcctcggtgggagtatgtattgcttttc

SEQ ID NO: 721443 - DNA, 2872 bp, Homo sapiens
tctgcctccgtttcagatatttactcacctttttctctctcactatgtctgccgtggtctccatgagactacgccacgtaagattcccccattaaaggtcatgaattgagtggcttttagtatacctgtggttgtgcacattcaattttaattcgcaatccattgtaaaacgtcttatcacccccgaccagagaaagaccctgtagacattagtcactcctcattctgtctcaaaccctctccctgaccctcagccctaggtagcaactacctagtgcgatcaatcccatatgcatagatttccatattgtggacatttcctataaacggaattgcacaataggtgagctgctatgactgacataacacgtagcacaatattttcaagattcatccacattgtaggcttacccacagggggaaaccattttttggggggttttagtaacaccggtgttttctccttcctttcatcctyctttccttccttccttccttccttccgtccttccttccttctttccttccttcctttcttccttgcttccttccttccttcctcctatttctctcttactccttctgccctctctctttcatatgccttaggtgcatcccacattctgcgttttttgggggaaatcctcgacaggtgcgggaaaattgtgttattgtaactatttaccgctatctctctttcacggctctccatcacttgtgaacatctattggtttatcccaagtcactaagcatatttttattaggtacacctgtttttccttatacagctgtttctggagtgtagggtcgcatactcataaacccagtgtaactcagaaacgaatctaatattccaataaacccatcataacgttgaaaaatcataaatcaaaccatcataagtcacggtttgtctgtggatatgggcgtcatcaattccgttgtattcagtaatgccgtacaccactaacaatggcagactgattgggagtggatattgatagcattataaaagtcagttattagagggatacttctttaacctgactgaagaactgatctgatggctttagtacagtgcatgattacgtgagatgttttgagacagagtagtacatttgtgaatgaaattttatggcttttttttcacttagtaggaaccattgtgtgtggaaaagtgagaaaattgctttctgctgtagggtctggcattcattgtagatttaagcttatttttctgtgagcaaatcttattcaataaaatactactctttatactaaaaaacaaaaacagtggtgatgtgtggtcattatcgtcagcaaactaatccagggaaagaaaaccaaacgccaccttctcacttataatgggagctgaaaagtgagatcccatggacacaggaaggggaacaacacacactggggcctttcgggaggcagagcgttaagaaaaacagctactgcatgctgggcttaatacctaggtgacgggttgacaggtgcagcaaaccaccatggcacacgtttaccttagtaacaaatctgcacatcctgcacatataccccagaacttagaaacgaaacgaaacaaaagaaaacgaaaaagcaatagcaaaacgctaaaggcaaaataaagtttcaaactcagaaagtgacagaccaacgtttggttcaaatcatggtcctaaacccaggtgccataaggtcaggataaagaatttgattacatattgtaaatatgacatgcagtaaatgaccagaaagattattctccacatatgtgtgtcttctaattcaatggtgacgctatctaccgggacatagcattagattccaaagggccgagtcccgccagacaggcctcccacaccaataacaatgggaagccctacgttgttttacctgtgcttctcagcaactggctataaatcaggttgccaccactcccagatttagttgcattcatttgctggaagagctcacagcacgcagggaaacacttacatttgccgttgtattttagcggacattgcacaaagttcagaaataaatgtggggcccggcatgcggggaggggtgcactaccttccaggaagtgttatccagaagctctctgaacccagtccttttgggttttgatggagacctcattctataggcatgatgggttaaaccataggctattggtgatcaactccacctgaggctctccaccctccctggaaattggggttgaggctttgccattctcagtctgactaaaagaatttacccaaacggaattttaaaacagatgagcataactggaatcttaattagatgattggattatctggagccacaccttgatattcctaacccgagcaccctcatccaacgaatgctccacccaactggctcccaagtctctacgtggttccagagccaaagaatgtttatactacgcatatctccaccttttcttcaaagtcttttcgcttacacggaaagacttcttcaactgccatgcatcagggtcagggggaggtcttgttacaacacagatctgcggatctccggggtttgattgtggcaaggatgctgctggtgtcaaaaccacaacgtgggaagcacagaaccactagttggttttcagtgtttcagtgcatacaattcctaataaatctggccaagaaaacctgtaagttcttagattgtcccaaaggtggcgcatgaaatcaaagcaggagaacagtttcctacgaggtgtagcctgggaaagttgggggtgactgatggaaaggaggagtgaagctccgccctttccactgctaggctgcacccgaggctatttaaacccaccctggctggcctgtactcagatcttcgcgg

SEQ ID NO: 721444 - DNA, 1711 bp, Homo sapiens
agcaaaacgctaaaggcaaaataaagtttcaaactcagaaagtgacagaccaacgtttggttcaaatcatggtcctaaacccaggtgccataaggtcaggataaagaatttgattacatattgtaaatatgacatgcagtaaatgaccagaaagattattctccacatatgtgtgtcttctaattcaatggtgacgctatctaccgggacatagcattagattccaaagggccgagtcccgccagacaggcctcccacaccaataacaatgggaagccctacgttgttttacctgtgcttctcagcaactggctataaatcaggttgccaccactcccagatttagttgcattcatttgctggaagagctcacagcacgcagggaaacacttacatttgccgttgtattttagcggacattgcacaaagttcagaaataaatgtggggcccggcatgtggggaggggtgcactaccttccaggaagtgttatccagaagctctctgaacccagtccttttgggttttgatggagacctcattctataggcatgatgggttaaaccataggctattggtgatcaactccacctgaggctctccaccctccctggaaattggggttgaggctttgccattctcagtctgactaaaagaatttacccaaacggaattttaaaacagatgagcataactggaatcttaattagatgattggattatctggagaaacaccttgatattcctaacccgagcaccctcatccaacgaatgctccacccaactggctcccaagtctctacgtggttccagagcaaaagaatgtttatacaacgcatatctccaccttttcttcaaagtcttttygcttacacggaaagacttcttcaactgccatgcttcagggtcagggggaggtcttgttacaacacagatctgcggatctccggggtttgattgtggcaaggatgctgctggtgtcaaaaccacaacgtgggaagcacagaaccactagttggttttcagtgtttcagtgcatacaattcctaataaatctggccaagaaaacctgtaagttcttagattgtcccaaaggtggcgcatgaaatcaaagcaggagaacagtttcctacgaggtgtagcctgggaaagttgggggtgactgatggaaaggaggagtgaagctccgccctttccgctgctaggctgcgcccgaggctatttaaacccaccctggctggcctgtactcagatcttcgcggagcggatcagcggccggagcgtttggcggactctgcgtggacttggagctcacagcgtcttgcgacttggaagcggattcagaggacaggacagaacacttgggcaagtgaatctctgtctgtctgtctgtctgtctgtctcattggttggttgatttccatttccttaaggggcccatacctcacaccgcacacacacaagcacacacacacacacacacacacacacgcacacgcacacacgcacacacactccttccttctgcgagttagaacattagtgggggcccctgggagctgcaggtttcctaatcatgtctgcacctaagaacagtagggtcttgtctggctcttcttatgaacggtcccccagcacggacaccccaaggtccatgcgagcctcacccagcttctccctctcccctctcagaaactcaggcttaaggggaa

SEQ ID NO: 721445 - DNA, 674 bp, Homo sapiens
tggctaattaattgtccccaaggaaacacatataaacagattctccatcactctcagtggtcaagataatttacctaccttgggctgacttataataatccaatctattcatctttccaattatgaacaacttcacaatatctttcttgtaatttttttcatacacctttagcttatccatgtttaatattatrttgcagaagaatgagaaaccagggctgttctcatctcattggtgtgcccttggctttctctcaataaaatgtttgcagggtttgtatgctcgctctttaaaagttgaaaagagaaattcttgagaaaacaagtaaccaacacgcaaccctaacagagtctggggctgacatttgcagaaggtcttgctccctatttgacttcccaaactttgtaagagaagtaggtatgtaaaccgaggaagttttacttccttatgatgatcaaatagaggcggactccactggcaaagagagccctgccaaggtctttgcctcttttgaaggacctagaatatcttatgatagcaaacatctgttgctttgtatttataaagatgatgacaatgacctctgagacagtgcccttgggtgctgtgggtagaattttctctgatgagtttactgagaccccttgatgccaacagaacccatttaatagct

SEQ ID NO: 721446 - DNA, 2921 bp, Homo sapiens
cgccagacgttcgcagctgcagcaccaagcaaagttatcattttagaattcaggggagaggaattcgtcattccacacaaactcgctgaccgacctgggcgtttagcccacagaaacacagaaaacggaaaccgagccctctaatcttagttacctttaagagaggccttaatttcttttaaccaggtttccagtgggaagaataagcagcatctccttttaaaatctcagctctcaaacagatttttgttactattttgtactggcaaggcctaagacccaaccaaatcccgttttctctttaactgcggctcgtaacctccgccagagtgggttctgtagtcgaggtgagacagggttcgggctcaaagaaatcctctccggggacagcagcagccagtccaccgacctggaaacctaaatccctccgaaacgggcatgcagactcagactttttgcctccctccccgggctgcttgttttccatttaagtattgaatgcaagatggtgtatttgcgaattagatcccgtgcagctgggaacgacgagaagcggctctgcttgccaaacgatagggcactaactgcaattgctgagattcttaacagggtgttccaggaaacaaataaacaaacaatcctctcccctctccgcccccttaccccctcctgtgaaggccgtggggcggctctatcttctctccggggatgctgggggcctgtgacggagctctgttctcgtcctgctggagtgccctgccattcacgccgcgtgccagcggtggggaggaaagatgctaagtgacaggagagagcccctagcaatgggggtcccacggtggccaactctggggcagttcctgcccctgccacccccacacttaagtcaaaggttctttcctatctccacttgtgtctcttaaacagagcggacacttggtctgtcgtttatagcccttgaaatgttggcgtgcccctaagcaacctgcagcacccgtgttgagtcctgggctcagcactgaccaggcacgctggagctgttgactttggaagactgaaatgggcatgagttgatggatggaaagtactctgaacatgtaacaagcagttccttgagatctagtttcctggtagaacattttgcttccgactccagttttcccttagtgccctttttctttctccaggtggtaccgtttctgtttggtggctggagatcttacactagtacagttgtgctctgagcttattgctgacattcctgagagctctatctccctagctagatgaagggcccaggtaagctcccagatcctcctcctccccaattttgtctacccccactcccgctcctccccatcccatcccatgacatcctgctctctaaactcatttttccaaaggagctttcttactcctcttcccttaagtctctcaggccccagccctccggaaggcttacagcccacagagccacatatcctcaccatctaaaccgtaacacatcaatcacactttataactttggctacaggaaaacagtgccgcacgcttcacagcaacttcctcacagggttggacctgatgcctggagtttggctcttgtgacctttgcctcaagccaagtctctccattccactttgaaaagagaagtaggatagttctgggttgagtagtaacaaatagtggctcaggtgggggcaggggaggattgggcgatagattttttttcaaaaatgcttgtcttgaacacgcgatcatgtgcaggggattacaccagaataattgccaattaattattgcgattatttagttatccagtaaacatgtattttgtaccaaatattcagccagacttcgtgctaggcaaaaaagttgcagagatgaataagacccagtctttgcgttggaggagcccacagtctgctgtgtaacttcagtatctgaagtttactcagcactttatatatgacttgttcatgccatatataattcttcacagattatctcatttaatcctcataataatagtaccaaagtggtcaggctattaatgtctccattctataatatatagttgagaaactgagacacagagattaagtagtttgccaatggtcacagagcttgaaagtcagttgctgaacttggataggagccaaggtggtcacatcccagagcccatatatgggagacctagcatctgcctctcttgttcagcgactaccgggaaacatcatttcaacccagagtggtaaaggacagagctggccaaagtcaaaggaggcagattttagctccaaatagggttaggaaggactctgggatgtttggagtggtccagcaaaggaagattgtatctggccctgagtcttccatcacaggaggcatttatgcagaaagatttagggatagggtagagggactaatgcattttccaggatagaagaactctgaggattgttccatctctcagagtctctgattctgggaatwtggaggtttgtgctggacaaggggtacagctcttggcacagccatcttggctgcagcattaaaagtcagagtacagcctgcgatgacctgagccagctcctgggcccagggtgggctcctcatttttaaatatttactgatatcttctctccactcttcttccttcttctctttatgatttacctccccggctcctcttcttttgttatctttgcctttataagagttaaaggtagtatttagaagttctttgtctattacgttgaggcttccctcctaggaacattacttacatgggaggttttgtcgaacaagcatgtgttctaattatcattccctctcctccaggagagaaacaggattggaaaagaaaacaaaaagagagaccagtcctctggcacattcatctaatgtcaatctagcc

SEQ ID NO: 721447 - DNA, 2921 bp, Homo sapiens
cgccagacgttcgcagctgcagcaccaagcaaagttatcattttagaattcaggggagaggaattcgtcattccacacaaactcgctgaccgacctgggcgtttagcccacagaaacacagaaaacggaaaccgagccctctaatcttagttacctttaagagaggccttaatttcttttaaccaggtttccagtgggaagaataagcagcatctccttttaaaatctcagctctcaaacagatttttgttactattttgtactggcaaggcctaagacccaaccaaatcccgttttctctttaactgcggctcgtaacctccgccagagtgggttctgtagtcgaggtgagacagggttcgggctcaaagaaatcctctccggggacagcagcagccagtccaccgacctggaaacctaaatccctccgaaacgggcatgcagactcagactttttgcctccctccccgggctgcttgttttccatttaagtattgaatgcaagatggtgtatttgcgaattagatcccgtgcagctgggaacgacgagaagcggctctgcttgccaaacgatagggcactaactgcaattgctgagattcttaacagggtgttccaggaaacaaataaacaaacaatcctctcccctctccgcccccttaccccctcctgtgaaggccgtggggcggctctatcttctctccggggatgctgggggcctgtgacggagctctgttctcgtcctgctggagtgccctgccattcacgccgcgtgccagcggtggggaggaaagatgctaagtgacaggagagagcccctagcaatgggggtcccacggtggccaactctggggcagttcctgcccctgccacccccacacttaagtcaaaggttctttcctatctccacttgtgtctcttaaacagagcggacacttggtctgtcgtttatagcccttgaaatgttggcgtgcccctaagcaacctgcagcacccgtgttgagtcctgggctcagcactgaccaggcacgctggagctgttgactttggaagactgaaatgggcatgagttgatggatggaaagtactctgaacatgtaacaagcagttccttgagatctagtttcctggtagaacattttgcttccgactccagttttcccttagtgccctttttctttctccaggtggtaccgtttctgtttggtggctggagatcttacactagtacagttgtgctctgagcttattgctgacattcctgagagctctatctccctagctagatgaagggcccaggtaagctcccagatcctcctcctccccaattttgtctacccccactcccgctcctccccatcccatcccatgacatcctgctctctaaactcatttttccaaaggagctttcttactcctcttcccttaagtctctcaggccccagccctccggaaggcttacagcccacagagccacatatcctcaccatctaaaccgtaacacatcaatcacactttataactttggctacaggaaaacagtgccgcacgcttcacagcaacttcctcacagggttggacctgatgcctggagtttggctcttgtgacctttgcctcaagccaagtctctccattccactttgaaaagagaagtaggatagttctgggttgagtagtaacaaatagtggctcaggtgggggcaggggaggattgggcgatagattttttttcaaaaatgcttgtcttgaacacgcgatcatgtgcaggggattacaccagaataattgccaattaattattgcgattatttagttatccagtaaacatgtattttgtaccaaatattcagccagacttcgtgctaggcaaaaaagttgcagagatgaataagacccagtctttgcgttggaggagcccacagtctgctgtgtaacttcagtatctgaagtttactcagcactttatatatgacttgttcatgccatatataattcttcacagattatctcatttaatcctcataataatagtaccaaagtggtcaggctattaatgtctccattctataatatatagttgagaaactgagacacagagattaagtagtttgccaatggtcacagagcttgaaagtcagttgctgaacttggataggagccaaggtggtcacatcccagagcccatatatgggagacctagcatctgcctctcttgttcagcgactaccgggaaacatcatttcaacccagagtggtaaaggacagagctggccaaagtcaaaggaggcagattttagctccaaatagggttaggaaggactctgggatgtttggagtggtccagcaaaggaagattgtatctggccctgagtcttccatcacaggaggcatttatgcagaaagatttagggatagggtagagggactaatgcattttccaggatagaagaactctgaggattgttccatctctcagagtctctgattctgggaatttggaggtttgtgctggacaaggggtacagctcttggcacagccatcttggctgcagcattaaaagtcagagtacagcctgcgatgacctgagccagctcctgggcccagggtgggctcctcatttttaaatatttactgatatcttctctccactcttcttccttcttctctttatgatttacctccccggctcctcttcttttgttatctttgcctttataagagttaaaggtagtatttagaagttctttgtctattacrttgaggcttccctcctaggaacattacttacatgggaggttttgtcgaacaagcatgtgttctaattatcattccctctcctccaggagagaaacaggattggaaaagaaaacaaaaagagagaccagtcctctggcacattcatctaatgtcaatctagcc

SEQ ID NO: 721448 - DNA, 1327 bp, Homo sapiens
tgaatcaraaacagctctggcctttgaatagctcttaacctaaaaaatatgttaagaaaaagtaacgaagaggctggacgcagtggctcatgcctgtaatcccaacactttgggaggccgaggcaggtggatcacctgaggtcaggagtttgagaccagcctggccaacatggagaaaccccatctcttctaaaaatacaaaattagccaggggtggtggtgcatgcctataatcccagctactcaggaggctgaggccggagaatcatttgaacccaggaggtggaggttgcagtgagccgagattgtgccattgcactccagcctgggcaacaagaacaaaactctgtctcaaaaaaaaaaaaaaaaaaaaaaaagtaatgaagatcctgtttgataggcactctaataaggtttgacaaagtgctactagaacccagaggaggaagcctcaaagtcagccattagagtttgatttgataaagatgaaatagccagtgattctaaattcatttttcatacaatatccaatctactcctcacacccaatcaatggatcctatgggtttcacctcctgcccacattttccatgtccaccattgcatcttgtctggactgcagcagcagactaacaactgatgtccctgatttgctgctaccttctgtcccccactgaaaccagaaagatttttcagaaatacaaactggatcttatcacctcttttaaaaatctcatcaacatttcatttcctactgaatccaaatttcacaaggcctacaatgcctcccaattctttttctctctgcgctcaacactctcaatctcccacactgagctccaaacacactaaatgctcttttgctttttggtaactccaggttttcagtcacactgctccaaactcgtacatcaacctcctcccttctcagcctccctctagtttctaattctatctcatgctacggtctcagtgtgaatttcctataccaccccacacttctccatcagacatccagcattcatcatagtcactgtagtcctgatctttcaacccaccccctcttgactggtatctttcctgctaactccaagaattagccctccccttcctaactactcattgacacacaccctgaacaatatgttttaggacttacttatatcttattgaactttattatattcaaatttaactaacacctattgtgtgctggattctgccttaaatcttttcattccccttagttcttatagcaatttatttttattttaattttttattttactttaagttctgggatatatgtacaggtcgtgcaggttgg

SEQ ID NO: 721449 - DNA, 1937 bp, Homo sapiens
tttttccaaggaaggaatgagttcacctatacattattasgcttagtgccccactgctaacaatatgcacctggaagaattgatgaaccctagtccttccatctaaatgtattctcccctgctacctgccaatttggtctctttctctttctcaaagtattggtctcaatgagcacacactcctgcaaattccaagaaagatcctcataaacattaatgatttaagtaaataataatggtaataataactgtgatctattcaatatttagtgaataccagacaatttgctaaatttctgacatgcactgtttcattatcatcttaattgggaaatccatttaccatgttgaatttggcatgacaaaacattgctttataacttgtggtctgtaaaaaatctgttgcttggcagcagtgccagagcaaactcctgatgactcaacaatttgtaccttggtaactctcaatgcttgctctattaaaaactgctttcagttgttagctctgaattttggtatccttctgaacccacaagagttggatccattaattcagggagacatatcgtaggcttacgctattacgcacaaggtagcataactccccacccccaaatcctaccaatgtcagtggcatacaagattatttctcactcatgccacatacccatcacctgtcagttgtcacacggttccatgtcatcttcattctgggatgtcagctaaaggagaagccctgacctggaacattgccagtttttgtttcagagagaaaagagaacgatgtggaattctgcaaaagctccttgaggttctactctgaaactacatgtcacgtccactcacatttcattagccaaaactgatgtcggcaaaatcgggagggcaaccaacattttgaacactagcacagtattggaacagtgtgggtagtggaagaagagggagcatttaagtcaggcagaaagctctagagtagaaatgagttgaggatcatctttttacttcatttctctgaatcctcttgtctgtactcataaaatggagttaatgtggccaatgccgcaactttctcaaagattcattgtaacgttcaaaaagtgtaacatatataaaaggagtttgaaaaatttaaaacactctgcaagtaaaaggtattatcatttaatgttaattgtagtgctttccacacctgacagatggcatgatgtgtatgatattacattgttctttatgcttctaagtaactttttatcacagaaagaaaaagtttatgagactctatctaggtagactccaaattcaagaactaagatcatgagtagggcccctattgctatactttcctcagacactactcctaatgcatcagaaactacttaagaccaacctgttgaaaatgtcattaaaaaaggaaaaagcctcagccgacaagattcctaaaacattaaaatccaactagagcagttttcaaaatggagaatgctcctcctggagtcagaaaaggcaaaatgaaacagcctcctgtgaattgtatcatagctgacaaaaggtcttattatcttctattgattggccaggagttcagctatcttctctacggcagtttctacgacaatctctacagagcaggagccaatatgccacctctctgcttctaccttaggaagttaagaaaattgaaagcctttggtgcttccttttccactgagagcctgaacaggcttttcaagatggcctggacaatgtgtgtaatattttgttttaatttgcaagccagtcttgttcactgtggtttttatcgtatgagtcattttcatcccatttactcagagtaaaaataacttgcttcaagcagctcataagtatttacttctttctaggctgtggagagacaacgaatgaagcctcagagagtctctgttcctaggagggca

SEQ ID NO: 721450 - DNA, 1937 bp, Homo sapiens
tttttccaaggaaggaatgagttcacctatacattattaggcttagtgccccactgctaacaatatgcacctggaagaattgatgaaccctagtccttccatctaaatgtattctcccctgctacctgccaatttggtctctttctctttctcaaagtattggtctcaatgagcacacactcctgcaaattccaagaaagatcctcataaacattaatgatttaagtaaataataatggtaataataactgtgatctattcaatatttagtgaataccagacaatttgctaaatttctgacatgcactgtttcattatcatcttaattgggaaatccatttaccatgttgaatttggcatgacaaaacattgctttataacttgtggtctgtaaaaaatctgttgcttggcagcagtgccagagcaaactcctgatgactcaacaatttgtaccttggtaactctcaatgcttgctctattaaaaactgctttcagttgttagctctgaattttggtatccttctgaacccacaagagttggatccattaattcagggagacatatcgtaggcttacgctattacgcacaaggtagcataactccccacccccaaatcctaccaatgtcagtggcatacaagattatttctcactcatgccacatacccatcacctgtcagttgtcacacggttccatgtcatcttcattctgggatgtcagctaaaggagaagccctgacctggaacattgccagtttttgtttcagagagaaaagagaacgatgtggaattctgcaaaagctccttgaggttctactctgaaactacatgtcacgtccactcacatttcattagccaaaactgatgtcrgcaaaatcgggagggcaaccaacattttgaacactagcacagtattggaacagtgtgggtagtggaagaagagggagcatttaagtcaggcagaaagctctagagtagaaatgagttgaggatcatctttttacttcatttctctgaatcctcttgtctgtactcataaaatggagttaatgtggccaatgccgcaactttctcaaagattcattgtaacgttcaaaaagtgtaacatatataaaaggagtttgaaaaatttaaaacactctgcaagtaaaaggtattatcatttaatgttaattgtagtgctttccacacctgacagatggcatgatgtgtatgatattacattgttctttatgcttctaagtaactttttatcacagaaagaaaaagtttatgagactctatctaggtagactccaaattcaagaactaagatcatgagtagggcccctattgctatactttcctcagacactactcctaatgcatcagaaactacttaagaccaacctgttgaaaatgtcattaaaaaaggaaaaagcctcagccgacaagattcctaaaacattaaaatccaactagagcagttttcaaaatggagaatgctcctcctggagtcagaaaaggcaaaatgaaacagcctcctgtgaattgtatcatagctgacaaaaggtcttattatcttctattgattggccaggagttcagctatcttctctacggcagtttctacgacaatctctacagagcaggagccaatatgccacctctctgcttctaccttaggaagttaagaaaattgaaagcctttggtgcttccttttccactgagagcctgaacaggcttttcaagatggcctggacaatgtgtgtaatattttgttttaatttgcaagccagtcttgttcactgtggtttttatcgtatgagtcattttcatcccatttactcagagtaaaaataacttgcttcaagcagctcataagtatttacttctttctaggctgtggagagacaacgaatgaagcctcagagagtctctgttcctaggagggca

SEQ ID NO: 721451 - DNA, 1937 bp, Homo sapiens
tttttccaaggaaggaatgagttcacctatacattattaggcttagtgccccactgctaacaatatgcacctggaagaattgatgaaccctagtccttccatctaaatgtattctcccctgctacctgccaatttggtctctttctctttctcaaagtattggtctcaatgagcacacactcctgcaaattccaagaaagatcctcataaacattaatgatttaagtaaataataatggtaataataactgtgatctattcaatatttagtgaataccagacaatttgctaaatttctgacatgcactgtttcattatcatcttaattgggaaatccatttaccatgttgaatttggcatgacaaaacattgctttataacttgtggtctgtaaaaaatctgttgcttggcagcagtgccagagcaaactcctgatgactcaacaatttgtaccttggtaactctcaatgcttgctctattaaaaactgctttcagttgttagctctgaattttggtatccttctgaacccacaagagttggatccattaattcagggagacatatcgtaggcttacgctattacgcacaaggtagcataactccccacccccaaatcctaccaatgtcagtggcatacaagattatttctcactcatgccacatacccatcacctgtcagttgtcacacggttccatgtcatcttcattctgggatgtcagctaaaggagaagccctgacctggaacattgccagtttttgtttcagagagaaaagagaacgatgtggaattctgcaaaagctccttgaggttctactctgaaactacatgtcacgtccactcacatttcattagccaaaactgatgtcggcaaaatcgggagggcaaccaacattttgaacactagcacagtattggaacagtgtgggtagtggaagaagagggagcatttaagtcaggcagaaagctctagagtagaaatgagttgaggatcatctttttacttcatttctctgaatcctcttgtctgtactcataaaatggagttaatgtggccaatgccgcaactttctcaaagattcattgtaacgttcaaaaagtgtaacatatataaaaggagtttgaaaaatttaaaacactctgcaagtaaaaggtattatcatttaatgttaattgtagtgctttccacacctgacagatggcatgatgtgtatgatattacattgttctttatgcttctaagtaactttttatcacagaaagaaaaagtttatgagactctatctaggtagactccaaattcaagaaytaagatcatgagtagggcccctattgctatactttcctcagacactactcctaatgcatcagaaactacttaagaccaacctgttgaaaatgtcattaaaaaaggaaaaagcctcagccgacaagattcctaaaacattaaaatccaactagagcagttttcaaaatggagaatgctcctcctggagtcagaaaaggcaaaatgaaacagcctcctgtgaattgtatcatagctgacaaaaggtcttattatcttctattgattggccaggagttcagctatcttctctacggcagtttctacgacaatctctacagagcaggagccaatatgccacctctctgcttctaccttaggaagttaagaaaattgaaagcctttggtgcttccttttccactgagagcctgaacaggcttttcaagatggcctggacaatgtgtgtaatattttgttttaatttgcaagccagtcttgttcactgtggtttttatcgtatgagtcattttcatcccatttactcagagtaaaaataacttgcttcaagcagctcataagtatttacttctttctaggctgtggagagacaacgaatgaagcctcagagagtctctgttcctaggagggca

SEQ ID NO: 721452 - DNA, 1319 bp, Homo sapiens
caactggaaaaagaaagacaagttccatattcttccttttgcaaatgaggaagggaaacaggcagagtggtgaaccaccttccttaatatcacacaactaagaagtatcagaatgtgttctcaatctgtctcctaaactctgatacaatttcttacagtgcacaatgctgctaccttgcatctgtcaataaatccaaagaataaattacagaattagcaagtctcatagaaatggcattatacctgaaaagaattctgaacattaacataagaattactcaaagggaacagtcagggatttaaacaagatttatatacaaggatgttcactgaagcattatttataagaatggaaattgaaaatgatctaaatatgtaacagcagggaagtgcacagaacggtctatctgtacagtgcaatgtkacctagtcattataattaattttctaaaagaatatgaaatagctgagaagtatgctaatgatagaatattaagaaagaatattatattgaaagtataataccctttttattcaaatatagatggtaatgtaaaaattaagaaaagccgtgcacaatggcacagtcccagctacttgggaggctggggccagagaattgcctgagcccaggagttagaatccagcctgggcaacacagcagaaccctgttcctaaaccagaaataaaaccttttttaaaattaagaatgataatagaatacatgcatagtaaaaccctggaaggaaatatgccaaatatcaatagtaattatagctacgatggaggggttcaaattattggtgatttttgtctttattctctaaatgaacacattgctactgtaatctaaatttaaaaaaattaacaaataagttttagaacatcttttttgcaaaagcattgccaactttgaatatctccctcccctacaaggttaaataagtaaaaaaaaaaaaaaaaaaaatacaagaaaataacataagaaaataaatcaaagatgaaaataaaacatctctgaaattgaattatatgaggcaatggcctggttagttctcattgtcactgggtcctaatcaaataagttaactggcctccaatatgtaactgaaaatcaaatacaagactccagttacccaagtttctggtttaacagcattagctgaatatcaaaaaggctgcccaaggaaggcacctcagccaagacatttcatgtataactgctgtctgtacgactaaaaggtcaaatggctctcaaaaagtgcaaactacccatacagagatatatcatatcttctcaatgtgacaaggctttaacc

SEQ ID NO: 721453 - DNA, 1576 bp, Homo sapiens
cagcagcctgaatgaaccaagacacccatgtacacatttacaaacaaaacaagtacggcctagcccacattctcaggagcttacaattttcctttaagtaaagttacgtgggaagaccctgaactgtggagcaaaaagggcctgcgttgagactagctctcctgcttgtcgtgctgtggtcttgagaagcacctgaactctttgacccctttctcctcatctgtggaattagggtaactatgccattccccaggcttgctaccaggaggagaatgmggggacagacttgggagcagctcacattcctgaagaagttaacgttctaaggtatggtggtgacaagccggaccgggcagaatacattcttcccgtggtgaaacagaggaaaataaagctggacagacagtgaagggccctgtcatggaaagctccagccagacagagcggtctggagtttgttttgcaggcagtggtcatggggaaaggctttgtgaaactcacggttcagcggctgagtctcaccgcctgtgtagcttgggtggggtggagtgagactggaggctgggaagcacctgagaggtgtcaagggctgccgtgtggacttagcctggggcagtgggaggggtaggggtggaaggcaggccacaggagtgaaaatagggccccggtttccagggcgtcgttccccctgcatcttgctctctgcctttctcctcttgtccttctgtctccacccctatccccatctcccaaatgcttcagagcataaaggtgctgcccagccaaaatcacccgcacaaactccaggtaaacttggtctgggcagctttgagtgggtcatgagtggaggaagggcaggcccactctttccttagtatatgagtgagaaaagcgaccgctggttagatctcacaggaaaccagagccttgtggcagcacctgacttcaggtgcagcacagcccacggagtgagaagctgacacctctgtgcctgctgaggcaggctgctccttctacaccaggccagggaaatcaggtcacccactccaacagtctgccggacgctggggactgactgctgcctctggggcatccaccacaaaggattcatggactcactgacagggccaggcacctggctaaggatctcaaactggtgcggcccacgggtccattcaatctatagatgggttttgtgcggccaacaccgtccttcttgtctacctgttgtatatgcattctggccttgcccctgagtttatgaatttaccaaccccaccttagcagggcatgaagaaatgcaaaggcgctccaggagcttctgattttgctgggaaaacaaaacaagtatacaggcaaagagggaggacaatggcagacccaatgcatggggcagtcatctgcatttctgagttgaatttagagaagagatcttctcccacagatgataaaggggtgcatagaggtgaggtgcacacggcctgggggaagtcagccctgggatgagcatgggagagggaggttccccagtggggaaggacacgagggtatggactggagaaaatctgcatggctg

SEQ ID NO: 721454 - DNA, 632 bp, Homo sapiens
cttgcctcctcctcactctgggtgacgatggccagtgtagactggagagagccggagggactggtctcccctcaaggcccgaagcaggactggcaccagcggtgagatgggcacctggggtgggggccaggggtctcagcccataaacaccccacacgccacagcagcacacaggggctcctttaaatacacagctatggggactcccaaaatgcagacgtacacttgcactcacaagggacgcacttccatagctgtarcaacccatcagggaactgaccacacacactccggcgggaggtcctcttcacttccttccctccacgaagatctctccccttcaccacggacacagtgacatgtgctatccaattgtgacaaacacatcatctctgaatttggacactggggtcccatttcagaaggtgacaaccctcacaccaacaactgcacctactttcttacagggttggatgcctataacatgcctgcatggtgggacagcaagcggctgattgcccgcacacactcagatgcacgcttgcacacatgctcacacatgcttacatgcacactcacacttgccttcagacacacatgggtccaggcagggccctggcttggcctgacct

SEQ ID NO: 721455 - DNA, 579 bp, Homo sapiens
tgtatggaggggtggaccgtcggcctccttcctggccccaggggacacagtggcactgcaagcaacagggaggggtggggcggggagccaagaccctcctacccccaccactgggctggtctcctggactccatttcttggcctttcaaggcctcagargaatgagcaactttctcaccatcttgctcctgtggccaccagtgtgctggggggatggtgggtgagggcagaggcaggtggtggcccaagcttggtgccctgacgctgccttgtccttgccaggccatcatgacctacctgttcagcatcagtgaggtgagtgttggagtgttgcgtgcacggctggggtgggctgtgcaaagggccagggtgccaggctgcaccacgatgctgagggcctctcccacgtccagcctccctttgaggaagacctgagtgtgtgagtggtcatttctcatgagtggaagctccccagtgggtaggagcctggtgacctcagccaggccctgggaggagcctttgggggtgataggaggcagtcaggtatgtggggacgggcggcagaaagtgggtgagacg

SEQ ID NO: 721456 - DNA, 683 bp, Homo sapiens
tcccattcacacactctttttggccagcatttccctggccgggatccctccagcagctcagttgaagagctagccacctaaaaaagatttgcattacagtacagtgtgacaagagccatcgtagagctgtgcacacaatatcgctggggtaccaggtggagtctggggaatctttgtgagttagggatgggtatgttaaaggagtgaaggaaagatataaagtactgaacaggaaagctgcaaagagcaggccctaggagcttgaagtccatcatcgtcagtaagccccgccttggcttctgtttcttaatgaggccagactctctcagtctgcagatcagagcaaacagaagccctcatctgtttatagtttaatcctaacctgatcctagcttggaagcaaagcttctctcactttagcaatgacagcttctcygtacactttaggagccatggctttccacctacaagtccccacaagcactttttaaaaaatgaaattaaagaaaatatcagagtgcatccaacagagtaagtattatttcatgaaacttttgattcagtgacatgtgtgtatgagtctgggtggtaatgtcagatgtatttcttactgagattttaaaagttaaactttaaacgtttaaaggaaaacatctgttcatcaaatattaagtatgatcaga

SEQ ID NO: 721457 - DNA, 1412 bp, Homo sapiens
gctgggggtatggcgtgaatgcatgaggcacgtcatcctcacactggagaaagtctggaaaatcccaaagttctgagaagtagcccctgtgtctccttagggatttttctacctagatgctgccttttaaagaaaagtctctggctgcaggctgtggcaccatgaggggctctggttcaagccccatgtgacgagttgcggctgggaaatagttccccagaaggcagagggcaaagtgtcttctccactctggggaggggtctagactttccggctcctctcttcccagagccttagggattcgtgttcagacacaaggcccgcctgttcttccctcagaacacccttcattgggaggttgtgtgtatgttttcggagctgtgtttcttccctcactctctgaacaagctggacattgtccgggggtgtaggagtgctctgtggggcttggacggcttgatttctctccctggcctaaaccaggaaatgggaaggaatgaaaagaggkggggaggagagtgggggtagggggataggggtggagtgggcagagaaactaattttatttcttttttttttttaaagacaaactttgggatagaaatatcgcaataaatatgctcttgtgtttgtgtgtgttttctcagctgtaaagaaaatagggagaaattccattctgtctggcttccaagtgtctccaggactcactgagccttttatgcgagaagactgactttggcagccctgagtcccagcacggccctgtcaacagggaggcctttctccatgggaagctgaattaggtgctgacagggcgacagcataggtgaggcagaggaaggggacggggagcctgaaatgaagtggagaggggagcttggggagcaggaaggggatgctgggtgaaggccgggtgagagtcatgtggtttgggttcatcaccagggaattgactttctcagagagcattatgtggagatttggtaggggaaagtgaggtgcttttagcttgagctgaggctatgtgtctgtgtgagcatgcgtgcatgtgtccaggttgcagacaaggaaaccttcacctcctcatcagccagactctaccccatggttgtctacctggccaaggtcttggcctggattccatcaaattatgggattgaacaggcagctcacccactctccctgaatgcatcttccagcaacatgtgcagtggagacccctcctcgacgtgggtggacgcctactgcttaataatctaggacctgccccacggctgtttcaaagactgagtgagataatgtgactgccatcatccctcctccaggccggacactgtttctttggctctgcacccagcacaggctctggcactcagcaagcatccatcagtgtaactttcctcccacctccc

SEQ ID NO: 721458 - DNA, 1412 bp, Homo sapiens
gctgggggtatggcgtgaatgcatgaggcacgtcatcctcacactggagaaagtctggaaaatcccaaagttctgagaagtagcccctgtgtctccttagggatttttctacctagatgctgccttttaaagaaaagtctctggctgcaggctgtggcaccatgaggggctctggttcaagccccatgtgacgagttgcggctgggaaatagttccccagaaggcagagggcaaagtgtcttctccactctggggaggggtctagactttccggctcctctcttcccagagccttagggattcgtgttcagacacaaggcccgcctgttcttccctcagaacacccttcattgggaggttgtgtgtatgttttcggagctgtgtttcttccctcactctctgaacaagctggacattgtccgggggtgtaggagtgctctgtggggcttggacggcttgatttctctccctggcctaaaccaggaaatgggaaggaatgaaaagaggtggggaggagagtgggggtagggggataggggtggagtgggcagagaaactaattttatttcttttttttttttaaagacaaactttgggatagaaatatcgcaataaatatgctcttgtgtttgtgtgtgttttctcagctgtaaagaaaatagggagaaattccattctgtctggcttccaagtgtctccaggactcactgagccttttatgcgagaagactgactttggcagycctgagtcccagcacggccctgtcaacagggaggcctttctccatgggaagctgaattaggtgctgacagggcgacagcataggtgaggcagaggaaggggacggggagcctgaaatgaagtggagaggggagcttggggagcaggaaggggatgctgggtgaaggccgggtgagagtcatgtggtttgggttcatcaccagggaattgactttctcagagagcattatgtggagatttggtaggggaaagtgaggtgcttttagcttgagctgaggctatgtgtctgtgtgagcatgcgtgcatgtgtccaggttgcagacaaggaaaccttcacctcctcatcagccagactctaccccatggttgtctacctggccaaggtcttggcctggattccatcaaattatgggattgaacaggcagctcacccactctccctgaatgcatcttccagcaacatgtgcagtggagacccctcctcgacgtgggtggacgcctactgcttaataatctaggacctgccccacggctgtttcaaagactgagtgagataatgtgactgccatcatccctcctccaggccggacactgtttctttggctctgcacccagcacaggctctggcactcagcaagcatccatcagtgtaactttcctcccacctccc

SEQ ID NO: 721459 - DNA, 1412 bp, Homo sapiens
gctgggggtatggcgtgaatgcatgaggcacgtcatcctcacactggagaaagtctggaaaatcccaaagttctgagaagtagcccctgtgtctccttagggatttttctacctagatgctgccttttaaagaaaagtctctggctgcaggctgtggcaccatgaggggctctggttcaagccccatgtgacgagttgcggctgggaaatagttccccagaaggcagagggcaaagtgtcttctccactctggggaggggtctagactttccggctcctctcttcccagagccttagggattcgtgttcagacacaaggcccgcctgttcttccctcagaacacccttcattgggaggttgtgtgtatgttttcggagctgtgtttcttccctcactctctgaacaagctggacattgtccgggggtgtaggagtgctctgtggggcttggacggcttgatttctctccctggcctaaaccaggaaatgggaaggaatgaaaagaggtggggaggagagtgggggtagggggataggggtggagtgggcagagaaactaattttatttcttttttttttttaaagacaaactttgggatagaaatatcgcaataaatatgctcttgtgtttgtgtgtgttttctcagctgtaaagaaaatagggagaaattccattctgtctggcttccaagtgtctccaggactcactgagccttttatgcgagaagactgactttggcagccctgagtcccagcacggccctgtcaacagggaggcctttctccatgggaagctgaattaggtgctgacagggcgacagcataggtgaggcagaggaaggrgacggggagcctgaaatgaagtggagaggggagcttggggagcaggaaggggatgctgggtgaaggccgggtgagagtcatgtggtttgggttcatcaccagggaattgactttctcagagagcattatgtggagatttggtaggggaaagtgaggtgcttttagcttgagctgaggctatgtgtctgtgtgagcatgcgtgcatgtgtccaggttgcagacaaggaaaccttcacctcctcatcagccagactctaccccatggttgtctacctggccaaggtcttggcctggattccatcaaattatgggattgaacaggcagctcacccactctccctgaatgcatcttccagcaacatgtgcagtggagacccctcctcgacgtgggtggacgcctactgcttaataatctaggacctgccccacggctgtttcaaagactgagtgagataatgtgactgccatcatccctcctccaggccggacactgtttctttggctctgcacccagcacaggctctggcactcagcaagcatccatcagtgtaactttcctcccacctccc

SEQ ID NO: 721460 - DNA, 1412 bp, Homo sapiens
gctgggggtatggcgtgaatgcatgaggcacgtcatcctcacactggagaaagtctggaaaatcccaaagttctgagaagtagcccctgtgtctccttagggatttttctacctagatgctgccttttaaagaaaagtctctggctgcaggctgtggcaccatgaggggctctggttcaagccccatgtgacgagttgcggctgggaaatagttccccagaaggcagagggcaaagtgtcttctccactctggggaggggtctagactttccggctcctctcttcccagagccttagggattcgtgttcagacacaaggcccgcctgttcttccctcagaacacccttcattgggaggttgtgtgtatgttttcggagctgtgtttcttccctcactctctgaacaagctggacattgtccgggggtgtaggagtgctctgtggggcttggacggcttgatttctctccctggcctaaaccaggaaatgggaaggaatgaaaagaggtggggaggagagtgggggtagggggataggggtggagtgggcagagaaactaattttatttcttttttttttttaaagacaaactttgggatagaaatatcgcaataaatatgctcttgtgtttgtgtgtgttttctcagctgtaaagaaaatagggagaaattccattctgtctggcttccaagtgtctccaggactcactgagccttttatgcgagaagactgactttggcagccctgagtcccagcacggccctgtcaacagggaggcctttctccatgggaagctgaattaggtgctgacagggcgacagcataggtgaggcagaggaaggggacggggagcctgaaatgaagtggagaggggagcttggggagcaggaaggggatgctgggtgaaggccgggtgagagtcatgtggtttgggttcatcaccagggaattgactttctcagagagcattatgtggagatttggtaggggaaagtgaggtgcttttagcttgagctgaggctatgtgtctgtgtgagcatgcgtgcatgtgtccaggttgcagacaaggaaaccttcacctcctcatcagccagactctaccccatggttgtctacctggccaaggtcttggcctggattccatcaaattatgggattgaacaggcagctcacccactctccctgaatgcatcttccagcaacatgtgcagtggagacccctcctcgacgtgggtggacgcctactgcttaataatctaggacctgccccacggctgtttcaaagactgagtgagataatgtgactgccatcrtccctcctccaggccggacactgtttctttggctctgcacccagcacaggctctggcactcagcaagcatccatcagtgtaactttcctcccacctccc

SEQ ID NO: 721461 - DNA, 1412 bp, Homo sapiens
gctgggggtatggcgtgaatgcatgaggcacgtcatcctcacactggagaaagtctggaaaatcccaaagttctgagaagtagcccctgtgtctccttagggatttttctacctagatgctgccttttaaagaaaagtctctggctgcaggctgtggcaccatgaggggctctggttcaagccccatgtgacgagttgcggctgggaaatagttccccagaaggcagagggcaaagtgtcttctccactctggggaggggtctagactttccggctcctctcttcccagagccttagggattcgtgttcagacacaaggcccgcctgttcttccctcagaacacccttcattgggaggttgtgtgtatgttttcggagctgtgtttcttccctcactctctgaacaagctggacattgtccgggggtgtaggagtgctctgtggggcttggacggcttgatttctctccctggcctaaaccaggaaatgggaaggaatgaaaagaggtggggaggagagtgggggtagggggataggggtggagtgggcagagaaactaattttatttcttttttttttttaaagacaaactttgggatagaaatatcgcaataaatatgctcttgtgtttgtgtgtgttttctcagctgtaaagaaaatagggagaaattccattctgtctggcttccaagtgtctccaggactcactgagccttttatgcgagaagactgactttggcagccctgagtcccagcacggccctgtcaacagggaggcctttctccatgggaagctgaattaggtgctgacagggcgacagcataggtgaggcagaggaaggggacggggagcctgaaatgaagtggagaggggagcttggggagcaggaaggggatgctgggtgaaggccgggtgagagtcatgtggtttgggttcatcaccagggaattgactttctcagagagcattatgtggagatttggtaggggaaagtgaggtgcttttagcttgagctgaggctatgtgtctgtgtgagcatgcgtgcatgtgtccaggttgcagacaaggaaaccttcacctcctcatcagccagactctaccccatggttgtctacctggccaaggtcttggcctggattccatcaaattatgggattgaacaggcagctcacccactctccctgaatgcatcttccagcaacatgtgcagtggagacccctcctcgacgtgggtggacgcctactgcttaataatctaggacctgccccacggctgtttcaaagactgagtgagataatgtgactgccatcatccctcctccaggccrgacactgtttctttggctctgcacccagcacaggctctggcactcagcaagcatccatcagtgtaactttcctcccacctccc

SEQ ID NO: 721462 - DNA, 659 bp, Homo sapiens
ctgataagatgttatcaataacagtgcgtgcccagtgggacatgaaacttcatcagcaattctaatttcacyctggtcctgtgatctcactctgcccccatttgccttgtgatattttattgcccttgaagcatgtgatctctatgacccataccctatttgtacacccctccgcttttaaaatccataataaaaacttgctggttttgcagctcagggggcatcatggaacctgctgacatgtgatatctcccccggacaccaagctttaaaatttctgtcttttgtactctttccctttatttctcagactggctgacacttagggaaaatagaaaagaacctacgttcttttctgtcctattgggggctggttcccctgatatggacagcagatgaagtctaaatttccccctttggtgggggggttgtcccatacagccaagctgggaccccactggactcagtggtatatctgaaaagtggcagaggctgggtcaaccaactctttcacttggcgactccatcattcttgacatctgctaggactcaggagttgagttctaaaaggctttgaggccagagctatagagcagtaggtttggagcaaggagtcagaaattttaagctgctgctcagttcattgacatggttgactt

SEQ ID NO: 721463 - DNA, 636 bp, Homo sapiens
atattaatagttgttagctcttattcatagttgttagttgactaataaagtgcctgtcatatgatacttactcaaaaatgaaataattattccctcaataatattttattgcatgctttccaccttccataatcatttctaggccttgggaatacagatattaataatagtttcttccatcaagaaaaacattttctagtggagaaaacagacacataaatcatgaattttaatacagtgtaaaaaaagtatgtaatagagtrtataaatataccaatactacataaattattattcatatatacttagtgtaaattaaacttttgtatataaataggttagagccttggtatcaactgacaacttcatgcaacttaggagctagacgagattttcctgaaactttcatgaacatgtctgaaagaagccaatagtcttttcttcagggatctggcttctttgtttgctgtcctcattcacccaaatccttccaaaaattacaattggactttcacaaatttctaaagaaaaaaatgtacagaatctactggaaattataaggagtggattatatcaaataatagaaaattttagaccagatatttctgttcttttgagccatttttagccactggg

SEQ ID NO: 721464 - DNA, 575 bp, Homo sapiens
cctcacaactggcctggaaaggcaaagtgactggggaatgattagtcatgacctctttttttcttcattgtggaaaatatacataacatgaatttttttttttttttttgagatggagtctcgctctgtcacccaggctggagtacagkggcgcgatctcagctcactgcaacctctgcctcccaggttcaaatgattctcctgcctcaacctcctgagtagctaggattacaggcgtgcaccaccatgcccggcaaatttttgtatttttttgtacagactgggtttcaccatgttggccaggctggtctcgaactcttggcctcaagtgatctgccggcctcagcctcccaaagtgctgggattacaggagtaagccacagttcccagctccattttgatcatttttaagagcactgtttagtgtcattacatatactcacagttttgtgcaaccacaccattgtctatttctgaaactttttcatcaatccccagaccccctgccaataaacctctgtaaccattaagcaataactcccattcctcccttcctctagcctccgataacctct

SEQ ID NO: 721465 - DNA, 598 bp, Homo sapiens
tagataggtattattatacccattttacagataagaaagactcagagggccggatggggtgggtcatgcctgtaatcccagcactctgagaggccagggcgggcggatcacctgaggtcgggagtccaagaccagtctgaccaacatggagaaacctcgtctctactaaaaayacaaaattagctgggcgtggtggcacatgcctgcaatcctagctacacttgaacccgggaggcagaggttgtggtgaactgagaccgcgctattgcactccaggctgggcaacaagagtgaaactccgtctcaaaacaaaagaaaaacaaaaaagaaaagaaaagggaaaggaaaggaaagcactcagagaaagcaaggaacttgcctgaggtctcatggctaatggagtgcaggtcacaacctgactctaccccaacccaagtcccacctaactcgtcctgcagatgccccttgggtatccagtgactgtgtctgggctttactgtggacttgaggcatgatcctgggctggcttctttctggaccttggtttctgggttgttgggttggttggttgattagattaattaattgacagtgtctc

SEQ ID NO: 721466 - DNA, 598 bp, Homo sapiens
tagataggtattattatacccattttacagataagaaagactcagagggccggatggggtgggtcatgcctgtaatcccagcactctgagaggccagggcgggcggatcacctgaggtcgggagtccaagaccagtctgaccaacatggagaaacctcgtctctactaaaaatacaaaattagctgggcgtggtggcacatgcctgcaatcctagctacacttgaacccgggaggcagaggttgtggtgaactgagaccgcgctattgcactccaggctgggcaacaagagtgaaactccrtctcaaaacaaaagaaaaacaaaaaagaaaagaaaagggaaaggaaaggaaagcactcagagaaagcaaggaacttgcctgaggtctcatggctaatggagtgcaggtcacaacctgactctaccccaacccaagtcccacctaactcgtcctgcagatgccccttgggtatccagtgactgtgtctgggctttactgtggacttgaggcatgatcctgggctggcttctttctggaccttggtttctgggttgttgggttggttggttgattagattaattaattgacagtgtctc

SEQ ID NO: 721467 - DNA, 892 bp, Homo sapiens
tgatttttttaaaaaatgcttgagtaattttgttagtatttgccactagtctagaaaaattaactgaaattcttgcactccatttttaaccactccaattccctattaaatacacctacaaattaaataaggatactgctgctcgataatttaccattaaatgagtgtagaatatttgactgattattttactaatttcttatatgtgaaaattcttaaaatggtggaatcatttgactaattgaatgcaaatattaaataatttttttattgatgacatgcatgctgataggcacatcatttgatgcatcagctaatgccttgtcaggtttgtattctcttttttatctgaggctgggcacatgggcattttaactcaggaagtcttactttctctgccttccctaaaatcagtgcctacatttgaccctgtggaaaaacacaaaagcgagtaatttaaatcagcccacacctgcaccatcagccaggctatccttacagaaacgcttcgaacatcttattccggagcacctcaagcggctgaaaagaacaatttattccccgctaaagaacaaaatactgacattgagtttgtcttctttggggtyggaggaaagttgagatactactcatgaaaaggcagctatgtttggccctgtggtgatttagatttactatacaaaccaacaactatttttgaatgatggaattaagtatttacacaaggagacttagctctttagcttggttatgtcctgctgtttatgttacatgatcagaaatcttgtgagtgctgttttaggtgatacatcaccaagaattcttacattaggaaagtaaccatattatctgagatcgtttgctgtagggaaacctgcagcaaattttgcac

SEQ ID NO: 721468 - DNA, 2094 bp, Homo sapiens
ggaatgtgcaagggtgcacctaggttgggcagatggattagggccaaatttaaaggccttgatttcctgattattacgggcttgtaatatgtcccataagccatgggaatctatgggagggtactgcaatgttgtccctgccattgtctctccttctgctaatctgaacacccaggcagccaaggtgctcaaagatctctggagcagacagagctccaagcagaaggggtctgggatccttggccacccgacaggcagctcgcctatactgtggctctgacactgcagttactgtaaacttagggacttccttattgctcagttgcccttccaaggggaccttatcaactataggttttgggcagctgcctagagttgagggctgaccctaaggggccctaggcctccctctatcctactgcccaaccattcttccgtgatcttgcaaacagcattccatcgggtataagtgcttcagccatcttggtttcatctttccctccaccctctgctgaactattaaagcattttattccacaaacaaatctgatcttacaaccgctctgacctgaagcttgctgtgaggcagaagaatgggaggaatgcactgggatcagtgttactgcgggtgcattggaagagaagggccagggcttggctgtagcatcagatactggaggcagacccaaattcgtaaagacccaaggcagcaaggccatgtctcaggctctctttctcccaggaacaacaggatcatgatcgaagttcgggaaggcgcttcacagagtttttcccctctgtcaaggagtttaagctgctggtttgaatttctgccctatgaagaatttccggattattggtggggctttctttttctgaagaaaaatttcaaacattgtttttctaccttagttttatgcattcaggtcaaagcttctggctcctctttttggtagaatgaaatatcccaacctggctgaattcaggatggaaatgtttgtggaaattttggcctggccctgctaagaggagcatgtggctagagaggccccaaaaacccagaggaactggctaccaaccaccagcgggcttggtcatgtgtgcatctgtccagacagcaatttttcctccctggctttagttcatgctttctggtttcacattatgttcttgtccctcaagaccttcccagccctttccgtgaaggcttccacaagctcctccaggccacagtggcttgtctctgctcctacaagagacagaccatgtacagtatgacccaggacttggctgaacgttctcgatgcttaccagtgagactcctttccttatgaagatggaaagcttgctgaaggcaaagagcatgttttgtcagcattgggctagtatgtagtgtaggtgcataagatataattatactgattaaaagatgggtcagccaaggcctttccccaggatgttgatctaatacacacacacacacacacacacacacacacacacacacacacgatggaaaacatatttactggattcttcccggagactgtgaaggggaagcattaaactctgatctatctcatgagaagcaaagtgtggctgcgagagatgctcaaggactcccgatagatagttgcaacacattttttcccgaggggttggcaagtttcgcccagagccaaactggtcaagaagacagaatgaagacttagctactctttcccttcaccaggcaaagctcagcatgacctttaaatgcatgtgcccagatttgtttgaagagaattgtctttagtctgttttagctgctataacaaaataccataaactgggtagtttataaacagaagaaatttatttcttacagttctggaggctgggaagttcaagatcaatgcatgagcatatttggtgtatggttatgtcgaataggagcggtgaaagtgggcatcattgtcttgttctagttcttagaggaaaggcttttggcttttccccattcagtatgatgttagctrtgtgtttgtcacacatggcctttattatgttgaggtatgttcctcctatgcctaatttgttgttagtttttatcat

SEQ ID NO: 721469 - DNA, 902 bp, Homo sapiens
ttttcacaaatacaacaaggggcttatcatgaaggtaaggaagacggcaaataagggaagggaacggtactcatttgctggggttgccatgacaaaggaccacagactgggggccttaaacagcagaaaccgattgtctcccatactggaggctgcaagtctgagatcaaggtgtctgcagggttggtttcctccgaggtctgcgagggagaatctgttccatgcctctccctgagcttctggtcgctgctggcagtctttggtgttcctaggcttgtagaagcatcaccctgatgtctgccttcatccgggtgtgcgtctgtgtccaaatttccccttctttttaaaggcaccagtcattttggattagggaccatctactcctttatgacctcattgtaacwtaactaattattatccgcaacaaccctatttccaagtaaggtcacattctgaggtgctgcgggttagaacttcaacatataaattttcaggggcatctagtcaacacaaaacaggaactaagagtctcaagagctcactgtgcaccggacactgtgctagaaattccccaagaccctgtagagtggaggagtttggggaaagcttgttctatagccgacttgcagagtagttccctaaacgtatgcacgcacatgcgcacacgcacacatgcaatacatactctattttctctaataatacttcggcttagtttactagaacacacatattttttacctgtggaggatgacatggtaatttacggtgtgaggaagaaatggaactgagtaagaaacgtgaaaaggagacaaagttgaagtgctgagcagccacgatagggaggggataattcaagtgtgaatgattcaacattgatgctaatgcattttcaaagcaaa

SEQ ID NO: 721470 - DNA, 902 bp, Homo sapiens
ttttcacaaatacaacaaggggcttatcatgaaggtaaggaagacggcaaataagggaagggaacggtactcatttgctggggttgccatgacaaaggaccacagactgggggccttaaacagcagaaaccgattgtctcccatactggaggctgcaagtctgagatcaaggtgtctgcagggttggtttcctccgaggtctgcgagggagaatctgttccatgcctctccctgagcttctggtcgctgctggcagtctttggtgttcctaggcttgtagaagcatcaccctgatgtctgccttcatccgggtgtgcgtctgtgtccaaatttccccttctttttaaaggcaccagtcattttggattagggaccatctactcctttatgacctcattgtaacataactaattattatccgcaacaaccctatttccaagtaaggtcacattctgaggtgctgcgggttagaacttcaacatataaattttcaggggcatctagtcaacacaaaacaggaactaagagtctcaagagctcactgtgcaccggacactgtgctagaaattccccaagaccctgtagagtggaggagtttggggaaagcttgttctatagccgacttgcagagtagttccctaaacgtatgcacgcacatgcgcacacgcacacatgcaatacatactctattttctctaataatacttcggcttagtttactagaacacacatattttttacctgtggaggatgacatggtaatttacggtgtgaggaagaaatggaactgastaagaaacgtgaaaaggagacaaagttgaagtgctgagcagccacgatagggaggggataattcaagtgtgaatgattcaacattgatgctaatgcattttcaaagcaaa

SEQ ID NO: 721471 - DNA, 685 bp, Homo sapiens
ctggtggtctcagtctggctcactttggcacgtattatttattaatatcagggaagaacacctggcctgaaggagaggtccaacaggtcaaagtcaactccagactagattctgattcttgttgctttagtgtaaccaaccatcccagtttacctaggacaggggtaggggggctgttcccaggatgtgaactttcagtgctaaaactaagaaagtattgagcaaactgagatgaattggtcacccgggatattttctttacatattatgaaggatgaaatgtgaatttttgcaaaggcagtatgtgtgtctgactgtgacatgaatttaagcctacaagttttaaagacaaggagccactcaaactgagtsccatgagatttgtatacattgcaggaaaaaagtcctttcccctagaggaaagggtcttaatctagttgcctaacctgaaaatgaaaccaaccaagaatgaaatgtatctgcaaacaacactgagcaattgtagagatcattgctgccgttagcttgtaacttaagactttgaagtgtgatttatcttagtttgcaaactctaaattggggtgtgattctccagtttccactagtaattaaagagtgaaaagttttgttattttaaatatgaaaaaaatatgagttcgcagtacaaaatacttgttttgtacaa

SEQ ID NO: 721472 - DNA, 637 bp, Homo sapiens
cacccagaagcttagtatggtcacacaatacacacacttytgataaacttaaatcttatttaccccctcatttagtgaagcctcccactttattagtattcacttttgacaaattcatgaagcaagtagctaactcctccagttgtaccacatcactcactattggatctgaacacgcaattttttttccatttagattttcttagacttagctttggtcttataagcttgtcttatctttcagacaaatttttgctgtgctgggtctacttgtccgaataagttttctctgtgttcacttggttcttcattcaatttaaccaaattgatcagttactctagcattattttgttgagtaaaacgtttggattatagctccaagtatgccacacaataaaaatgatgacactcatttgtcctattgcctgagacttttagtagttgaataaatttaagataattaatgctatcttaaccagccaactaataaatgaacacaattcaatggactaagtcactttgaattacataggcatacaagatacaaattcaattatcttctgcatctcctcctcttcaaagcctgcatataatctttgtgagcagagatggtacaaaagggggatggtacaaaaa

SEQ ID NO: 721473 - DNA, 637 bp, Homo sapiens
cacccagaagcttagtatggtcacacaatacacacacttttgataaacttaaatcttatttaccccctcatttagtgaagcctcccactttattagtattcacttttgacaaattcatgaagcaagtagctaactcctccagttgtaccacatcactcactattggatctgaacacgcaattttttttccatttagattttcttagacttagctttggtcttataagcttgtcttatctttcagacaaatttttgctgtgctgggtctacttgtccgaataagttttctctgtgttcacttggttcttcattcaatttaaccaaattgatcagttactctagcattattttgttgagtaaaacgtttggattatagctccaagtatgccacacaataaaaatgatgacactcatytgtcctattgcctgagacttttagtagttgaataaatttaagataattaatgctatcttaaccagccaactaataaatgaacacaattcaatggactaagtcactttgaattacataggcatacaagatacaaattcaattatcttctgcatctcctcctcttcaaagcctgcatataatctttgtgagcagagatggtacaaaagggggatggtacaaaaa

SEQ ID NO: 721474 - DNA, 684 bp, Homo sapiens
ataattattttgtatttaaacatgtatgttgttttctggagtgcaaacaagagttattcatgaaattgaataattcttctcccctgctttgaacatcattaacatctatgtggaaataaacacatgttttggaatggaataaaatggtgcaagggatttggcaaccatcaagtcatttagaggaaaacttcccaccctactttggggcccaaattatttagtttctttttattaaaggaattgggcaactgccaaatctcaacttcattttgtgttaaattaggtggacccagcatttcttgctgccctttgttgcatatcatgtgtacagagctgaggcaggaaaaagtatctgaaggtaaataatagagtagggtgagaaaggcttgtaccatgtggatacagccytgtttctctagttacgtcaaatttagtcatatttcccagttacaaaaaatgagtttgtgtcattgtgacaagtccactttgtaatatgcatcacacaatattatatttccccatcccatcaaattacctgaataaatccaaatccttgaaataggaattaaccagtcaagccttaatggtatttagaaagatttctaaatatacaattcataagaaagaatgcatgacatattttgtagaataaaaatgaacagagttaataaaacaagaaaatga

SEQ ID NO: 721475 - DNA, 598 bp, Homo sapiens
ttttaagtccctttgagtaaggctgtatatttttagatattttagtgtgaatcaaacagacactgcaatatgtaaatgaaggtttgagaaaacacacatgtcataattatgactaacacctttytcagtgataatctgtttacatggagatagagcatcaattatagctcatgaataaatgaaataaatagcaactatagagcaatgagaatttccactcgttcataatgagctgtttttctgctgaagctgtgtatttttctttataccttacctaaagcttattttacaagctctttatgcatattttttgactgaggaggctaacaaagctggacctttagttccctaagctggtttttgtacatctcaaaataagacatgatcagggtttgaagtaatagattaaccttgtcgatagaaccaacctgtatacatggtttgctgtggagtagcagtttgcagaataggctctgttttggagctcatcttaaaacttgtttttctctgactgataaccaaaagacagtatcacaacaaagacactggtcttagtcctcgaagcaacattaaaagttggtgtggcttcatgctagaa

SEQ ID NO: 721476 - DNA, 658 bp, Homo sapiens
taaaaagcaccaggatccattttataaaagttttttaaatataataacagtcaacataaaaatagattatctcatagaaggcatgcagggcatactaaacactataaaatataattgtaacaatgataataatactgtaaagctaaaatgttttaaaattaggaatataaattcatcctgtaatgtacaaaattaacatatttcaccatgttgtcactggtttatcttttactttagatcaaaacaaaagttcaacattatacataattacagctattcaataaacattaatactaaaacatattgacttaattctcttttaataaggttaygatatcagccaaatataacacatgtctcatagatggaaattgaaaaagaaaaaaatacattaaagcataaaatgaaacccataactcttggctcaaaatgcattatatgtcagagtttgaggaataaatttgtttgttgaaaacgtatgaaatatacaggaaactacataactctactgcttttaactattatttactattaactataaatgttaatattttaactattaacatttcattactcacattaaaagagctttttttccttttttttttttttttaaatttgcttgcttgttggcttgttgctaatgttctagaaagta

SEQ ID NO: 721477 - DNA, 658 bp, Homo sapiens
taaaaagcaccaggatccattttataaaagttttttaaatataataacagtcaacataaaaatagattatctcatagaaggcatgcagggcatactaaacactataaaatataattgtaacaatgataataatactgtaaagctaaaatgttttaaaattaggaatataaattcatcctgtaatgtacaaaattaacatatttcaccatgttgtcactggtttatcttttactttagatcaaaacaaaagttcaacattatacataattacagctattcaataaacattaatactaaaacatattgacttaattctcttttaataaggttacgatatcagccaaatataacacatgtctcatagatggaaattgaaaaagaaaaaaatacattaaagcataaaatgaaacccataactcytggctcaaaatgcattatatgtcagagtttgaggaataaatttgtttgttgaaaacgtatgaaatatacaggaaactacataactctactgcttttaactattatttactattaactataaatgttaatattttaactattaacatttcattactcacattaaaagagctttttttccttttttttttttttttaaatttgcttgcttgttggcttgttgctaatgttctagaaagta

SEQ ID NO: 721478 - DNA, 658 bp, Homo sapiens
taaaaagcaccaggatccattttataaaagttttttaaatataataacagtcaacataaaaatagattatctcatagaaggcatgcagggcatactaaacactataaaatataattgtaacaatgataataatactgtaaagctaaaatgttttaaaattaggaatataaattcatcctgtaatgtacaaaattaacatatttcaccatgttgtcactggtttatcttttactttagatcaaaacaaaagttcaacattatacataattacagctattcaataaacattaatactaaaacatattgacttaattctcttttaataaggttacgatatcagccaaatataacacatgtctcatagatggaaattgaaaaagaaaaaaatacattaaagcataaaatgaaacccataactcttggctcaaaatgcattatatgtcagagtttgaggaataaatttgtttgttgaaaacgtatgaaatatacaggaaactacataactctactgcttktaactattatttactattaactataaatgttaatattttaactattaacatttcattactcacattaaaagagctttttttccttttttttttttttttaaatttgcttgcttgttggcttgttgctaatgttctagaaagta

SEQ ID NO: 721479 - DNA, 658 bp, Homo sapiens
taaaaagcaccaggatccattttataaaagttttttaaatataataacagtcaacataaaaatagattatctcatagaaggcatgcagggcatactaaacactataaaatataattgtaacaatgataataatactgtaaagctaaaatgttttaaaattaggaatataaattcatcctgtaatgtacaaaattaacatatttcaccatgttgtcactggtttatcttttactttagatcaaaacaaaagttcaacattatacataattacagctattcaataaacattaatactaaaacatattgacttaattctcttttaataaggttacgatatcagccaaatataacacatgtctcatagatggaaattgaaaaagaaaaaaatacattaaagcataaaatgaaacccataactcttggctcaaaatgcattatatgtcagagtttgaggaataaatttgtttgttgaaaacgtatgaaatatacaggaaactacataactctactgctttkaactattatttactattaactataaatgttaatattttaactattaacatttcattactcacattaaaagagctttttttccttttttttttttttttaaatttgcttgcttgttggcttgttgctaatgttctagaaagta

SEQ ID NO: 721480 - DNA, 591 bp, Homo sapiens
cccactccccataatttaatattggctgacatttttcttatcttcaggatagaattcctcctccgttaacaacctgccagtcccagactgggggaatgtcaaactccccttgtatcccttgtatcttttgtataattttagtttgacttttgtcacaagtacgatttctgtattggccttaatatatttacatgttcatctccagcattgttgtgtgatgccctgtagccttagtttgtgattcttggcttagattttttttaggattcatgcctctctcccatccycaaagttcgtgattaaccaggttttaaaatagttctgagtcatgattttaaaagaaaagcgaaagaagaaagacagaaacaaagaagtattgaaagtagttgactttaatttagtgcatcaaatgtttagagttactgtcctgaaaggaattctataatccccatgcattactttgttcctggaacattataagaagagaaaaaaatatctgaaaaataaattatataagacttgcttcagaataagcatgaacttgaaaaagcttgataacgtctcagttgaataaaggatattaaaatattg

SEQ ID NO: 721481 - DNA, 493 bp, Homo sapiens
tgggcttcatccctgggatgcaaggctggttcaatatatgcaaaacaataaatgtaatccagcatataaacagagccaaagacaagatgtatattttcatattttcaagtggggtttgggaaggaataagaagtaaatatatgtgtttagtctgtcaccttagactgaaagctttgtaagctctgtatagcaaatgctgttagtttattaaactcttgcatggtctctttcctaccaaacatatgctttttctcttctattgttgatgaattaatattagagattttaaaaaaatgtttaacattatggtattgactataaatatttctttttatcacttctraatctttagcgtctttattatgttagaaccattaacttagcctggccaagatggtgaaaccctgtctctactaaaaatacaaaaattagccgggcatggtggtgtgcacctgcaatcccagctacttgggaggctgaggcaggagaattc

SEQ ID NO: 721482 - DNA, 793 bp, Homo sapiens
  misc_feature 3, 4, 5, 6, 7, 8, 9, 10, 11, 12, 13, 14, 15, 16, 17, 18,19, 20, 21, 22, 23, 24, 25, 26, 27, 28, 29, 30, 31, 32,33, 34, 35, 36, 37, 38, 39, 40, 41, 42, 43, 44, 45, 46,47, 48, 49, 50, 51, 52, 53, 54, 55, 56, 57, 58, 59, 60,61, 62: n = A,T,C or G
  misc_feature 63, 64, 65, 66, 67, 68, 69, 70, 71, 72, 73, 74, 75, 76, 77,78, 79, 80, 81, 82, 83, 84, 85, 86, 87, 88, 89, 90, 91,92, 93, 94, 95, 96, 97, 98, 99, 100, 101, 102: n = A,T,C or G
atnnnnnnnnnnnnnnnnnnnnnnnnnnnnnnnnnnnnnnnnnnnnnnnnnnnnnnnnnnnnnnnnnnnnnnnnnnnnnnnnnnnnnnnnnnnnnnnnnnnncttttcaagtagatatttattaaatatttattgactgaatttctcagtgatcttttgcttctgtggacaaagaaagaataattatttcatttcttttttktgtgtatatatatatatatatatatatatgctttatgtactaccgtcatttacaattttatagaaaataatgaatgtatagagtttatatttggattcaactaaaatttgcttgctatttaaaagactgtcaatagaaattaaagttagggcttttgaaaataagcctgatttaatatacttaagcctcatgaccagtttttaaaactcttgagaaacaacttggaaatatcatatattatgcacagcctaagattaaagcacccatgtttctctctcgaactcttctggaatgtaaagcattcaagatttattgataaaaaagtaagtggggccaggtgtggtggctcacatctgtaatcccagtactttgggagactgaggaggctggatcacttgaggtcaggtgttcgagaccaactggccaacatggtgaaaccccatctccactaaaaatacaaaaacttagctgggtgtggtggtgcacaactgtaatcccagttacttgggagattgaggcaggaaaatcacttaatcccgggaggcagaggttgcactgagctgagattgcatcactgcactccaacctagg

SEQ ID NO: 721483 - DNA, 2174 bp, Homo sapiens
tttccaggctagctgataaattaccttaaatgttacaacaaattgcacaatgtgaccctcacccattatcttcatgctctgggaatctgtgatagtaaaaacaatgcatagccaatctatagcttatatcaggagttcccaaccctcaggctgtggaacagtaagcgtccatggcctgttaggagcagggccacacagcaggaggagagctatagcccagtgagcattactgcctaagctccacctcctgtcagatcagcagtagcattagattctcatgggagcaggaacacattgtgaactgtacatgcaaggaatctgggttgtatgctccttatgagaatctaatgcctgatgatctgaggtagaagagtttcatctcaaaacaatccctcggccaggcacacctgtaatcccagcactttgggaggctgaggtgggtggatctcctgaggtcaggagtttgagaccagcctggccaacatggtgaaaccccatctctactaaaaatacaaaaattagctgggcatggcagcacacgcctgtaatcccagctactagggagactggggcaggagaatttcttgagtctgggagatggagattgcagtgagccgagatggcaccactgcactccagcctgggcaagaagagcaagactgtgtctcaaaaaaaaaaaaaaaaaaaaatctctcccacaccccaatgtgtgaaaaaatttctcttccacgaagctagcctctaatgccaaaaaggttagggaccactggcttatgtcactttaatgaaccaaggtaaattcttggtgaataacttaagatcttcccccgtccctttttttgtttgtttaaaaacccaccgtctctgttgttaatcagagattaatctgagataacaatatatctagggcaacttgaatctatgtctcccaggttgcagtcctcaaagttggcccaaataaactctctacttatgttaattttgtctcagtttcttttctttaggtagacakgtaaatcaagttgatgtggctacataatataaacaaaacattatgtggctgataaagtaagtgtccttgaaaacattttaataaaacttttggttaggtcacaaaatcatcagattgaaaagtcacaaaaagataaatattcttactctactaccatgtagaaccgcttatgcatatgttcatttatttattcatttgcttacttacgttatgatgaccccttccccttgactggcttccaattggccacatgataaatttcaaaaccttgtgttgctatataaagtgctcttcatcatttgatctccacatacttcttcactctcatatcttgtcatttttccctgtctgtttcccagagcccacagtcttccaagcaggtcagcagcccaaataaatcatgcttttgcttctgatttgcatgctttttctgtttttggaactactttctgggtttctgtcttcaggactcagtttagatctgactttataagcctctcctgaacttagagaaatcttagagcagaatggataagagtgaagatccttaagtcaatgaaactccagctatttcagttctttttattaaaaaaaaaaaaaaaagaaaaaagaaaaataaataataacagtacctcataggatttttgtgagaataatttgggatgatatatgtaaaatttttaatgagtaccataaaagtgctagctgctacttctacctctatcactatatcaatgctttctagaatataaggggtgtagaaagaattatgggagatgaagctggaatggaaaatggtgacaattctcactggagtctgaagaagaaaattaaaggaaagcaacatgctgaaggtcaggcctggattcctcagaccagggatgggaggagcaagatttgggtagaatattaggaaggatcatcatgggcctgaatttctgctgctgctgctagttctctgcatgctgaccaaaatttatgattatgttgtctctaaaaacatgtatagtctcatgttcatattacatccaatttagtcttgtttgaaaagaaagtacagaaaagtcttctatcaaggaaagaaaaatgagtacactggcagcatttttctacagtatattcctcagagacctagtcccctgagatgttccttgaggaaaaa

SEQ ID NO: 721484 - DNA, 2063 bp, Homo sapiens
taaacttgtgaatatataaaagagtgctaatgacactctctatcggcccaaaagacttagccatcttcccagatgcaacagtgacagtaatagtgtctcatccaaaactgggcagaagcttacactaaagtgaaatgatctgtggttagtttcctgtctagttgtttgaacacaactctgaactcagtatttatagagaacttagttttgggccatttacatttgaagatattattgatttaaccagatgctccaaaccaagggagttttttttttagtagtacaaaatataatcatttttgctaattcttatactctactttcatataaaataacatataacttgttattttagttgcctggcttaacatttagttcatttattctgtgttccacagtaaaatttctttgttacttgggagacaatggtaatagatatctttaattttctaccccaggttattcttgtttagtatagcttaaataaaaatatatgaagcagacaaatattgaaaatatattgtttgtcacattgtaagatattacctatattataagttgattttggaaataattacctaatcacctaacttgaataccatttacttagagaatgagatgtgttctctagctagagacagacaattatgttcttcaaaaagatgaagaggatcaaaaaattatataacagtttggtagcatggtaggcatctggtagaagagaaaggaaaaaacactaggcagagggtatagtatatgtaaagaaacaggggaatgaaattattcatggaacttttagaatataaggggatattttttgggctattgtagaatatgaagttagtatcgtagatagtgtcttgaacatgaatgccttaaatggcacataaggaaattggactctactgaaaatggtgaagaagcataaatgaatacgggaagttactgattaaattgcatttaggggcagtcattttgcagtttaatgagtggattagagtatagtatgaatgatggccaagaaatcatttagcaaatgttctaatatttctggtgagagacaatgaatggttattaccatgtcagtggcattggtattttagaggagaggactaatgcaagtaagattgcatataataagtataaccataattggatyccccaattcatctatgcaagtacaaagtacaagtacaaggaaagacacagcttagcatcaaatcccatgaccaaagtttggagagtgtagagaaattgtcactagtgaaatacagctttgaaaacaggttatgttaatttaggttgcattattattaatagaaatacattttctgaaattagcaccatggtggtccagtatctgctgtattttagtctagccacacctaatgtattgagttttattctggccctgcatttagaaatgatgtcaatatactggagctcataaagaagagagtgactaaacgacttgagtttttttggtatagaagtgtgaagactctgggtaacatactaccttcatatatttgaaggtatatcaaatagatttatttgatttcattacaagataattgctaggtacttccagagagatagatcttagtttaatagacatttcttaggtgtctatcatatgtgaggcactatgttaagttttaatgatacaaaaatgaaataaagatggtccttccctcaagtaactagctcagagtttaatggaatagaaataatgaagaactttataagaggaacatttttccaaagataaatttggtttttagaggtggtaaaaggagttgaatacaacataggtggatgtttgaacaatctctaacattcttttttttttttttgagacgaagtctcactctgttgccagactagagtgcagtggtgcgatttcagctcactgcaacctccaactccctggttcaaacgattctcctgcctcagcctcctgagtagctgggattacagacatgtgcaccaccacgcccagctaatttttttgtatttttagtagagacagggtttcatcatgttggccaggacggtcttga

SEQ ID NO: 721485 - DNA, 987 bp, Homo sapiens
tttgtacttartgggagtactgacagtttgtactgacagttcttcactagcagcataatttggttaggtcggagatggcagcaattcctggaaataaattcagtactaaaagaaatgtcagttttgaaagggttttaaatgggaagaatttcagaaacttttatgtaggaaataattttctcttaaggatgacctaagagaaagtaaggccagggataggtatcattgtattactagacaaagaaactaggagaatttccacgcttaacccacaaaccaaggtcggctatgagagatcttgccctatgtcatacaaattaacattaacaacagacagagaaaacaaattcaggattctatcttctgggtctgttacttgagacagcatttcctctcttaagcatttctgaaagataattatcaggataacaagaataaattctcaaaaacatactcttacgctgagcatgcaaaatgggtaactgtgtatgcaattgtaaattatacaactgaagtctgaaaaaaaatgtctgtgtacttacttcatctgttaactcaagggaaacagtaagatttaaaaaccctaaatgtggaaaatattattataatcatttctgggtgcctcatgaagataggcaggctgcctaagtcacaaaaacttcaagggaaaaaacagttgcaaaattaaataattttctcctctgaccactgcctatctaacaatgagaataatctgcaaacaaacacactcggattctccctctccctctctctctgtgtcacacacaaacacacttctggacactgacgtattccgttggctatgttgctgctgtgatgtggtaaaatatccctgagaattaagagaaactggggattccaaaatgtaagagaacaagacagaatttgccttgtctttccagtcctctctatatacattttttctatcaatcaatccctctctgagagagagccacttctgtcagg

SEQ ID NO: 721486 - DNA, 652 bp, Homo sapiens
atggaaaatatttgctgaccaagatctatatcgtgctgtataaaggaaatgatacaatgaatgtgaagggctcacaggtgctaaaaggggggctgraagggaattgactgcttttgtgcttccctgtgacttatcaaggtctttgggggcacaaggaggtctctggagaccagaagtatgagaccagcctgggcaacatggcaaaaccccatctctaaaaaaaaaaaaaaaatagctgggtatggtggcgtgtgcctgttttcctagctactcaggaagctgagccaggaggattgcttgagcctgggaggcagaagttgaaatgagctgcactccagcctgggctacagactgaacaacaacaacaaaaaaatcccttcacgaaagcctgatattgcataatccatggttctcttcctaaaaattaaatatgtatgtgttattttgaggaaaataatttactgagtaaagctctaaatagtggagatagctgctgtattcttttagatttttccttggatgtgcatatgatacgtgtgtttagggttaatctcattgctattccttaatgctttctccaaaagttatttaaaacataattaagataatatgctagattgccgcaaaaaataaggaaatgaataagatggtg

SEQ ID NO: 721487 - DNA, 652 bp, Homo sapiens
atggaaaatatttgctgaccaagatctatatcgtgctgtataaaggaaatgatacaatgaatgtgaagggctcacaggtgctaaaaggggggctggaagggaattgactgcttttgtgcttccctgtgacttatcaaggtctttgggggcacaaggaggtctctggagaccagaagtatgagaccagcctgggcaacatggcaaaaccccatctctaaaaaaaaaaaaaaaatagctgggtatggtggcgtgtgcctgttttcctagctactcaggaagctgagccaggaggattgcttgagcctgggaggcagamgttgaaatgagctgcactccagcctgggctacagactgaacaacaacaacaaaaaaatcccttcacgaaagcctgatattgcataatccatggttctcttcctaaaaattaaatatgtatgtgttattttgaggaaaataatttactgagtaaagctctaaatagtggagatagctgctgtattcttttagatttttccttggatgtgcatatgatacgtgtgtttagggttaatctcattgctattccttaatgctttctccaaaagttatttaaaacataattaagataatatgctagattgccgcaaaaaataaggaaatgaataagatggtg

SEQ ID NO: 721488 - DNA, 602 bp, Homo sapiens
catccatggacctgctttggtaccggctgcagtggtgacccttcagccaggcagagttcttcgaaagaagagaataaagccttaatcctgtcctctgcccagttgattaatgaatcaaatggctttgtccttagttgaaacactgaatttatgccctccaggttcttgtcagtgaataaaaaaagaattctgttttctaatcctcctgaaatgcccagtggggagaaatgatatttatggaggattggctgaaggacatgaagtccataaattcccctggctagtttacattttacccttggatcaaaacaggctactggcgagcaatatattcgagctgttttgaytgggcccctctgtggaattgctttctgctaaattgatttttgctatttttcatttttaattgaattaaagataatggtaataaacagacacatgaattggtttgtgtacatgttgtgggggaagagagagaaagagccattctaatgcagattcttgagttccacctccagtgactctgattcatgtagggcccagtactctgcaatttaccaaactccctgagtgcttctgatacaactgggctgtgtggcaca

SEQ ID NO: 721489 - DNA, 602 bp, Homo sapiens
catccatggacctgctttggtaccggctgcagtggtgacccttcagccaggcagagttcttcgaaagaagagaataaagccttaatcctgtcctctgcccagttgattaatgaatcaaatggctttgtccttagttgaaacactgaatttatgccctccaggttcttgtcagtgaataaaaaaagaattctgttttctaatcctcctgaaatgcccagtggggagaaatgatatttatggaggattggctgaaggacatgaagtccataaattcccctggctagtttacattttacccttggatcaaaacaggctactggcgagcaatatattcgagctgttttgactgggcccctctgtggaattgctttctgctaaattgatttttgctatttttcatttttaattgaattaaagataatggtaataaacagacacatgaattggtttgtgtacatgttgtgggggaagagagagaaagagccattctaatgcagattcttgagttccacctccagtgactctgattcatgtagggcccagtactctgcaatttaccaaactccctgagkgcttctgatacaactgggctgtgtggcaca

SEQ ID NO: 721490 - DNA, 680 bp, Homo sapiens
ttttttgttgtcgttgtcgttgtcattaagcaatctagtaaggtggatattattatcccccttctacaaaacaactgatactccagggagccacacaaccagttggcagcagagtcagggttcaaakataggcgtgtctgaccggcagcctgtgttcctatcacatgttatctttttttttttttttttttttgagatagggtctcactctgtcacccaggctggagtgcagtagtgcaatgttggctcactgcaacctccacctcctaggttcaagtgattctcctgcctcagcctcctgagtagctgggattacaggcgcccatcaccaaactcggctaattttttgtatttttagtggagatggggtttcaccatgttggccaggctggtctcgaactcctgacctcaaatgatccacccgcttcagccacccaaagtgctgggattacaggcatgagccaccgtgcctggctcctaatcacacgttatcatttggtctcatcacaccaatatttactggatgaatttgctggggagatgatgatgaaaaagattcctatctatagagtgaagctaaagcgtgtaagaacagaagagcctgaaaaaccatcagcaaagacttacacaaacatctcacattatgaaatgtcccgctgggcaataaagcttgattttgt

SEQ ID NO: 721491 - DNA, 680 bp, Homo sapiens
ttttttgttgtcgttgtcgttgtcattaagcaatctagtaaggtggatattattatcccccttctacaaaacaactgatactccagggagccacacaaccagttggcagcagagtcagggttcaaatataggcgtgtctgaccggcagcctgtgttcctatcacatgttatctttttttttttttttttttttgagatagggtctcactctgtcacccaggctggagtgcagtagtgcaatgttggctcactgcaacctccacctcctaggttcaagtgattctcctgcctcagcctcctgagtagckgggattacaggcgcccatcaccaaactcggctaattttttgtatttttagtggagatggggtttcaccatgttggccaggctggtctcgaactcctgacctcaaatgatccacccgcttcagccacccaaagtgctgggattacaggcatgagccaccgtgcctggctcctaatcacacgttatcatttggtctcatcacaccaatatttactggatgaatttgctggggagatgatgatgaaaaagattcctatctatagagtgaagctaaagcgtgtaagaacagaagagcctgaaaaaccatcagcaaagacttacacaaacatctcacattatgaaatgtcccgctgggcaataaagcttgattttgt

SEQ ID NO: 721492 - DNA, 1468 bp, Homo sapiens
cccaacccttggcagggcctaaggctttgctcatgacttttagaacagagagcactagcaaaggctacttctgagttctgcctctagtgctgaaaattaaaacggcttgggaagtgttcagcctcactaccccagctacatccctgtcatctaattacctgccttcaaagcctccacacggcaggtatgaggatgtaagagttgccattacccccacggaatgtggtgggactagatacagatgagtctgtatcttcagacttcagagctgctggtgtatggagaaaatcagtcagcctggaggccagacctaaaggcccagccttgtgccttttgttgtcagaaagaccacctgagagcctaggttcacagaggaccaaggcaaggaaggtggccttgaagtactaatgcttggtaattattgctcctgcttctccttaaaaaaaaatttttttttttgagacagggtcttgctctgttgcctaggctggagtgcagtggtgcaatcacagctcattgcaacctcaagctcctgggctcaagtgatcctcctgccccagcctcccaagtatctaggaccacggtatgtgccatcactcctggctaattttttaccttaatttattttgtagagatagggtctagttctgttgcccaggctgatcttgaactcctgtcctcaagtgatcttcctgccccagactcccaagtagctaggacaacaggcatgtaccatcatgcctggctaatttttaaattttatttatttgtgtgtgtgtgtgtggatggggttctcacgatgttgccaaagctggtctcaaactcctgggctcaagtgatcctcctgcctcagcctcccaaagtgctgagattacaggcatgagactctgcatctggcctgtacttctctttataccactggggcttaaggctccccacaactccaggaggaaaggatgctcaaccttatcattactcaggtgagactgccaggtggaggatatggacaggggtggggcagagtgggtagagtgagagcttgcccttgccgttctctcacttctatcttggggcagggatgtggggaggcctgaaagggcctaaatgagaggcctctgcctggactagacaaggaagagcaagcctagagcagaaggaggagttctcagaatcttttaaactaaatgacttctataaagcaaacagatgcacattcatttgtaactattacataaagttgactgttactattttatagtattggacctgaaggggtacgtaatacatgtttacagaaggagagagagagagrgggggagagattgaggccagatagcaaggcactgcaatttcttacaaaggactggactgagcgaggcactgtgttatgttctcaagtgtgctgatttatcaaatgctcactgccacccaaggcaggcaagattattatattagtctgtttttatgc

SEQ ID NO: 721493 - DNA, 1102 bp, Homo sapiens
tttctctcctgtgaaataggagatagtcctgaaccctcaggttgctgtgaggatcctggacatagaacaccaggcatggaataggagcttgataaataaatgtccatttatgcatgttatttgaaagagttgggaagtattaggttggtgcaaaagtaatactaggttgatgcaaaagtaactggtgaatatttaatacttggctacgttggtttcctgttgctgctgccacaaattatcataaaatcagtggctgaaagcaacacaaacatattttttaatcattccggaggtcgtaattccaaaacaagtcttgtggggctgaaatcaggccattggcagggctgcttccttgtagaggctctccggaagaatgagcctctacatctttcccatcttccagaggcagcgcttcttccttggctcatggttttgcctcacattttctccctcttcttcctttgctcctcttgcctctctttcataaggatccttataattatatctcaggctcacctggataatccaggaggattccccatcacaagatcttttatgtaatcacatcttcaaagtcccttttgccatatgaagtattatgttggtgtgaaagtaattgcgatttttgccattactttcacacaaacctaataacagtcactgattccagcgattagcacctgcaatctttggcggggctggggcattattcagtctaccacagtgactaaagtcattagccactctgtaaataaactcctcaggtcaccaaggaagaaggattggctttggcccaagaattcagctgtctcttgtttgagacatctgctgcacaccactactacattgatgatattttccatgcccttgcacgggagatacgtaggaaagaaaaagaaggcagcactggccatggagaaaaaaatctaagcccaaaaacggtgtatggaagaggctaaaatcaccattccagaaaaagaaagattcagtaacttgaagggaagatatgaagtgtttatctgcgaaccacagtgctttgtcaaagcagtccagtaatgcagtgctttatcaaagctatagtgagmatggtgcttgctcttcc

SEQ ID NO: 721494 - DNA, 639 bp, Homo sapiens
tgtgtgtactgggattctactgccagtgaatgttatttggataccacttccttcctatgaatgatccctagttaccgcaggattagtgcacatactgtgtgtgtgaataccatatccactattgttcaaagtatctttagcagctactaatattactagggaatatgtatatgcttaaccttataaattcatgcacccattttccagcgaacaaaagtatattaagtaccagccatgcactaaatttagtcctcagaatgagaaataacaatgaacaraacaggcatgatttctgagctttccacatctacagacttgttctatacaaagtctttatggaatgatgaggagctgttacgtaattcagatagctccagatacccaagatatgcccctgaaattactaagaaagtggacctgaaactattcccaaacaaaagcactggaataactgtgatctgcatcatgggcactttggaattgcgtgtatgaacgtgcatatgtgcatgtgtgtgtgtgtactcatgttaaaggatatagaatacacccagaatcttggttgaaaggcagaagacccaaagccttctgaaagaaagcactggaaatggcgtatttttatgtgggggcttctcaaaatat

SEQ ID NO: 721495 - DNA, 1557 bp, Homo sapiens
tgtgagaattgttaagtgggaatatttcttctttcacttctttgtatttgtttctattctttggtaaacataataatgttgaggaaatattttgataatttattgggtacattatttatttcttattttggaagccttggagctgaattcaggcttctctaaatggcmtatatatttaactttataattgcaaaatgttcccccttttaaacagtatattgtaaatctgaaaatacagtttatacttctttcaatatactttcaacaaaaacattagatttcctgccttgctagtgagtatatttaaatattccataagttttcacaagcactcttgaaaaatggtctacttttttataataatattgataattttgttaatattgctagcatacaaattgagttatatttttagtaaagtaaaataggtacagttggaattatccttatttctaaatgctacttattttttaacagtattcatgcatatgttttcaaaagctaaatgacacaaaaaagcttaaaaccaaaaccatttcctcattttgtcggtgggggtggtgatcaggagtggtgggttttcctagtgggggccactttgaatattcacatttctaagccatatactaatgctctaatttctaatatctccattctatacattgtttgctgtcttccagagtgcaacttgaagattttgtttctttgtattattataatgcctttgcatctttccctagtatcttgatttttgattaattgaatttttgcactgttgattgggactatgtaaatattgttaactgctgagccaaacagtatattatttttattaaatattattctttacatacttttttctgggcatttacctcttttttgcattcctattttttgtgtactcaattttaattttatttgtacattttccattagcgtctttaatacagttttctatggggtttaaccaattatcagtcagagttgttcattaggccatgctcccggattccttctgtactggtctagaccagttgctctctatacctgttttacacctttgcttggcttttcatgttcttgggaattccctttgctttgcttttatattgagtccctggtttcctggattccattataactctttcttggttttatctctagatctccagtagcttccactgaaaaggtgaggagaggtaactgtttagaggtacttcattcccaaaagtatttttattttatctttgcatttgattaacggtttgtctgtaaaaatttgggctaaataccatttcctgtcagagttttctttatccctagtgctgtgacatttcagaataggctgtgatatcgttttttttctactgatgctaaaaatgtcctttcaatttgtagacatggatcctttagcacagggtaatttcttgtataattttttgatcagttttctacatttctgataatgtattttctttcaggaactcctgttaggcaactgttaaatctcttgaaaaattctcttaattcttgcaggcttttgtttctgatttgttt

SEQ ID NO: 721496 - DNA, 1557 bp, Homo sapiens
tgtgagaattgttaagtgggaatatttcttctttcacttctttgtatttgtttctattctttggtaaacataataatgttgaggaaatattttgataatttattgggtacattatttatttcttattttggaagccttggagctgaattcaggcttctctaaatggcctatatatttaactttataattgcaaaatgttcccccttttaaacagtatattgtaaatctgaaaatacagtttatacttctttcaatatactttcaacaaaaacattagatttcctgccttgctagtgagtatatttaaatattccataagttttcacaagcactcttgaaaaatggtctacttttttataataatattgataattttgttaatattgctagcatacaaattgagttatatttttagtaaagtaaaataggtacagttggaattatccttatttctaaatgctacttattttttaacagtattcatgcatatgttttcaaaagctaaatgacacaaaaaagcttaaaaccaaaaccatttcctcattttgtcggtgggggtggtgatcaggagtggtgggttttcctagtgggggccactttgaatattcacatttctaagccatatactaatgctctaatttctaatatctccattctatacattgtttgytgtcttccagagtgcaacttgaagattttgtttctttgtattattataatgcctttgcatctttccctagtatcttgatttttgattaattgaatttttgcactgttgattgggactatgtaaatattgttaactgctgagccaaacagtatattatttttattaaatattattctttacatacttttttctgggcatttacctcttttttgcattcctattttttgtgtactcaattttaattttatttgtacattttccattagcgtctttaatacagttttctatggggtttaaccaattatcagtcagagttgttcattaggccatgctcccggattccttctgtactggtctagaccagttgctctctatacctgttttacacctttgcttggcttttcatgttcttgggaattccctttgctttgcttttatattgagtccctggtttcctggattccattataactctttcttggttttatctctagatctccagtagcttccactgaaaaggtgaggagaggtaactgtttagaggtacttcattcccaaaagtatttttattttatctttgcatttgattaacggtttgtctgtaaaaatttgggctaaataccatttcctgtcagagttttctttatccctagtgctgtgacatttcagaataggctgtgatatcgttttttttctactgatgctaaaaatgtcctttcaatttgtagacatggatcctttagcacagggtaatttcttgtataattttttgatcagttttctacatttctgataatgtattttctttcaggaactcctgttaggcaactgttaaatctcttgaaaaattctcttaattcttgcaggcttttgtttctgatttgttt

SEQ ID NO: 721497 - DNA, 615 bp, Homo sapiens
cttctttctcttcccttcccttctggacatttcagccctaaaactattctatggagcagagcaatgtagggggagaaggagtttgatcatttagtgtagattatcagagccggaacagggtgagaacacctgcagtasagagggacggtggcgactggagactggttacatataggagaattaatcatgtaagaaaatacactagaaaccatagaagccagatttctcacctctggaaaaccgagttacaattaatagaaaatgggacaactagaatgaatcatgtacaactggattggaatgaaaacatggctttcaatgtatttgcagataagtatagaaataaataggtaaatagaaatatattttagtaatatataacaaatatatctaatatctaatatagttttatatataatacataattatatattatgtgattatatgatatatataattatatattttctatatattccttggctctttccactgagaaggctcaagcaccaataccacaatagcaataagcactcttgaagcccagattttggattctaaatacaattttctgccaaaagaaaagtctctttgaaaagatggctaattccaggg

SEQ ID NO: 721498 - DNA, 3496 bp, Homo sapiens
ttgacctccttatttttttctctcttaacctacttacttagaactctttctgggaagcatgttttgggtaatgcaaacgtggggggatgggctactaaggcactacaaaaattcatattttaaaaatattggctactttatagttttttcttatactagttttattttggaagaatgcaatggtatcttagtgtgcttttttttttagcagggacagaatctttcccaggctgtattgcagtggcgaaatcacagttcacttcaacctcaacttcctgggctcaagcaatcctcccacctcacccttccaaatagctgggaccacagacaccaccatgctaacttttttgttatttgtagacaaggtcatgctatgttgccagactgttctcaractcctgagctcaagcattctcctgtcttggccttccaaagtgttgggattataggcatgagccaccacgcccagcactttgtaattctaaagttccatcaaagagtgatggcctaggttttgtgttacgtctatattatcacaaaaatatttataatctctaaacatctgtgcctcctttatgcacatgatgcattagcagtgtaagataagaagacaatatgcatttttctgtactgtgttagaggtaaattccttgtgtgataaatcgcagtcattagaagtaattaaaggaagctaaataggaattgatttggagttatataaccaaagcaagacaatcactacaaccgctcattcaattatgtctacagtgtaaaagcagcagaaattgaagatgtcttaagataaccgtgattcattagttttagcttttgctaagtagtcaaactgaaagtttgaattgctctgttctataattgaagaaaaaaaaattgggggggaaaaggaaaagaaaaagaaagaaatagaaataagatagaagacttgcccctcttttccatgttattattcctatagagtagaggtcagcaaactttttcttgaaagggccagacagtaagtatttgaagctttgtgaatcatatggtctttgctgaaactctgccactgtggcacagaaacactgaagaatggacatgactgtgttcttatactatgttatctacgaaaacaggcagctgggtagatttggtccacgagtaatagtttgcagtcccctgttgtagaggacaaaagctccccaagctatagcactagtcaggcatctgtgacagagcgtgtatcctccaatactttcggatttaagaggttcctcaaagtcaaatcttttctcacatttggtcaaccttagtgctttaaattctcattatggtatcattattttagccacttccttggtttaacacatttccacactaaatctcttctcaagcacagaacagattaacatacagtaactcattcatttattcacttctgtcagacagaacattagtagatggcctacagataaatttatctggggagttgtggaaagggtaagcctgagaaagtgtagctgagggacatctaggccttttgtgaaatttcagtcttgttggaaaagaaccagatgagaggaggggacacaaaaaaagtcaagccagagcttgccaaaattagacctcactgcttcagttttcctaagactgccttttgtctgtcagtagaatttaatttgactcaattctatttctgtaaacagagatatggaatgttgtttgtgaagtatgtttggggaggtaagagaggagacaagtggagagtggagatttataccctatttttgacacttgcagatcttttttcttattctcttatatatggaagacactaaataagtgcttcatgcattgcattacttcacctccacttctaaagagaggaaaagttatccaagttctcttttagcttttcctctcttgacctattcctatattattgctttcttttttacttttgctccttcatcctaatggccaaagtggcagaagatggggaaaatgagggagaaaaaagcaataggatatggttaggtatgagggacgaagggacaggaacaagaaataggacatttttgactttccacatttctgatcacaatttctcccatgacaggaaaacataatgactttaatctacagaaataagcactatgtttactttaaaatatcttagcaagcattggagaatattattatttaattccaagaaaataaacaggcactccaataaagacttagaaggattaatttttcatgtaattttaataagtataaaagggtatgaaaagctgtctatggtttactgtggataaatttcaacttctcaatctttaataaaagtcatcattatgcaactgaatttgtaaattctctgttaaaagatgattttgtgatcaaagtaaatgaaatacagaccgcatgaaccacatatgttcctaagcacaagtttctggtataaaatttatattgtagcaattcaaattcatcttacctgatgagtaaaaacataaagttaataaaatatctggtaagaaaataagtgtcacttatttttaaaatgatctaattttatggaacataatcatatgtttataaatgcttgggatatgaatgtctttgcccaacatttaatacagaaaatgtattacagtgaatatgagtgttatttgtaatataaacaaaacatgaaaggttaatcagaaatgccaacaaaaatatgatacataattcttccattttcctagtttcaagtttcttgcatggcctctaagctacaatacttagaactagaaacaatacaatgcagacccgaaaattaataaatgcagattttcatcattaactacaaatccctttccatatgcttacatatgttttcattttatttttaatatttttctccagaatgaattttggactttcccctccccatttgcacacggcgtaacacttagtaatgagctaaaagaatttatgtactaaatacaataacagatccaagttaatgatcctgtaatgctcttgacctgtctgatgtgatctgaagaagtgtgttttcactcgttgcacactttttctccagcagctcagagagtagcaccacagaacttttaatatgagggacttagtcttctcttcaattggctatgaacttataagtggatagaaatgacttaaagaagtcatttcatgctttctttgccataatgatacataatcatcagatgaatcctcaagaaacctcttcaagaatacagtatatagatagatagatgatagatagatagatagatagatatagatagatagatagacagatagatagttagatttaaagccgaaaaagacagaggtaatactaaatgaccttgtaaaatctattgcatcttctaatctgatctcactagccagaccccgggagcctcaacaaacaggccatagagataattctctaatgacctgattcactactgtcagcaaaggtgacattgaaatc

SEQ ID NO: 721499 - DNA, 1023 bp, Homo sapiens
atgtttgtactgtggtaggactttctccctagttcagctaaagatggggtccttgccatacagctatgtagtattaggcctgcagacactttgaagggtgagaaaaatggaatttattggaaaaaaggaaaaaaggggaaagagggaccctcagcagagtgagagtcctgctagtatatgcttcccgcgtcacagattgaattccaggttccacccaggaagaagaggggccaggctcctccccagggcaaacagagtgaacttcctgaggctccaccccagtgtgcattcctcccagcacacaggccagttgggggttctccagtgactcctttatatttggctgtctcgttacttctaaaatatttcatattcataaaataaaaatgttttaataatgttatatatttgtaaaggcatttacaatcttcaaacttctgcatgaaaaatctctcagaagtcaaaaatggatttactgtcctgatgtaaaataacctgcaaatcttactttctaattttggtgatatatgtgtaaaaagaaataaatcatctcatgaacaaaattaaaaaaaaaacaaaaactgagaagttgcggtgagttctgaggcagtacggtgtggcatragaatgcaggctctgaatctacagactgcctggttcaaatactagctctgccaaaaactagttacataaatggagcagattatttaacctctctttatgcctcaattttctcatttacaaaattgttgttagcattaagtgtgttaatacttataaaatacttcatatttatatgtatgaagtattattactgctttaaaataccattgactgatcacattattatacagtacatatcttctactgatatatgagttccttgaagtaagacctatgtcttattgctgttacatcttcaatgcatgaaacataagaaatgttcaatcagtgctagttgaattgaattaaattttttaattactattttttgttttcctttgactagataatttgtttgga

SEQ ID NO: 721500 - DNA, 1023 bp, Homo sapiens
atgtttgtactgtggtaggactttctccctagttcagctaaagatggggtccttgccatacagctatgtagtattaggcctgcagacactttgaagggtgagaaaaatggaatttattggaaaaaaggaaaaaaggggaaagagggaccctcagcagagtgagagtcctgctagtatatgcttcccgcgtcacagattgaattccaggttccacccaggaagaagaggggccaggctcctccccagggcaaacagagtgaacttcctgaggctccaccccagtgtgcattcctcccagcacacaggccagttgggggttctccagtgactcctttatatttggctgtctcgttacttctaaaatatttcatattcataaaataaaaatgttttaataatgttatatatttgtaaaggcatttacaatcttcaaacttctgcatgaaaaatctctcagaagtcaaaaatggatttactgtcctgatgtaaaataacctgcaaatcttactttctaattttggtgatatatgtgtaaaaagaaataaatcatctcatgaacaaaattaaaaaaaaaacaaaaactgagaagttgcggtgagttctgaggcagtacggtgtggcatgagaatgcaggctctgaatctacagactgcctggttcaaatactagctctgccaaaaactagttacataaatggagcagattatttaacctctctttatgcctcaattttctcatttacaaaattgttgttagcattaagtgtgttaatacttataaaatacttcatatttatatgtatgaagtattattactgctttaaaatacmattgactgatcacattattatacagtacatatcttctactgatatatgagttccttgaagtaagacctatgtcttattgctgttacatcttcaatgcatgaaacataagaaatgttcaatcagtgctagttgaattgaattaaattttttaattactattttttgttttcctttgactagataatttgtttgga

SEQ ID NO: 721501 - DNA, 647 bp, Homo sapiens
taatttctcccttgttgtccctgtgatagtgaatgagttctcatgagacctggttgtttaaaagtatgtagcaattcaccctttgctctctctcctgctggccatgygaagaagtgcttgcttcccctttgccttctgccatgattgtaagcttcctgaggccttcccagctatgcttcctgtacagcctgtgaaactgtgagccaattaaacctcttttctttataaattacccagtctcaggtagttctttatagcagtgtgagaacagactaatacaatgtcatttaataatttgactttcacttcatcctaatttccagagaactttgctcctaaattacttacatatttattattttatagggtttcatacatatgtagtatatatgtatgaaatatatatataatagggtttatatatatgagaaatacatattttgtagggtttcatacatacatatatatacacacacacacgtatgtaagatttcatatatgtatatgtatgtatgaaaacctaaaaaataatacaggcaaaataagagtaaatcttcatgatcttgggttaggcaataatatcttagataccacacaagcataagcaatttaaaaatttgataaattgtacctagtgaaatttaaaa

SEQ ID NO: 721502 - DNA, 846 bp, Homo sapiens
tgaaaggtgcacttgcatgcagcaagccctttaccatctctagaaactggctagcctttggaagggcagactctccagggttagcaaggccccagatgtgaaaacaccagaaacacatggttagttcagcctttcttcctgcaccaatccctaatagaacttccctttcctaatctccaagtagctgataactccaacacccgtggatcctacgcttaactcacaaggttgcacctcctgccagtttcttgcctggatttgcctcttctggcccctggttctcttgacgctttcacttcaccttatgtgggactggggcagttgcagaatcttctgctaacaccacatatgcctaggaaactgaggcctgaattcaggctttctgcttaaccaccgacaataaattttgttccttttctgtagtccagcaaatactggagtcctatactggtggtagtattgacccaaagtagcaaagtcaagatgacacaaacacctctgctttggaaatctccctcagctgtgtttctggagaacagmtatttgggtctgatctcctgactttctttcctctcgtccggccctttctttctctccactccaccctttccaatttatctcgtcctctaaacaccaggagagctttcctctttcctgataacatccttatttctccatactctacaccttataaaagcaacactgcggctggagtcacctggggctggcttttattattgaagctgtgaaaagtccaagagttaggtttcactgctgacgttaaacacaatggtttagtgtatgttacggacggacgtttgtccccacagtcttcatatattgaaa

SEQ ID NO: 721503 - DNA, 846 bp, Homo sapiens
tgaaaggtgcacttgcatgcagcaagccctttaccatctctagaaactggctagcctttggaagggcagactctccagggttagcaaggccccagatgtgaaaacaccagaaacacatggttagttcagcctttcttcctgcaccaatccctaatagaacttccctttcctaatctccaagtagctgataactccaacacccgtggatcctacgcttaactcacaaggttgcacctcctgccagtttcttgcctggatttgcctcttctggcccctggttctcttgacgctttcacttcaccttatgtgggactggggcagttgcagaatcttctgctaacaccacatatgcctaggaaactgaggcctgaattcaggctttctgcttaaccaccgacaataaattttgttccttttctgtagtccagcaaatactggagtcctatactggtggtagtattgacccaaagtagcaaagtcaagatgacacaaacacctctgctttggaaatctccctcagctgtgtttctggagaacagatatttgggtctgatctcctgactttctttcctctcgtccggccctttctttctctccactccaccctttccaatttatctcstcctctaaacaccaggagagctttcctctttcctgataacatccttatttctccatactctacaccttataaaagcaacactgcggctggagtcacctggggctggcttttattattgaagctgtgaaaagtccaagagttaggtttcactgctgacgttaaacacaatggtttagtgtatgttacggacggacgtttgtccccacagtcttcatatattgaaa

SEQ ID NO: 721504 - DNA, 1049 bp, Homo sapiens
tctttgagcttgggagtgttgggagggttgtgattgacagagtttatctataatattttagacagtttgccagatatcctatttgggaaactcccaactgatgcattgtaaaatgctccaatcatttatctgggaggacactaccggtctgtgtgtgtgtgtgtgtgtgttgtgtatgtgtggtaagtatttgtcatggagacatttacagtaacagtcaaaatttatcattattttttaaatrtttatttatttaattcaaattgatgtgcattgatcattattttcataggaggaataaatgctataactatgtaagcttacaattaaattttatttaaagctgccaaaaattaaatttatttaatttttaatttagaggcatataaaatttgtgtcattgttttctgattttttagctggaagagacaaaaaaagtgaggtgagattattttcttactactttctgttgaagaatttgatctcaaaattgacatggtaatataagttcatgactaaaatctggacacatcaaggtgttaatattcaaattaaaacagttataagcttttctgataaaccaaaatattagtgagtgatattgatgactatgaatattcaattgagatttttttttctaagtgatcacaaaagcataagaaatttaaaaatggagagcattaataaaaattaggttgcaggtcaaaattttgcattgtggaaaacataatatatatttatgtggtttacaactatgatcttcttgattcagtctaaccacagggaggaaaccctcccctttataacattaacttaaggccagttagaataaatgtgccatcattgtcattgtctttaatcattgtttaccgagcatttccgtaatatataccattggcttcagttcaagaaatcctggttcctgtcattggatagcttttgacctatattaaagaaatgtattacacaggagcaggataagtatgcagcatatcgtaggggacagatattgctaaagcttgttggttatgatttgctatggtcttgcc

SEQ ID NO: 721505 - DNA, 1049 bp, Homo sapiens
tctttgagcttgggagtgttgggagggttgtgattgacagagtttatctataatattttagacagtttgccagatatcctatttgggaaactcccaactgatgcattgtaaaatgctccaatcatttatctgggaggacactaccggtctgtgtgtgtgtgtgtgtgtgttgtgtatgtgtggtaagtatttgtcatggagacatttacagtaacagtcaaaatttatcattattttttaaatayttatttatttaattcaaattgatgtgcattgatcattattttcataggaggaataaatgctataactatgtaagcttacaattaaattttatttaaagctgccaaaaattaaatttatttaatttttaatttagaggcatataaaatttgtgtcattgttttctgattttttagctggaagagacaaaaaaagtgaggtgagattattttcttactactttctgttgaagaatttgatctcaaaattgacatggtaatataagttcatgactaaaatctggacacatcaaggtgttaatattcaaattaaaacagttataagcttttctgataaaccaaaatattagtgagtgatattgatgactatgaatattcaattgagatttttttttctaagtgatcacaaaagcataagaaatttaaaaatggagagcattaataaaaattaggttgcaggtcaaaattttgcattgtggaaaacataatatatatttatgtggtttacaactatgatcttcttgattcagtctaaccacagggaggaaaccctcccctttataacattaacttaaggccagttagaataaatgtgccatcattgtcattgtctttaatcattgtttaccgagcatttccgtaatatataccattggcttcagttcaagaaatcctggttcctgtcattggatagcttttgacctatattaaagaaatgtattacacaggagcaggataagtatgcagcatatcgtaggggacagatattgctaaagcttgttggttatgatttgctatggtcttgcc

SEQ ID NO: 721506 - DNA, 1049 bp, Homo sapiens
tctttgagcttgggagtgttgggagggttgtgattgacagagtttatctataatattttagacagtttgccagatatcctatttgggaaactcccaactgatgcattgtaaaatgctccaatcatttatctgggaggacactaccggtctgtgtgtgtgtgtgtgtgtgttgtgtatgtgtggtaagtatttgtcatggagacatttacagtaacagtcaaaatttatcattattttttaaatatttatttatttaattcaaattgatgtgcattgatcattattttcataggaggaataaatgctataactatgtaagcttacaattaaattttatttaaagctgccaaaaattaaatttatttaatttttaatttagaggcatataaaatttgtgtcattgttttctgattttttagctggaagagacaaaaaaagtgaggtgagattattttcttactactttctgttgaagaatttgatctcaaaattgacatggtaatataagktcatgactaaaatctggacacatcaaggtgttaatattcaaattaaaacagttataagcttttctgataaaccaaaatattagtgagtgatattgatgactatgaatattcaattgagatttttttttctaagtgatcacaaaagcataagaaatttaaaaatggagagcattaataaaaattaggttgcaggtcaaaattttgcattgtggaaaacataatatatatttatgtggtttacaactatgatcttcttgattcagtctaaccacagggaggaaaccctcccctttataacattaacttaaggccagttagaataaatgtgccatcattgtcattgtctttaatcattgtttaccgagcatttccgtaatatataccattggcttcagttcaagaaatcctggttcctgtcattggatagcttttgacctatattaaagaaatgtattacacaggagcaggataagtatgcagcatatcgtaggggacagatattgctaaagcttgttggttatgatttgctatggtcttgcc

SEQ ID NO: 721507 - DNA, 1049 bp, Homo sapiens
tctttgagcttgggagtgttgggagggttgtgattgacagagtttatctataatattttagacagtttgccagatatcctatttgggaaactcccaactgatgcattgtaaaatgctccaatcatttatctgggaggacactaccggtctgtgtgtgtgtgtgtgtgtgttgtgtatgtgtggtaagtatttgtcatggagacatttacagtaacagtcaaaatttatcattattttttaaatatttatttatttaattcaaattgatgtgcattgatcattattttcataggaggaataaatgctataactatgtaagcttacaattaaattttatttaaagctgccaaaaattaaatttatttaatttttaatttagaggcatataaaatttgtgtcattgttttctgattttttagctggaagagacaaaaaaagtgaggtgagattattttcttactactttctgttgaagaatttgatctcaaaattgacatggtaatataagttcatgactaaaatctggacacatcaaggtgttaatattcaaattaaaacagttataagyttttctgataaaccaaaatattagtgagtgatattgatgactatgaatattcaattgagatttttttttctaagtgatcacaaaagcataagaaatttaaaaatggagagcattaataaaaattaggttgcaggtcaaaattttgcattgtggaaaacataatatatatttatgtggtttacaactatgatcttcttgattcagtctaaccacagggaggaaaccctcccctttataacattaacttaaggccagttagaataaatgtgccatcattgtcattgtctttaatcattgtttaccgagcatttccgtaatatataccattggcttcagttcaagaaatcctggttcctgtcattggatagcttttgacctatattaaagaaatgtattacacaggagcaggataagtatgcagcatatcgtaggggacagatattgctaaagcttgttggttatgatttgctatggtcttgcc

SEQ ID NO: 721508 - DNA, 1568 bp, Homo sapiens
atcttattctgcctggttccatctgaaacctgctttcaagaatggcatggtacacactctataagcaaaaggtgactttacagagtaggaattctcccggttaatgtcgccttaagcgcctgttaactacaatgcattgtttaaaagctgacatctgtgattatttcaggcacarggccattgcttaatttactttggtttgattttttttttctctccgccctcccagttggcttctccagaagagtaaagccagacagtagttactgctttggaaagaaaagataagccgagcactttggaatgcatttttctaacgctccttcgccaagtgttacatgactgtatcaaatttctttagactttgataatgagaaacagacaatgccatagacaatacaaccaagagatttgtggtaatagaggatttcagaaatacacatggttctaaatggctctgagattatgtgcttaaagttctccatcttttatttttttcatgtttgagtagaccctacggttgattatcaggttgacgaagggcagaggccctgtctgctgattataaatgtgcaatgtgtgtaaaattttcacacataatataatatttcaaagttatttttatgggggctccggggtcccagaacttaaacaaagctgctaatcattggctccaagaaatacttagaaggaatcatagtttttttaacatcatatggagtcatttgcagacttttgggctgcagatcacattatgtttatttattcagctggctttggagatttgagcaatatttggaggcacacaagtctttgccttgcttaataaaaagtatactcaaaggtatcgctccagcatttttatacacaaaagattctcacaaacaggggttgatatcgaaaaaaatgtaattttgaaattaaaaagaaagaaactaaacaatcctggggaaaaacatcatccagcggtatctttcttaagaaatcttcagcaggccttgtgtcccttgtgctataaagcttgaaaatacgttattatcttttacaagaacactgtaaactgtaacttgcattattctttgtgatcatctacaacacacaagacctggctcaccttttaagaatagtcatttaacacaggatgtgtaattttgttggcattattagtagagctttatgtcacgaagtcaattcagtcttttccatgaaagaaggtggaataaatatttcatagctatggcttttgaggaacattccgcctttcgatcttgaggcagtctttcaacatgtatgccaatcagaagtctttaacagatgtaaaatacatcttgtttacttgtctttgaaaaatataaggatctcaagatgcacctgaaatattcattatgtggacaatacttcaagcagggctagaacttgctgagtgtttcaaccactgcctatttgttcaagttttttctctttttctggttttcctttttctttcttttttctttctatcttccaacatccctaatacttctaagtccatgacttgtcaaaatggctataatatacccagataagta

SEQ ID NO: 721509 - DNA, 602 bp, Homo sapiens
gaggggctgaaggcccrctaaagcactttcgtcgttgacaacattggcagtgaccttaatcagtgactctctaagctttttagcactgacagaaataaccgtttttttccactctgtctattttcatcatagacactttttcctctgatcttcagatatgatacaggtccataggtttgtagcgctttagaaatccggtcagtgtactcttcttccgtttgcattatgattcttatcaaaatcccccaaatatatatttaaggagacttgactggaaaaaatctcagaatatagaaaaatatctatctatgaacagagaaattggtcagtttaagtccattttaaataatcagtttagttaccactctttataaacctgtacagaatacgaatggctctaaattgtatactatattcattttctttaaatccataagtcttagttatttttctaaatatttgcaaggggtatgaaattcctgaaagctgaaaatggtttttgcaagggaaaagttaacagtaaatgattattttaattcgtttgatatttggaaaccataatcttgattgcatggctaaactcaatagcacccttaagtaat

SEQ ID NO: 721510 - DNA, 645 bp, Homo sapiens
gagactccttcctcttctctgattgcttcctccctcctagatgggagtctgtccatatatcccctccctttatattctatactgtccctcggcgatctcatctaacctcattgccttaatgatcacttttctgaaacttgaagttttgttttgtttcgttttaaatctctgagccttggaccacactgattcccctgctacagatcccccaataaacctctgcttctcatcatgcattattataatcctctgcttctcatcagtttgtctccatcagctgggaattccatgaggcctggactcgtagctttctaatttcaccgtggaatttctagcacagtgcccgaattgttacgagtgacttaatcgctactctcacagtttcacctcagttccaatccctctgaaaaatttcttcaatcaaactgaaatacatcaaatttcccctcctatttccattatattcaaactctgcagcttggtcattttgtcmcccggacttgggctgcccccatccaatcttcctgccccaggccctgccttgaagaccatactcatcctcagtctccatttaggccccacctcctccaaaaagtatcacccctcccgttggaagtcacctcttctgcctcctgactcccagaa

SEQ ID NO: 721511 - DNA, 775 bp, Homo sapiens
ctgagtggctccccactggtctgtctgaggccatctcagagctgcagtacagtctgaggctcttgctgaccaagcttccttccttccctctctcctttcacagggagtaggccggcattatggtttgcaggctctcccagcctacccctgccggtgtcccctttatttgacatgggcatygccctctatgttgttgctgttttctccaaatgcttcttctccagttatctcctgggataactctacttctccttcaagcctttgcttaaacatcatcttcctagtgagacctaccctgagctccattgactgtattctacttattttattcatatttatttttagctctagggcctggctctgtcacccaggctggagtgcagtggcacagtcatggctcagttcagctttcaactcctgggctcaagcaatcctcttgcctcagcttcctgagtagcttggattacaggcatgcattactgtgcccagctaaatagtcttatttattttttttcttgtagagacagggcctcactatgtttcccaggctagtctcaaactactatgtttcccaggctagtctcaaactcccagcctcaagcgatcctcctgcttcaatctcccaaagctgggattgcaggcctgaggcccagccatttaaaacagcattccgtctccgttttctctgctctggttcttttgctcagggtcctttttttctgcttgtcagtttctaacttgttataatttacttagttgtcatgcttactgtttg

SEQ ID NO: 721512 - DNA, 1817 bp, Homo sapiens
tgactaaatcccgtctgtactaaaaatacaaaaaaaaaatagccaagcataggggcacacgcctatagtcacagctacttgggaggctgaagcatgagaatcactcgaacccgggagatggaggttgyagtgagccaagatcacaccattgcactccagccttgggcaacaagagcaaaactccatctccaaaacaaaggaaaaaagaaaagctcatgtcccagagagcatagagaacctactcaaagccactgtgttcggttagcatgggggtaccccggctgcagaccacgctcctcccactggtttgggggttctgtaggatctctgcagggtgcagaaattaaccttctgtgtgagagcctgcgtaaggcggtgtcccatgtccatcttctcgcatcgtgtcccagtgtcgtctttgggttttgtcttttttctgtgaagtactttttcgtgcctcacttgtggtaagagcggaatcgttctgatgctccattaccctggaggctcgtggggactctggcggctctggtccaggcctctgcacagggggcccgtgtcacatcgcccttacacacgaagctcctaaatctcctactgcaatgttagcctgcctgccttcatcccagcccctgtgtggaaagagagacgagttctcccaggcccgggagacgctgggaccgcccagcctcactccttcacctcccagaactggaggtggagacaggaaactatacaagttgatcagcattttgggttgaactcctgggttcttctttgaaggcatgatttgtgtcgtctggtcttcttggctctgggtccagctccatgcctgcccttgttgggtcccatggaaggtctgcagctccctggagcttctctgctcagttgaatagaaaatttaggaaggtggccagaaggagcactgtttaggaacatatggagacaactataaactccctaaataacaaaagacaagtggctttggcctggaagggatttgggtggtggaagatgaacctgagaatttattcccacatctcactgaatgatcaaattgagcgtctgggttgacacggtctaggagtggtggtggacagcaccggtgtctccttcccagaaggaagttagggcagacccacagctcagaacaatagcagaccctgcctggaagcagtgtaccttgggagaagacagccacgcacagagttcactgttgaaggacatggtagttcggcactcctgcctgtccgcctctctgtgcagctcagccatgccatggccacaggagtgccgggctgttgcctgctgacctgggatgggggtgtctggcagcaagggaggccaagggctcccaaggcagtgaagcttctgcacctgaaggcttggggagagaaggcgggcgggggcgaggagaggcctaggaagccatggggggctccgcttgggcagtgtgcggcagggagcctgcccagcctgggcctggcgcaagcatctttggggctgacctgcaacctctcagggccaagggtcccctcgaatgagccaggtgctttgacccaagcccaccccaatacaagctggtcaggaggtggtgccgagccctaaccgagcagccactccctgtacctgctctgtcatctgccaggtgactttgaattcccactacactttgcagacatgatgggtgggactggttttggtgctgaggtcttttgggggtcagtgatctgcctttcgagagctgctgccctacagagtcacaggatgcctttagacctcagcacctggcacatttcaacaagacatgaactgca

SEQ ID NO: 721513 - DNA, 533 bp, Homo sapiens
tgaaatcaatgacataatgaggggccagatcttgtaaggcctcacgagccaccttaaggattttgactttcactctgaaatggcaaggggttggagggttttgaggaaaggcataatacaagtcaacttagtttaacagcattaatccagatgccgtgtagagaacagaccacagaggggcaaaggcagaagaagaggtccttttaggagaccaccataataatccaaacaagaactgatgggtctgtggaccaggatgacagcagggagctgatgaaatatggtcaaccataggatttactaacatattggataggatgtagggtccaagagracgacaaggatcgaggaatatcaagatttctggcccattcaatagaagaatggttctcccactaaaagaactgggaaagactgtgagaagcacagttcaggagcacaggggtcatagagttctctattaaagttatccacttgttagagttgcaaggaaatttgagagcctaagcacatcattttacaggtgatacaaa

SEQ ID NO: 721514 - DNA, 1032 bp, Homo sapiens
ctcagatggtgacagttggctgaagcagagtggcacttgtactcctgtagagctcacatgtgtgtccattcatccaagtcctctcctggccagcttctggtcctcatgtgactgactggcctgtgggctttgaggttggacacatgatataaatagagctcaaagagtaagctggggaaaggcaggattagaataaatcagctgaaccaaagccatttgttttgtttactatccatcaccagctagcacctctaaaaagaaagcctgagcccactcttgactctgttcactggcaaaggacagctgagcatacttaaggagttcttgcacgtgctaagagatggtcaaactcttattaaagttccaactttgtgcttctcatttaaatataatatggtgattagaacttccttccaggggccataactaatgttacaggctaatgtgatgccttgaaaaaaatcttgccatttatgggaaggggttactggacaattgacgtcttaactttaacgtaaagttcttatggactaatttttttaaaaaaagtactagatgtttattgctacattgttcatatggggatgaaaactagaaataaaggggatactcatcaacagaaggagggctgaataaattatggtacattaatactatgaaatattacgtggtattaaaatgacagattgacaggacaccagttgacctggggggatttccctaaggagcaamgctagctaagatttaattagtgcttactatgtgctaggcacagtttcaaagactttttttgtgttaactcatttaatcctcacaaccactctatgagtgaagtagcattattgccgtcttaccaatgaggaaactgaggcatgaagaagttaggcaagtcatccaagcataagcagttagtatgtggcaggtctgggatatgaacccatgcaatctggattgacatagatattttaaaataacttttttttttttttgagatggagtctcactctgtcacccaggctggagtgcagtggc

SEQ ID NO: 721515 - DNA, 1032 bp, Homo sapiens
ctcagatggtgacagttggctgaagcagagtggcacttgtactcctgtagagctcacatgtgtgtccattcatccaagtcctctcctggccagcttctggtcctcatgtgactgactggcctgtgggctttgaggttggacacatgatataaatagagctcaaagagtaagctggggaaaggcaggattagaataaatcagctgaaccaaagccatttgttttgtttactatccatcaccagctagcacctctaaaaagaaagcctgagcccactcttgactctgttcactggcaaaggacagctgagcatacttaaggagttcttgcacgtgctaagagatggtcaaactcttattaaagttccaactttgtgcttctcatttaaatataatatggtgattagaacttccttccaggggccataactaatgttacaggctaatgtgatgccttgaaaaaaatcttgccatttatgggaaggggttactggacaattgacgtcttaactttaacgtaaagttcttatggactaatttttttaaaaaaagtactagatgtttattgctacattgttcatatggggatgaaaactagaaataaaggggatactcatcaacagaaggagggctgaataaattatggtacattaatactatgaaatattacgtggtattaaaatgacagattgacaggacaccagttgacctggggggatttccctaaggagcaacgctagctaagatttaattagtgcttactatgtgctaggcacagtttcaaagactttttttgtgttaactcatttaatcctcacaaccactctatgagtgaagtagcattattgccrtcttaccaatgaggaaactgaggcatgaagaagttaggcaagtcatccaagcataagcagttagtatgtggcaggtctgggatatgaacccatgcaatctggattgacatagatattttaaaataacttttttttttttttgagatggagtctcactctgtcacccaggctggagtgcagtggc

SEQ ID NO: 721516 - DNA, 600 bp, Homo sapiens
atattatgttatgaagccttaaaggtgtattttattatgcccattaaggaagctgaagtctagatagcagttaggtcgaaagtcacagagggaatcaataccacgtttggatagaatccctgtctaaccttcttttcaaggctcctactaacctaagatgggaactacaatgagctaccagaggcctttcagttgaatcttgccatttgctgttgacttaatcaggaagcttctaagaacttctaattagtatggcattctctgccatargtgttagtggaagaatgactttgaacagacatttcaaggcttttgtattagtctgcttgggctgttgtaacaaaataccatatactgagtggcttaaacaacagaaatgtatttctcacagttctggagtctaggaagtccagatcaatgtgctgaccacttcagtttctggtgggctctcttgctggcttgtaaacaggcaccttcttgctgtgtcctcataggacagagagggaaagtaagctctctattgtctctttttgtaaggatactaatcctattggaccagggctctgtcctgatgacctcatttaacctttaattacctcc

SEQ ID NO: 721517 - DNA, 600 bp, Homo sapiens
atattatgttatgaagccttaaaggtgtattttattatgcccattaaggaagctgaagtctagatagcagttaggtcgaaagtcacagagggaatcaataccacgtttggatagaatccctgtctaaccttcttttcaaggctcctactaacctaagatgggaactacaatgagctaccagaggcctttcagttgaatcttgccatttgctgttgacttaatcaggaagcttctaagaacttctaattagtatggcattctctgccataggtgttagtggaagaatgactttgaacagacatttcaaggcttttgtattagtctgcttgggctgttgtaacaaaataccatayactgagtggcttaaacaacagaaatgtatttctcacagttctggagtctaggaagtccagatcaatgtgctgaccacttcagtttctggtgggctctcttgctggcttgtaaacaggcaccttcttgctgtgtcctcataggacagagagggaaagtaagctctctattgtctctttttgtaaggatactaatcctattggaccagggctctgtcctgatgacctcatttaacctttaattacctcc

SEQ ID NO: 721518 - DNA, 600 bp, Homo sapiens
atattatgttatgaagccttaaaggtgtattttattatgcccattaaggaagctgaagtctagatagcagttaggtcgaaagtcacagagggaatcaataccacgtttggatagaatccctgtctaaccttcttttcaaggctcctactaacctaagatgggaactacaatgagctaccagaggcctttcagttgaatcttgccatttgctgttgacttaatcaggaagcttctaagaacttctaattagtatggcattctctgccataggtgttagtggaagaatgactttgaacagacatttcaaggcttttgtattagtctgcttgggctgttgtaacaaaataccatatactgagtggcttaaacaacagaaatgtatttctcacagttctggagtctaggaagtccagatcaatgtgctgaccacttcagtttctggtgggctctcttgctggcttgtaaacaggcaccttctygctgtgtcctcataggacagagagggaaagtaagctctctattgtctctttttgtaaggatactaatcctattggaccagggctctgtcctgatgacctcatttaacctttaattacctcc

SEQ ID NO: 721519 - DNA, 600 bp, Homo sapiens
atattatgttatgaagccttaaaggtgtattttattatgcccattaaggaagctgaagtctagatagcagttaggtcgaaagtcacagagggaatcaataccacgtttggatagaatccctgtctaaccttcttttcaaggctcctactaacctaagatgggaactacaatgagctaccagaggcctttcagttgaatcttgccatttgctgttgacttaatcaggaagcttctaagaacttctaattagtatggcattctctgccataggtgttagtggaagaatgactttgaacagacatttcaaggcttttgtattagtctgcttgggctgttgtaacaaaataccatatactgagtggcttaaacaacagaaatgtatttctcacagttctggagtctaggaagtccagatcaatgtgctgaccacttcagtttctggtgggctctcttgctggcttgtaaacaggcaccttcttgctgtgtcctcataggacagagagggaaagtaagctctctattgtctcttyttgtaaggatactaatcctattggaccagggctctgtcctgatgacctcatttaacctttaattacctcc

SEQ ID NO: 721520 - DNA, 597 bp, Homo sapiens
tgttaatttttaaaacagaaataatttttccaagagatatcttataacttaaaagagtattttaaaatgatttttagattaccgaagggatattgaggtaaacaaaaaatatatgtgagaaatctccaaggtatttaaatgtggctaccttcatgcaggtcaatgaaaaacaaaactttaagacccgagtagtaattatgagctcatatcaacatttttcatttartgtctttacttttgtttttttgtttttttttttttagatggagtctctctctgtcacccacgcgatctcggttcactgccaccttcacctcttgggttcaagcaattctcctgcctcagcctcctgagtagctgagattacaggcacccaccaccatccccggctattttttttgtatttttagtagagagggggtttcaccatgttggccaggctggtctcaaagtcctgacctcaggtgatccactcaccttggcctcccaaagtgctgggattacaggtgtgagccgccacacccagcctctctctcccatttttaggtctaccttcatcctccaaagataagtcattcatttgcaaaatatttttct

SEQ ID NO: 721521 - DNA, 1646 bp, Homo sapiens
ggtggaaatgttttggaactagacagaggtgatggttaaacaacgtcgtgaatgtactaaatgccactgaattgttaatcttaaayggataattttatgttatgtggattacacctcagaaaaagaagcatgtaaaataataacatgttttacaagaatatatacaaaggatatacataaatattcaaaaggttgactaagggggaaaggcacgagtaagggaataaggataaaagaaagtcaagaaataatgttgtacagggtaattctgaaaaaggtcctgcccagaccactgataactgtgtgccacgaactgaggtaagattttcctctacactggaaatccaaaagagtgtattggtttgctgcccctttttggtagcaactctattcttcattttgtcatttgctgtttttacccagtagtatatctcttggagctctcttcatgttagtacataccatcttttatcagtctcttttacagctctagggatgtaccatgatccatgtgttttcaacaccgtatttgcgctgaccttatataatatgccaacgaatgaaggtttcacaatgaaggatcaaaaatggcttgcaacagtgtgtgccaaacaaaaagcccttttctgaaataagtttaaattgtagagttgttttttatgcatccttcatagccagactgctcccacaaaccactggcattaccaaatggccaggactccaatcatactctccccccatttccacatcctccaaactgaggttgatttaatttgattttacaggggagaaaaaaaacgttagctggataagagttcattgtgtggttctttgctccaagatgacccttccgtaagccccgtgaccacctggcctggctgtttggtattaagtttaaaagcctggaattagttcagagaatacacagggcgttagcaataaataagttcatgaagctctccttggaccttctgactcctccagctaccatgctaaaaactctacttttgctggatctgtttcccaaatcccaaacatcaacatgtcacctgctcaaatacagtgtatctaacagagttctctgagactttttcatcaaaataaactaaaaggctgccctttctaataattagtcacgaatgtcagttgcctcaaggtgacacaggagaaacaaatctgacgtgtaaaggaacagcagctggaaataatcagacaagaggaaagggggaaaaaatggaaatattcctttctgggctaggtgaggaactgtattttagaaaacctaaaatagccttttatcagagctgggataaaggtcatcaccatggaccatggtactggggtagaggacaaagccacctctcaagtgcacctcaccctgctctctagggactgaccagagagtggggtctgtgaaggtgccaaggatgctctagcatctctaaggactgggcagttatgcaatacatttatgtttttgcatagcatccctcccacagggcattccaataagcttgacaaaggaaatctttcatgtattgggtaaaagcaatgtgaggagaaacctcacattggtggaagagagacaggaaacagagttcagatatggataggcctcccgtgcttcctccttaggcctgcaaacc

SEQ ID NO: 721522 - DNA, 1646 bp, Homo sapiens
ggtggaaatgttttggaactagacagaggtgatggttaaacaacgtcgtgaatgtactaaatgccactgaattgttaatcttaaatggataattttatgttatgtggattacacctcagaaaaagaagcatgtaaaataataacatgttttacaagaatatatacaaaggatatacataaatattcaaaaggttgactaagggggaaaggcacgagtaagggaataaggataaaagaaagtcaagaaataatgttgtacagggtaattctgaaaaaggtcctgcccagaccactgataactgtgtgccacgaaytgaggtaagattttcctctacactggaaatccaaaagagtgtattggtttgctgcccctttttggtagcaactctattcttcattttgtcatttgctgtttttacccagtagtatatctcttggagctctcttcatgttagtacataccatcttttatcagtctcttttacagctctagggatgtaccatgatccatgtgttttcaacaccgtatttgcgctgaccttatataatatgccaacgaatgaaggtttcacaatgaaggatcaaaaatggcttgcaacagtgtgtgccaaacaaaaagcccttttctgaaataagtttaaattgtagagttgttttttatgcatccttcatagccagactgctcccacaaaccactggcattaccaaatggccaggactccaatcatactctccccccatttccacatcctccaaactgaggttgatttaatttgattttacaggggagaaaaaaaacgttagctggataagagttcattgtgtggttctttgctccaagatgacccttccgtaagccccgtgaccacctggcctggctgtttggtattaagtttaaaagcctggaattagttcagagaatacacagggcgttagcaataaataagttcatgaagctctccttggaccttctgactcctccagctaccatgctaaaaactctacttttgctggatctgtttcccaaatcccaaacatcaacatgtcacctgctcaaatacagtgtatctaacagagttctctgagactttttcatcaaaataaactaaaaggctgccctttctaataattagtcacgaatgtcagttgcctcaaggtgacacaggagaaacaaatctgacgtgtaaaggaacagcagctggaaataatcagacaagaggaaagggggaaaaaatggaaatattcctttctgggctaggtgaggaactgtattttagaaaacctaaaatagccttttatcagagctgggataaaggtcatcaccatggaccatggtactggggtagaggacaaagccacctctcaagtgcacctcaccctgctctctagggactgaccagagagtggggtctgtgaaggtgccaaggatgctctagcatctctaaggactgggcagttatgcaatacatttatgtttttgcatagcatccctcccacagggcattccaataagcttgacaaaggaaatctttcatgtattgggtaaaagcaatgtgaggagaaacctcacattggtggaagagagacaggaaacagagttcagatatggataggcctcccgtgcttcctccttaggcctgcaaacc

SEQ ID NO: 721523 - DNA, 630 bp, Homo sapiens
caaatacatcataaaatttgggaggatcagattctcttctcaatatccatggagaagatactgctgataaaactattgacataggaaagttagttcctcaaagagtatcaggttccaggtatatttttcagaattttatcaccattacataaacaggatgaactacttcatagtactttaaatccagcagaaaaggcaagaccagaccatatctcaggattcrggtatcattatttcagaatttaagacaatttataactgaaactgggcataagatttcccaatttacaatccataagggaaaagggaggttcttcctagggaagaaagttatttattgactcaaaacaataaactgctctttaaacacattgtaagtatatattttaacaaagaaagtacattagatcaggattacattttgctgattagggtgacatgtcgtctctgtctcgtgaccagttacttacctaagagcagtattacataaaacactcactagtggtgcctgccacacttgtgattccttcccaggcaggaacttccgatgctacacccttctccaaggagggtgtctgagtttagggcagtcaggtgttctatgaagggactcactaaaaactagattct

SEQ ID NO: 721524 - DNA, 630 bp, Homo sapiens
caaatacatcataaaatttgggaggatcagattctcttctcaatatccatggagaagatactgctgataaaactattgacataggaaagttagttcctcaaagagtatcaggttccaggtatatttttcagaattttatcaccattacataaacaggatgaactacttcatagtactttaaatccagcagaaaaggcaagaccagaccatatctcaggattcgggtatcattatttcagaatttaagacaatttataactgaaactgggcataagatttcccaatttacaatccataagggaaaagggaggttcttcctagggaagaaagttatttattgactcaaaacaataaactgctctttaaacacattgtaagtatatattttaacaaagaaagtacattagatcaggattacattttgctgattrgggtgacatgtcgtctctgtctcgtgaccagttacttacctaagagcagtattacataaaacactcactagtggtgcctgccacacttgtgattccttcccaggcaggaacttccgatgctacacccttctccaaggagggtgtctgagtttagggcagtcaggtgttctatgaagggactcactaaaaactagattct

SEQ ID NO: 721525 - DNA, 579 bp, Homo sapiens
ccccacccaccattttctcctgaccttagatattttaggtctgggtcaaatcgggaataaggcaagatgccttctcactataactccctcttacctttaaggtcagtaatgggagcaaataagctagcatttaattagtacaactggaagaaattktcacagtatctatcaaaagtataaatgcaataccactggccctggccatctgaaattctggatatctatcccacagaaataataaaaacttggaaacaatcaataagttcatcaataaaggaattagttaagtaaattcagctgcactcatagaatagcaatggatccagaatacacatttttaaaggaggtggatctctgagaaatagcctggaatgacagctgtgaatatttataatgtgtatactttactaaaaatatttacagaaaatatacagaagtaaaatacccaagtaatatatatatattactttgaagaagtaaaatttacagattgcagaacaatacgtatagtttccacattacatgtaaaattattacattttggaaaaatctttatgtagatgtatacatagaaaaaca

SEQ ID NO: 721526 - DNA, 579 bp, Homo sapiens
ccccacccaccattttctcctgaccttagatattttaggtctgggtcaaatcgggaataaggcaagatgccttctcactataactccctcttacctttaaggtcagtaatgggagcaaataagctagcatttaattagtacaactggaagaaattgtcacagtatctatcaaaagtataaatgcaataccactggcccyggccatctgaaattctggatatctatcccacagaaataataaaaacttggaaacaatcaataagttcatcaataaaggaattagttaagtaaattcagctgcactcatagaatagcaatggatccagaatacacatttttaaaggaggtggatctctgagaaatagcctggaatgacagctgtgaatatttataatgtgtatactttactaaaaatatttacagaaaatatacagaagtaaaatacccaagtaatatatatatattactttgaagaagtaaaatttacagattgcagaacaatacgtatagtttccacattacatgtaaaattattacattttggaaaaatctttatgtagatgtatacatagaaaaaca

SEQ ID NO: 721527 - DNA, 579 bp, Homo sapiens
ccccacccaccattttctcctgaccttagatattttaggtctgggtcaaatcgggaataaggcaagatgccttctcactataactccctcttacctttaaggtcagtaatgggagcaaataagctagcatttaattagtacaactggaagaaattgtcacagtatctatcaaaagtataaatgcaataccactggccctrgccatctgaaattctggatatctatcccacagaaataataaaaacttggaaacaatcaataagttcatcaataaaggaattagttaagtaaattcagctgcactcatagaatagcaatggatccagaatacacatttttaaaggaggtggatctctgagaaatagcctggaatgacagctgtgaatatttataatgtgtatactttactaaaaatatttacagaaaatatacagaagtaaaatacccaagtaatatatatatattactttgaagaagtaaaatttacagattgcagaacaatacgtatagtttccacattacatgtaaaattattacattttggaaaaatctttatgtagatgtatacatagaaaaaca

SEQ ID NO: 721528 - DNA, 645 bp, Homo sapiens
acgtcccaactcggcaaaaccgttttgaggtcagttgggagatctgagaaggttttgggggtaaggatattaatttcagtttgtaacatacaatagaacacagcagttaaactggaacttcagagtcaagtagatctgaagttggatcttggttctgccactaaatggctgtgggacctcagataactcaaatattttgtttaattttttttttttttagayggaatcttgctctgtcgccaggctggagtgcagtggcatgatcttggctcactgcaacctccgtctcccaggttcaagcgattcccctgcctcagccccttgagtagctgggactacaggtgcatgccaccacgcccggctaattttttgtatttttttagtgaagactgggtttcaccatgttggccaggatggtctcaatttcctgacctcgtgatctgcctgccttggcctcccaaagtgctgggattacaggcatgagccaccatgcccggcccttgtttaatctttctgagctttcattttcttaccgggaaaataaatataaagctgtccttatcttatagaatggttgtaaggatccaatgagatagttcaagtaaattgcttgcacacagtgttttcaatacatttagctattaa

SEQ ID NO: 721529 - DNA, 665 bp, Homo sapiens
atcgactttctgtctcagtggatctgcctattccaaacatttcatatacatggattcatacaacatgtggtctttgtatattcatgtacacatattgataaagatcattataaccatatagatgaaatgttttgttttttgtttttgagacagtctcactctgtcacccaggctggagtgcagtggcgcatcctccactcactaaaacctccacctcctgggttcaggcgattctcatgcctctgsgcttttctgttcttttttttattgagacggtctcactcccatcacccaggctgagagcagtggtgtgatcttggctcagtgcagccttgacctcccaggctcaagtgatcctcccacctcagcctccccagtagctgggattacaggcgtgcaccaccacgcccagctaatgtttgtacagatggggttttgccatgttgcccaggctgctcttgaactcctgagctctagcaatctgcctgactcagcctcccaaagtgctgggattacaagtgtgagccacaacgtctggctttttttttttttttttgagatagagtcttgctctgtcaccaagggtggaatacagtggcatgatctctcctcactgcaacttctgcctcttgggttcaagcgattctcctggctcagcctcctga

SEQ ID NO: 721530 - DNA, 665 bp, Homo sapiens
atcgactttctgtctcagtggatctgcctattccaaacatttcatatacatggattcatacaacatgtggtctttgtatattcatgtacacatattgataaagatcattataaccatatagatgaaatgttttgttttttgtttttgagacagtctcactctgtcacccaggctggagtgcagtggcgcatcctccactcactaaaacctccacctcctgggttcaggcgattctcatgcctctgcscttttctgttcttttttttattgagacggtctcactcccatcacccaggctgagagcagtggtgtgatcttggctcagtgcagccttgacctcccaggctcaagtgatcctcccacctcagcctccccagtagctgggattacaggcgtgcaccaccacgcccagctaatgtttgtacagatggggttttgccatgttgcccaggctgctcttgaactcctgagctctagcaatctgcctgactcagcctcccaaagtgctgggattacaagtgtgagccacaacgtctggctttttttttttttttttgagatagagtcttgctctgtcaccaagggtggaatacagtggcatgatctctcctcactgcaacttctgcctcttgggttcaagcgattctcctggctcagcctcctga

SEQ ID NO: 721531 - DNA, 636 bp, Homo sapiens
atgctaaatgacgagttaatgggtgcagcacaccagcatggcacatgtatacatacgtagctaacctgcacattgtgcacatgtaccctaaaacttaaagtataataataataaaatttaaaaaaagaatatttcaaagattttttttttctaaaaatgagtttgggatggaaatattttttaatcaaaattttaaaataatttctttttaaaaatactcttgatgtttctaaacttcatctggaagaataagtgggtaaaagaatataaaaggaaactttgtaacaagaaaaggataagaaacttgctttaccacatattaaaatacattataaaacaaccattaaaactgtagttctagccaagaatctrtaaatagattaatgttttaaaatagaaataattaaattctagcatgtttaataggggaatttggcatatactaaaaaatcactggacatcaaagaaaaacaacatagataattgcataaatggcaataaaaattgacttacatttgtaaaaagatcttatttatagctaaatttcttacaagagctgtttatcctcacagccccaatttctctcctccactccaatgaagttgcccttgtcaaggtccatcaatagtctccatc

SEQ ID NO: 721532 - DNA, 1897 bp, Homo sapiens
ttttggagatctacatatctgagattgactgacgtttttatttgctctcacagatgaatggctactaggctaattataaaattcttactgtggttaattctacattatatatgtatgcaggattatcaaatgtagagttgtaatgtaactaaaaatattatgtttcccacgggcatttttttctgtctggtaggaatactgggggaaatacaaattaaagaaccagatcactgatttctaggaataagtcccaggaagtggtgttcaaactttgcaggcagttttaaaatatatgagcccaaatgcatggtggtgcatgcctgtaatcccagctactcaggargctgaggcagaagaattgcttgaacccgggagacgggtgttgcggtgagccgaaattgcaccattgcactccagtctgagcaacaagagccaaactctgtctcaaaaaaaaaaaaaaaaaaaggcccattttacaacatttatctctcattcattttgagttaatttttaaattgcatataaaatacccatccagatttattttttcatttggatgttcagttgttcttttattatttgctgaaaagactaaccgctctcctttgaattgtccttgtcctatgcattttatagattgttttgaatggaatttcccttctatttttaagttgttttttattaatatgtagaaaagtatatattttgtattagaccattttgatgaacttccttattagtcctaaaatatttttacctgtttcttttaaatttttgaggaaaatggtaatgtggtatttaaattatagtagtctttttcttttcaatattgacgcctcctattttattccttcacttattgcgttggctagctaaatcaaaatggtgatttcaggaatcactaacttagggaatttgatgaactacttcacatagttcacatttactggtttgtccgattcctgttgaatataatttataaggttattgaagtgttcttctaatcctggtttgcttagagttttaattggggtttttttcatttatctatttattgaataataaacttatgttgaactttttaagttttgaataaacataactcattcaaaataatcttttaatatactacttaatttaatgtttaatattttatttttagtttttacatctatattcataggtgatatagatatttgatttttgtattggttatcctaacttcctgaaatgtgttgggaaattttcctctatttttgcttttgctggttttattttttcacctaaatttattctgtcttgcactatttattgaagtgattttgcaggaggatctctaggtcagcatttttattagaagcattcatgttgttgtatataactgtgctaaatttgttttcatcactgcataaaatttgattgtgtgaatacacagcaatttgtagacatcttctcctcttgatagacattcagattaatttcaattcggaactgtgatagttcagagctatttctgttctgggctattgcaaataatgtttccataacattcttttgcatgtattgtggtttacatacgcaagagttcctccaaggtacacacacatactctacaagtgaagtagctggtttgcagaatatgcaaaccttccagctttccagataactccaaaatgttttcaaaacgactctactaatttatattatcaccagcagatatgagtttctgttgtcaacattcttgtcccaacttattttgttgagactttcctttttaccaatctactaggtaagtggtaatatctgattttaattttcttaataggattatcagtgctattgagaattttttggtatgttttgttatccttatttcttaaaggatcatagatttgcc

SEQ ID NO: 721533 - DNA, 1897 bp, Homo sapiens
ttttggagatctacatatctgagattgactgacgtttttatttgctctcacagatgaatggctactaggctaattataaaattcttactgtggttaattctacattatatatgtatgcaggattatcaaatgtagagttgtaatgtaactaaaaatattatgtttcccacgggcatttttttctgtctggtaggaatactgggggaaatacaaattaaagaaccagatcactgatttctaggaataagtcccaggaagtggtgttcaaactttgcaggcagttttaaaatatatgagcccaaatgcatggtggtgcatgcctgtaatcccagctactcaggaagctgaggcagaagaattgcttgaacccgggagacgggtgttgcggtgagccgaaattgcaccattgcactccagtctgagcaacaagagccaaactctgtctcaaaaaaaaaaaaaaaaaaaggcccattttacaacatttatctctcattcattttgagttaatttttaaattgcwtataaaatacccatccagatttattttttcatttggatgttcagttgttcttttattatttgctgaaaagactaaccgctctcctttgaattgtccttgtcctatgcattttatagattgttttgaatggaatttcccttctatttttaagttgttttttattaatatgtagaaaagtatatattttgtattagaccattttgatgaacttccttattagtcctaaaatatttttacctgtttcttttaaatttttgaggaaaatggtaatgtggtatttaaattatagtagtctttttcttttcaatattgacgcctcctattttattccttcacttattgcgttggctagctaaatcaaaatggtgatttcaggaatcactaacttagggaatttgatgaactacttcacatagttcacatttactggtttgtccgattcctgttgaatataatttataaggttattgaagtgttcttctaatcctggtttgcttagagttttaattggggtttttttcatttatctatttattgaataataaacttatgttgaactttttaagttttgaataaacataactcattcaaaataatcttttaatatactacttaatttaatgtttaatattttatttttagtttttacatctatattcataggtgatatagatatttgatttttgtattggttatcctaacttcctgaaatgtgttgggaaattttcctctatttttgcttttgctggttttattttttcacctaaatttattctgtcttgcactatttattgaagtgattttgcaggaggatctctaggtcagcatttttattagaagcattcatgttgttgtatataactgtgctaaatttgttttcatcactgcataaaatttgattgtgtgaatacacagcaatttgtagacatcttctcctcttgatagacattcagattaatttcaattcggaactgtgatagttcagagctatttctgttctgggctattgcaaataatgtttccataacattcttttgcatgtattgtggtttacatacgcaagagttcctccaaggtacacacacatactctacaagtgaagtagctggtttgcagaatatgcaaaccttccagctttccagataactccaaaatgttttcaaaacgactctactaatttatattatcaccagcagatatgagtttctgttgtcaacattcttgtcccaacttattttgttgagactttcctttttaccaatctactaggtaagtggtaatatctgattttaattttcttaataggattatcagtgctattgagaattttttggtatgttttgttatccttatttcttaaaggatcatagatttgcc

SEQ ID NO: 721534 - DNA, 603 bp, Homo sapiens
tggtggaaaaacctggtgactgtggcagggcctaagaaatctcctgcttccaacttgggcagtagtccctccaagtcactcaaacccttggtgctctcttaccccttccactcatccctccctgcttccctccaccctgcccccatctgctaagcagatgcttggctgctcctgtacactttagtactgataccactttcacagtgagtccttaactttttaactttctaagaaaccaggagtactgaaaccacgggaatttcaaacactgaagttggaagggacttcggctgtcattgactcttactttctcgtttcactactgtacctctagagaccttgtttggatgggaacttggttactccagaccccagagcaaagaaaagtcttctgctcaggaagggggtcctttccaatrgagtgagcagttgtccaagtaagggaataggcactccatgggtgtgagaagttccagccagaaagccctcatatcccatcccacagattagaaaactgaaaagtgacttctccagtgaactagttttagagttggacaatactgggtttaaattccaaacctacttctcattagctctgtggct

SEQ ID NO: 721535 - DNA, 613 bp, Homo sapiens
tttctgaaaactccctataagtctatttgaaatgagaaaggacataggaatttaattttgaaatgtacttatgtgctrctcttcctaagaattatataaaattccccagacatgtaacttggtcatttttataatcagtcttattgatatcagatatcattaatatgtatatgtacatattatacaggtaataatacatgtcataacgtaagaaatacattgagcatgtaagtttcaacaggaccaaggctggatatcagggagagaggaggaaacaagacagtcatggacctaagactcatagtttatagaataaagtacaacttacaaatagtttgtttagtggctttacttttatcagttagaacacctaagtgaatatttaaatcaagatccaaggcaaggttactttaaattggtgctgagtatcaaatccttaaatccttgaaaaatgaaaatgaaagcctttctttttgttttttttttgcgaaaacatcagaagatataacatccacttttatcatgatttcttcttttatcttatttttgtctcatgaatgctaataattttggtgtagcttcagtgaactcatatctttaataatattcaatg

SEQ ID NO: 721536 - DNA, 1362 bp, Homo sapiens
ggtgggatatgaggagcaactgaggtgggatatgaggagcaactgcttaatgggtagagtttccttttggggtgatgaatatgttttggaactagatggaagactgttttggacagagtcatgctctcttgcccagcttggagtgcagtggcatgatcatggctcactacagcctcaacttctccgtctcaagcaatcctcctgcctcctgagtagcatgtgccaacaaacctggctaattgttttaaaaaacttttagttgcgatggggtctcactatgtggcccaggatggttttgaattcctaggctcaagtgatcctcctgccttggcctcctcaagtgctgggattacaggcatgagccaccaaaccccaccataactctcgcttttatggaaacctgacttctcagagaccagactatctaatcatacattagaggccagaatatcacatttctaaatcaaatttctattaggaagaagaaataaaatatatgacaaactattaaagttgtataatgacacacaattttatataatgtggtttaggatggaaaatatgaacttatattttatcatgggtatttgaagttctgaaaaattatgaaaccagaaataaaaatacatacagaatttacacttacgattttcaacttcccacttctgtcactgcctccctttctgccccttgtccaaatttttacacctcaatcctcagctgaattctttctctgctatgccttcccttttagaaatacatagaattagtttactaattacaaaaatcataggaaagaataaaggggaaatttatttttctaaaatatttttttgcccctatcatccatgggcacaagaatatgtcttaacttatattacaaggattatgacacatgtcaaagctaaaagtgcctgaragagtgatcgagcatctctgccttctagttgtgtgaaattagtcaatttacttcaacttgtaagactcagatgaatactctagaatgtaaataaatgaatagtatctatgcaatattagtgatgtgagaaaaaatagtacatgtaaagcacttagtacaacatctggcaagaaaaagatatacataaatgtttataggttctcttctgactcttgtaaaactaaacacattataatgtaaaccaaattcatcatttatctgactggacactctaacattatgagagtaactaagggaatcacatatggcttaaatatagaaatgaaactataaaggaaagacaaaaaagtaactgtttttattccgttaatgccagaggaaattattttttattcaacatcagagataaatctatttaaaaaagcaacaacaatccatattat

SEQ ID NO: 721537 - DNA, 1362 bp, Homo sapiens
ggtgggatatgaggagcaactgaggtgggatatgaggagcaactgcttaatgggtagagtttccttttggggtgatgaatatgttttggaactagatggaagactgttttggacagagtcatgctctcttgcccagcttggagtgcagtggcatgatcatggctcactacagcctcaacttctccgtctcaagcaatcctcctgcctcctgagtagcatgtgccaacaaacctggctaattgttttaaaaaacttttagttgcgatggggtctcactatgtggcccaggatggttttgaattcctaggctcaagtgatcctcctgccttggcctcctcaagtgctgggattacaggcatgagccaccaaaccccaccataactctcgcttttatggaaacctgacttctcagagaccagactatctaatcatacattagaggccagaatatcacatttctaaatcaaatttctattaggaagaagaaataaaatatatgacaaactattaaagttgtataatgacacacaattttatataatgtggtttaggatggaaaatatgaacttatattttatcatgggtatttgaagttctgaaaaattatgaaaccagaaataaaaatacatacagaatttacacttacgattttcaacttcccacttctgtcactgcctccctttctgccccttgtccaaatttttacacctcaatcctcagctgaattctttctctgctatgccttcccttttagaaatacatagaattagtttactaattacaaaaatcataggaaagaataaaggggaaatttatttttctaaaatatttttttgcccctatcatccatgggcacaagaatatgtcttaacttatattacaaggattatgacacatgtcaaagctaaaagtgcctgagagagtgatcgagcatctctgccttctagttgtgtgaaattagtcaatttacttcaacttgtaagactcagatgaatactctagaatgtaaataaatgaatagtatctatgcaatattagtgatgtgagaaaaaatagtacatgtraagcacttagtacaacatctggcaagaaaaagatatacataaatgtttataggttctcttctgactcttgtaaaactaaacacattataatgtaaaccaaattcatcatttatctgactggacactctaacattatgagagtaactaagggaatcacatatggcttaaatatagaaatgaaactataaaggaaagacaaaaaagtaactgtttttattccgttaatgccagaggaaattattttttattcaacatcagagataaatctatttaaaaaagcaacaacaatccatattat

SEQ ID NO: 721538 - DNA, 1362 bp, Homo sapiens
ggtgggatatgaggagcaactgaggtgggatatgaggagcaactgcttaatgggtagagtttccttttggggtgatgaatatgttttggaactagatggaagactgttttggacagagtcatgctctcttgcccagcttggagtgcagtggcatgatcatggctcactacagcctcaacttctccgtctcaagcaatcctcctgcctcctgagtagcatgtgccaacaaacctggctaattgttttaaaaaacttttagttgcgatggggtctcactatgtggcccaggatggttttgaattcctaggctcaagtgatcctcctgccttggcctcctcaagtgctgggattacaggcatgagccaccaaaccccaccataactctcgcttttatggaaacctgacttctcagagaccagactatctaatcatacattagaggccagaatatcacatttctaaatcaaatttctattaggaagaagaaataaaatatatgacaaactattaaagttgtataatgacacacaattttatataatgtggtttaggatggaaaatatgaacttatattttatcatgggtatttgaagttctgaaaaattatgaaaccagaaataaaaatacatacagaatttacacttacgattttcaacttcccacttctgtcactgcctccctttctgccccttgtccaaatttttacacctcaatcctcagctgaattctttctctgctatgccttcccttttagaaatacatagaattagtttactaattacaaaaatcataggaaagaataaaggggaaatttatttttctaaaatatttttttgcccctatcatccatgggcacaagaatatgtcttaacttatattacaaggattatgacacatgtcaaagctaaaagtgcctgagagagtgatcgagcatctctgccttctagttgtgtgaaattagtcaatttacttcaacttgtaagactcagatgaatactctagaatgtaaataaatgaatagtatctatgcaatattagtgatgtgagaaaaaatagtacatgtaamgcacttagtacaacatctggcaagaaaaagatatacataaatgtttataggttctcttctgactcttgtaaaactaaacacattataatgtaaaccaaattcatcatttatctgactggacactctaacattatgagagtaactaagggaatcacatatggcttaaatatagaaatgaaactataaaggaaagacaaaaaagtaactgtttttattccgttaatgccagaggaaattattttttattcaacatcagagataaatctatttaaaaaagcaacaacaatccatattat

SEQ ID NO: 721539 - DNA, 1429 bp, Homo sapiens
acaggtgcatttgtactttgagtgtacagtgtatgtgtcacatgtttatatgtgatacttatgcacattacttatatacatatttaatgttaaacatgtaaaatatacacactaagagtacatgttttgtttatattttgctaggttctcatttaatcacaaggaatattaacctaattaaggcacaacattttctttttgccatattctaacagcaaagataaagagacactccagtgtcatgttatatgtatgacagatgcttacagtcaacaattgccactgcaaacagcattggttagcaactgtattaaacttagacgtactgttggtgatttgggtggacttaacagttgtcaaaatttggggtaagtcagttttcatcttgtgagtttgatttttttttttttttagtctgggtcatgctctgttgcccaggctggagtgcagtggcacaatgtggtctcactgcaaccaccacctccctcgttcaagtgattcgtctgcctcagcctcccaagtagctggaattacaggcacgtgccaccacgcccggctaatttttgtatttttaatagagctgtagtttcaccacattggccagggtggtctcgaactcctgacctcaggtgatccacccacctcagcctcccaaagtgctgggattacaggcatgagctaccacgcccggctgtgagtttgattttaatataaagttttctaaccacatgaaagagtttctattgttttgattaccatggctataattgatctcaatttttttcatgcaggcaatattagcattgtgatacataaaatatatactcaatttaattctttgggagtgaccaccagctctctccttaactgactactctctagggataaaaaagcaatttgaggaaatttgggccatgtaaagatattgtaaacatcaaaattgtgagaaacaaaaactaaatataatatgaattcaaattgtgtgtgtatattcacataaaatctgtccaacttccaacagttgaatgactggaattatttctaacttctgagatttgatattggttctatgactaaagaacaagctggaaaggactaccatgttattagaccacccataggtaaaattattttcaaggcttacatagtaaaacatatattttatatatatatatatatatatatatayacacacacacacacctttgtttgcattatcatactagatattgtggctataaaacagaatagaatatgaaatttgtcctcaaggatgtaaaagtacatttatctttttctttcttctcagaacattgtaataaatgtagtacattttcctctgtagaattagtaaccatagtattcatttgaatattcagtggtaatgtgagtttcaatttttagctttataggtactttctagtgactg

SEQ ID NO: 721540 - DNA, 665 bp, Homo sapiens
tttcttacttcattcagcaaatatgagttatattccagtcatgcatagccactcttataggagttgggggcagagtggtgaataatacagacaggagttaacttttttttttttttttttgagatggagtcttgctttgtygcccaggctggagtgcagtggcatgatctcggctcactgcaacttccgcctcctgggttcaagcgattctcctgcctcagcctcctgagtagctgggactacaggtgtgtgctaccacgcctggctaatttttctgtgtttttagtagagacgggatttcaccatgttggccaggatggtctcgctctcctgacctcatgatctgcctgcctcggcctcccaaagtgccgggattacaggcatgagccactgtgcctggccaggagttaacttttctaaatgcctttcttatataagcaaggaataaggatcctgggaattgagcctgggcttatgtcccctgttcaaaaatcagctaaagttgattcatgattgtcggatttaagtcagcattcaaggtcaaagagagtgttgggaccacagaaaaccttgaaagtgaaagaggaaagaaagataatctaaaagcctaggtggtaagatatgcaaacaggagcgaggagacaaaataatactaatagctaatg

SEQ ID NO: 721541 - DNA, 665 bp, Homo sapiens
tttcttacttcattcagcaaatatgagttatattccagtcatgcatagccactcttataggagttgggggcagagtggtgaataatacagacaggagttaacttttttttttttttttttgagatggagtcttgctttgtcgcccaggctggagtgcagtggcatgatctcggctcactgcaacttccgcctcctgggttcaagcgattctcctgcctcagcctcctgagtagctgggactacaggtgtgtgctaccacgcctggctaatttttytgtgtttttagtagagacgggatttcaccatgttggccaggatggtctcgctctcctgacctcatgatctgcctgcctcggcctcccaaagtgccgggattacaggcatgagccactgtgcctggccaggagttaacttttctaaatgcctttcttatataagcaaggaataaggatcctgggaattgagcctgggcttatgtcccctgttcaaaaatcagctaaagttgattcatgattgtcggatttaagtcagcattcaaggtcaaagagagtgttgggaccacagaaaaccttgaaagtgaaagaggaaagaaagataatctaaaagcctaggtggtaagatatgcaaacaggagcgaggagacaaaataatactaatagctaatg

SEQ ID NO: 721542 - DNA, 665 bp, Homo sapiens
tttcttacttcattcagcaaatatgagttatattccagtcatgcatagccactcttataggagttgggggcagagtggtgaataatacagacaggagttaacttttttttttttttttttgagatggagtcttgctttgtcgcccaggctggagtgcagtggcatgatctcggctcactgcaacttccgcctcctgggttcaagcgattctcctgcctcagcctcctgagtagctgggactacaggtgtgtgctaccacgcctggctaatttttctgtgtttttagtagagacgggatttcaccatgttggccaggatggtctygctctcctgacctcatgatctgcctgcctcggcctcccaaagtgccgggattacaggcatgagccactgtgcctggccaggagttaacttttctaaatgcctttcttatataagcaaggaataaggatcctgggaattgagcctgggcttatgtcccctgttcaaaaatcagctaaagttgattcatgattgtcggatttaagtcagcattcaaggtcaaagagagtgttgggaccacagaaaaccttgaaagtgaaagaggaaagaaagataatctaaaagcctaggtggtaagatatgcaaacaggagcgaggagacaaaataatactaatagctaatg

SEQ ID NO: 721543 - DNA, 2186 bp, Homo sapiens
cctgccaggtttgtccatgctaatgttacaattttctttatgtagttcaaccgtattttgtatggagatactttgaggctctgtaaatatctggttactcctcagaacccactagatttagcatttcatggatgacttgtgtttgaacaattattactatgatggttaccagatgattattttcttattytcttctttgttctacatggagaaataaaaccaataaataagggagaaggaaagctcatgattctgatgctccaattccccaagattaggccagtagtagacattctaagctgactttatgtctctttgatttgtctccattactctgtcggcacttttttactttctggcagaagatgttctaagctcagcttgtattttctctgcgccagctctggaatgagtaattttttttagaagaagaggtggagccactgaggaagcacaggtgagccctccccattgtgtactcactggtccccaacagaagaaccactgccacatccactgaagtaccaagaaactagcaaagggccttctggctgtctggggagagtcctcatgtggtccctggctgtctcagaggttctggattagtcttcctgtagcctctgtgttgtgtgtttagatcggggctctgtgggaagggccctgagagacccaacagcacagcatgccttatctgccaaatgtccctcccttcctcacactctgacactcaggaatagggtagatggtgtgtccaggcagtgtcaggccacctcactttctcctttgagacgggcccagatgtcgcggggtgagtgtggagctgggaacctggagcctgaggccaactgtctctccctgtgtcttggaggaaaggccatgtcccaaaaaaaaccccagggcctgacctctgggcacacatgcagggagggagggtctatgagctgagggggacattgtaatgagactttgaacccctttgctctggggcctggtcagtggaccatggtcagaaatgacctggtcatcaggacctagtcatttgggacctgatcagcaggggcctggttagtggcggcctcctcagtaaaggcctcatcagtggggacctggtgacctagtcattggaagcctggtcagtggggggacctagtcagtggtggctttattagtggggcctgatctgttggaacataaacaatgaaaaacaggttggtggggcatacacaatatatcacgggcctggtcagtgtggggccttactggcttggagcctggtcagtgattgcctggtcagagggggctcggtcagctgggtactccttcatggagaattgttcagtggggggtcgggtgagcagcaacctggtaaattgtggtcttgtcagtgggaacccggtcttgtcaatggggaccaggtcagtggaaaactggtcagtgggggctggccatgaggcctattaagtgtgggcctggttaggaagacatggtcagtggggacttgatcagtgggacctggtcaatggaggagtgttcattaggggcctcatcactcatcactgggaacctggtcaggggcagttggtcagtacctggcctgttggccactatgtgacctcaggcaggggggttgtctgtggagcctccttgcctccatctgcagggaaagtgagtcagggcaccctggagggtggctggaaagagaaggtgagaagatgtgttgaatccaagtactgcttggcagacctacaactttacaaatgacctgtgttccacctagagagggtgccagccctctcagcattatgaagtgcccctcctctgtctgcatccccaggacacccatgggtggggagggcagagattggggagcacctatagaggctctaatgctctaaggtgacagtgatgaggacctgggtgcacccatgagtggagaagctaggcctgtccagagaagcaagacaaacacacacacacacacacacacacacacacacacaggcacacatgcatactcaaatacattgcatacacacatgtcagttcaggggatagaggacactgactctgggccctgttgacccaagcagactcccatggtggtgggttgtgtcaccccacaatgtcactgttgctgagttcccatcgcctctgtgttgtggagcagttagagacacacagcagtg

SEQ ID NO: 721544 - DNA, 2186 bp, Homo sapiens
cctgccaggtttgtccatgctaatgttacaattttctttatgtagttcaaccgtattttgtatggagatactttgaggctctgtaaatatctggttactcctcagaacccactagatttagcatttcatggatgacttgtgtttgaacaattattactatgatggttaccagatgattattttcttattttcttctttgttctacatggagaaataaaaccaataaataagggagaaggaaagctcatgattctgatgctccaattccccaagattaggccagtagtagacattcyaagctgactttatgtctctttgatttgtctccattactctgtcggcacttttttactttctggcagaagatgttctaagctcagcttgtattttctctgcgccagctctggaatgagtaattttttttagaagaagaggtggagccactgaggaagcacaggtgagccctccccattgtgtactcactggtccccaacagaagaaccactgccacatccactgaagtaccaagaaactagcaaagggccttctggctgtctggggagagtcctcatgtggtccctggctgtctcagaggttctggattagtcttcctgtagcctctgtgttgtgtgtttagatcggggctctgtgggaagggccctgagagacccaacagcacagcatgccttatctgccaaatgtccctcccttcctcacactctgacactcaggaatagggtagatggtgtgtccaggcagtgtcaggccacctcactttctcctttgagacgggcccagatgtcgcggggtgagtgtggagctgggaacctggagcctgaggccaactgtctctccctgtgtcttggaggaaaggccatgtcccaaaaaaaaccccagggcctgacctctgggcacacatgcagggagggagggtctatgagctgagggggacattgtaatgagactttgaacccctttgctctggggcctggtcagtggaccatggtcagaaatgacctggtcatcaggacctagtcatttgggacctgatcagcaggggcctggttagtggcggcctcctcagtaaaggcctcatcagtggggacctggtgacctagtcattggaagcctggtcagtggggggacctagtcagtggtggctttattagtggggcctgatctgttggaacataaacaatgaaaaacaggttggtggggcatacacaatatatcacgggcctggtcagtgtggggccttactggcttggagcctggtcagtgattgcctggtcagagggggctcggtcagctgggtactccttcatggagaattgttcagtggggggtcgggtgagcagcaacctggtaaattgtggtcttgtcagtgggaacccggtcttgtcaatggggaccaggtcagtggaaaactggtcagtgggggctggccatgaggcctattaagtgtgggcctggttaggaagacatggtcagtggggacttgatcagtgggacctggtcaatggaggagtgttcattaggggcctcatcactcatcactgggaacctggtcaggggcagttggtcagtacctggcctgttggccactatgtgacctcaggcaggggggttgtctgtggagcctccttgcctccatctgcagggaaagtgagtcagggcaccctggagggtggctggaaagagaaggtgagaagatgtgttgaatccaagtactgcttggcagacctacaactttacaaatgacctgtgttccacctagagagggtgccagccctctcagcattatgaagtgcccctcctctgtctgcatccccaggacacccatgggtggggagggcagagattggggagcacctatagaggctctaatgctctaaggtgacagtgatgaggacctgggtgcacccatgagtggagaagctaggcctgtccagagaagcaagacaaacacacacacacacacacacacacacacacacacaggcacacatgcatactcaaatacattgcatacacacatgtcagttcaggggatagaggacactgactctgggccctgttgacccaagcagactcccatggtggtgggttgtgtcaccccacaatgtcactgttgctgagttcccatcgcctctgtgttgtggagcagttagagacacacagcagtg

SEQ ID NO: 721545 - DNA, 2186 bp, Homo sapiens
cctgccaggtttgtccatgctaatgttacaattttctttatgtagttcaaccgtattttgtatggagatactttgaggctctgtaaatatctggttactcctcagaacccactagatttagcatttcatggatgacttgtgtttgaacaattattactatgatggttaccagatgattattttcttattttcttctttgttctacatggagaaataaaaccaataaataagggagaaggaaagctcatgattctgatgctccaattccccaagattaggccagtagtagacattctaagctgactttatgtctctttgatttgtctccattactctgtcggcacttttttactttctggcagaagatgttctaagctcagcttgtattttctctgcgccagctctggaatgagtmattttttttagaagaagaggtggagccactgaggaagcacaggtgagccctccccattgtgtactcactggtccccaacagaagaaccactgccacatccactgaagtaccaagaaactagcaaagggccttctggctgtctggggagagtcctcatgtggtccctggctgtctcagaggttctggattagtcttcctgtagcctctgtgttgtgtgtttagatcggggctctgtgggaagggccctgagagacccaacagcacagcatgccttatctgccaaatgtccctcccttcctcacactctgacactcaggaatagggtagatggtgtgtccaggcagtgtcaggccacctcactttctcctttgagacgggcccagatgtcgcggggtgagtgtggagctgggaacctggagcctgaggccaactgtctctccctgtgtcttggaggaaaggccatgtcccaaaaaaaaccccagggcctgacctctgggcacacatgcagggagggagggtctatgagctgagggggacattgtaatgagactttgaacccctttgctctggggcctggtcagtggaccatggtcagaaatgacctggtcatcaggacctagtcatttgggacctgatcagcaggggcctggttagtggcggcctcctcagtaaaggcctcatcagtggggacctggtgacctagtcattggaagcctggtcagtggggggacctagtcagtggtggctttattagtggggcctgatctgttggaacataaacaatgaaaaacaggttggtggggcatacacaatatatcacgggcctggtcagtgtggggccttactggcttggagcctggtcagtgattgcctggtcagagggggctcggtcagctgggtactccttcatggagaattgttcagtggggggtcgggtgagcagcaacctggtaaattgtggtcttgtcagtgggaacccggtcttgtcaatggggaccaggtcagtggaaaactggtcagtgggggctggccatgaggcctattaagtgtgggcctggttaggaagacatggtcagtggggacttgatcagtgggacctggtcaatggaggagtgttcattaggggcctcatcactcatcactgggaacctggtcaggggcagttggtcagtacctggcctgttggccactatgtgacctcaggcaggggggttgtctgtggagcctccttgcctccatctgcagggaaagtgagtcagggcaccctggagggtggctggaaagagaaggtgagaagatgtgttgaatccaagtactgcttggcagacctacaactttacaaatgacctgtgttccacctagagagggtgccagccctctcagcattatgaagtgcccctcctctgtctgcatccccaggacacccatgggtggggagggcagagattggggagcacctatagaggctctaatgctctaaggtgacagtgatgaggacctgggtgcacccatgagtggagaagctaggcctgtccagagaagcaagacaaacacacacacacacacacacacacacacacacacaggcacacatgcatactcaaatacattgcatacacacatgtcagttcaggggatagaggacactgactctgggccctgttgacccaagcagactcccatggtggtgggttgtgtcaccccacaatgtcactgttgctgagttcccatcgcctctgtgttgtggagcagttagagacacacagcagtg

SEQ ID NO: 721546 - DNA, 2186 bp, Homo sapiens
cctgccaggtttgtccatgctaatgttacaattttctttatgtagttcaaccgtattttgtatggagatactttgaggctctgtaaatatctggttactcctcagaacccactagatttagcatttcatggatgacttgtgtttgaacaattattactatgatggttaccagatgattattttcttattttcttctttgttctacatggagaaataaaaccaataaataagggagaaggaaagctcatgattctgatgctccaattccccaagattaggccagtagtagacattctaagctgactttatgtctctttgatttgtctccattactctgtcggcacttttttactttctggcagaagatgttctaagctcagcttgtattttctctgcgccagctctggaatgagtaattttttttagaagmagaggtggagccactgaggaagcacaggtgagccctccccattgtgtactcactggtccccaacagaagaaccactgccacatccactgaagtaccaagaaactagcaaagggccttctggctgtctggggagagtcctcatgtggtccctggctgtctcagaggttctggattagtcttcctgtagcctctgtgttgtgtgtttagatcggggctctgtgggaagggccctgagagacccaacagcacagcatgccttatctgccaaatgtccctcccttcctcacactctgacactcaggaatagggtagatggtgtgtccaggcagtgtcaggccacctcactttctcctttgagacgggcccagatgtcgcggggtgagtgtggagctgggaacctggagcctgaggccaactgtctctccctgtgtcttggaggaaaggccatgtcccaaaaaaaaccccagggcctgacctctgggcacacatgcagggagggagggtctatgagctgagggggacattgtaatgagactttgaacccctttgctctggggcctggtcagtggaccatggtcagaaatgacctggtcatcaggacctagtcatttgggacctgatcagcaggggcctggttagtggcggcctcctcagtaaaggcctcatcagtggggacctggtgacctagtcattggaagcctggtcagtggggggacctagtcagtggtggctttattagtggggcctgatctgttggaacataaacaatgaaaaacaggttggtggggcatacacaatatatcacgggcctggtcagtgtggggccttactggcttggagcctggtcagtgattgcctggtcagagggggctcggtcagctgggtactccttcatggagaattgttcagtggggggtcgggtgagcagcaacctggtaaattgtggtcttgtcagtgggaacccggtcttgtcaatggggaccaggtcagtggaaaactggtcagtgggggctggccatgaggcctattaagtgtgggcctggttaggaagacatggtcagtggggacttgatcagtgggacctggtcaatggaggagtgttcattaggggcctcatcactcatcactgggaacctggtcaggggcagttggtcagtacctggcctgttggccactatgtgacctcaggcaggggggttgtctgtggagcctccttgcctccatctgcagggaaagtgagtcagggcaccctggagggtggctggaaagagaaggtgagaagatgtgttgaatccaagtactgcttggcagacctacaactttacaaatgacctgtgttccacctagagagggtgccagccctctcagcattatgaagtgcccctcctctgtctgcatccccaggacacccatgggtggggagggcagagattggggagcacctatagaggctctaatgctctaaggtgacagtgatgaggacctgggtgcacccatgagtggagaagctaggcctgtccagagaagcaagacaaacacacacacacacacacacacacacacacacacaggcacacatgcatactcaaatacattgcatacacacatgtcagttcaggggatagaggacactgactctgggccctgttgacccaagcagactcccatggtggtgggttgtgtcaccccacaatgtcactgttgctgagttcccatcgcctctgtgttgtggagcagttagagacacacagcagtg

SEQ ID NO: 721547 - DNA, 2186 bp, Homo sapiens
cctgccaggtttgtccatgctaatgttacaattttctttatgtagttcaaccgtattttgtatggagatactttgaggctctgtaaatatctggttactcctcagaacccactagatttagcatttcatggatgacttgtgtttgaacaattattactatgatggttaccagatgattattttcttattttcttctttgttctacatggagaaataaaaccaataaataagggagaaggaaagctcatgattctgatgctccaattccccaagattaggccagtagtagacattctaagctgactttatgtctctttgatttgtctccattactctgtcggcacttttttactttctggcagaagatgttctaagctcagcttgtattttctctgcgccagctctggaatgagtaattttttttagaagaagaggtggagccactgaggaagcacaggtgagccctccccaktgtgtactcactggtccccaacagaagaaccactgccacatccactgaagtaccaagaaactagcaaagggccttctggctgtctggggagagtcctcatgtggtccctggctgtctcagaggttctggattagtcttcctgtagcctctgtgttgtgtgtttagatcggggctctgtgggaagggccctgagagacccaacagcacagcatgccttatctgccaaatgtccctcccttcctcacactctgacactcaggaatagggtagatggtgtgtccaggcagtgtcaggccacctcactttctcctttgagacgggcccagatgtcgcggggtgagtgtggagctgggaacctggagcctgaggccaactgtctctccctgtgtcttggaggaaaggccatgtcccaaaaaaaaccccagggcctgacctctgggcacacatgcagggagggagggtctatgagctgagggggacattgtaatgagactttgaacccctttgctctggggcctggtcagtggaccatggtcagaaatgacctggtcatcaggacctagtcatttgggacctgatcagcaggggcctggttagtggcggcctcctcagtaaaggcctcatcagtggggacctggtgacctagtcattggaagcctggtcagtggggggacctagtcagtggtggctttattagtggggcctgatctgttggaacataaacaatgaaaaacaggttggtggggcatacacaatatatcacgggcctggtcagtgtggggccttactggcttggagcctggtcagtgattgcctggtcagagggggctcggtcagctgggtactccttcatggagaattgttcagtggggggtcgggtgagcagcaacctggtaaattgtggtcttgtcagtgggaacccggtcttgtcaatggggaccaggtcagtggaaaactggtcagtgggggctggccatgaggcctattaagtgtgggcctggttaggaagacatggtcagtggggacttgatcagtgggacctggtcaatggaggagtgttcattaggggcctcatcactcatcactgggaacctggtcaggggcagttggtcagtacctggcctgttggccactatgtgacctcaggcaggggggttgtctgtggagcctccttgcctccatctgcagggaaagtgagtcagggcaccctggagggtggctggaaagagaaggtgagaagatgtgttgaatccaagtactgcttggcagacctacaactttacaaatgacctgtgttccacctagagagggtgccagccctctcagcattatgaagtgcccctcctctgtctgcatccccaggacacccatgggtggggagggcagagattggggagcacctatagaggctctaatgctctaaggtgacagtgatgaggacctgggtgcacccatgagtggagaagctaggcctgtccagagaagcaagacaaacacacacacacacacacacacacacacacacacaggcacacatgcatactcaaatacattgcatacacacatgtcagttcaggggatagaggacactgactctgggccctgttgacccaagcagactcccatggtggtgggttgtgtcaccccacaatgtcactgttgctgagttcccatcgcctctgtgttgtggagcagttagagacacacagcagtg

SEQ ID NO: 721548 - DNA, 1121 bp, Homo sapiens
gttatttattaattgcaatagttatttatatttcctatatatgtaagtcccttatcagatacacgcttttcaaatactttcttctacttggcgtcttaccttttcacttcttcatactgtcttctgaggcacagcagttttcaattttgaagtccattgaatccatttttcctttggagtcatagctaagaaaacactggcaaatgcagtcacaaagatttatgccagtgttttcttctgagggatttatagttttagcttttacagttaactattttattttgagttaattattaaataagatatttggtcgaactttatttattttttgcttatggatacccagttgtcccagcaccatttgttgaaaagactattcttttcccattttgttcttttgttaagcttgtataaaatcaattgactgtaaaagtgcaggcttatttttagattgtcaattcttagcttgtttatgtctattcttatgtcaaggcccaatcgaattgaatgggaagtttttttcaatcatgttgcatattaccagttgtcttatgtcataataaaaattaaatttagtggaatgtctgtaacttcaccttttttgtcacaaaggagtctctggccagcttataccttacttcctctaagacatgatcagacgccaggcttacaagacacacttaatttctttttttctccattcaagcctttagtctcttttccattgcctcccactatagttacattttcagtaagttttggttacaggwtctgctgacatagtctaatattcagtgcagtatgttttactaactcattataattcatagaaccttccatagatgtttaccatctaggaaggagaagtttaagtctgagccaccagctttcctcagtggaaatcaagtgaagtcatcatcttgcagtttacagaccctctttcctcctggtagctggttctcttgggtagcactgtggctaatccttttcttagtgcagatcttgcattctcagaaaccacagttccctgtattgacctccttttactgaaacagagatgcacactctgctttctatctcagtagaggattcttggaataaaaggtttaactcattccaag

SEQ ID NO: 721549 - DNA, 1121 bp, Homo sapiens
gttatttattaattgcaatagttatttatatttcctatatatgtaagtcccttatcagatacacgcttttcaaatactttcttctacttggcgtcttaccttttcacttcttcatactgtcttctgaggcacagcagttttcaattttgaagtccattgaatccatttttcctttggagtcatagctaagaaaacactggcaaatgcagtcacaaagatttatgccagtgttttcttctgagggatttatagttttagcttttacagttaactattttattttgagttaattattaaataagatatttggtcgaactttatttattttttgcttatggatacccagttgtcccagcaccatttgttgaaaagactattcttttcccattttgttcttttgttaagcttgtataaaatcaattgactgtaaaagtgcaggcttatttttagattgtcaattcttagcttgtttatgtctattcttatgtcaaggcccaatcgaattgaatgggaagtttttttcaatcatgttgcatattaccagttgtcttatgtcataataaaaattaaatttagtggaatgtctgtaacttcaccttttttgtcacaaaggagtctctggccagcttataccttacttcctctaagacatgatcagacgccaggcttacaagacacacttaatttctttttttctccattcaagcctttagtctcttttccattgcctcccactatagttacattttcagtaagttttggttacaggatctgctgacatagtctaatattcagtgcagtatgwtttactaactcattataattcatagaaccttccatagatgtttaccatctaggaaggagaagtttaagtctgagccaccagctttcctcagtggaaatcaagtgaagtcatcatcttgcagtttacagaccctctttcctcctggtagctggttctcttgggtagcactgtggctaatccttttcttagtgcagatcttgcattctcagaaaccacagttccctgtattgacctccttttactgaaacagagatgcacactctgctttctatctcagtagaggattcttggaataaaaggtttaactcattccaag

SEQ ID NO: 721550 - DNA, 1121 bp, Homo sapiens
gttatttattaattgcaatagttatttatatttcctatatatgtaagtcccttatcagatacacgcttttcaaatactttcttctacttggcgtcttaccttttcacttcttcatactgtcttctgaggcacagcagttttcaattttgaagtccattgaatccatttttcctttggagtcatagctaagaaaacactggcaaatgcagtcacaaagatttatgccagtgttttcttctgagggatttatagttttagcttttacagttaactattttattttgagttaattattaaataagatatttggtcgaactttatttattttttgcttatggatacccagttgtcccagcaccatttgttgaaaagactattcttttcccattttgttcttttgttaagcttgtataaaatcaattgactgtaaaagtgcaggcttatttttagattgtcaattcttagcttgtttatgtctattcttatgtcaaggcccaatcgaattgaatgggaagtttttttcaatcatgttgcatattaccagttgtcttatgtcataataaaaattaaatttagtggaatgtctgtaacttcaccttttttgtcacaaaggagtctctggccagcttataccttacttcctctaagacatgatcagacgccaggcttacaagacacacttaatttctttttttctccattcaagcctttagtctcttttccattgcctcccactatagttacattttcagtaagttttggttacaggatctgctgacatagtctaatattcagtgcagtatgttttactaactcattataattcatagaaccttccatagatgtttaccatctaggaaggagaagtttaagtctgagccaccagctttcctcagtggaaatcaagtgaagtcatcatcttgcagtttacagaccctctttcctcctggtagctggttctcttgggtagcactgtggctaatccttttcttagtgcagatcttgcattctcagaaaccacagttccctgtattgacctccttttactgaaacagagatgcacactctgctttctatctcagtagaggattcttggaataaaasgtttaactcattccaag

SEQ ID NO: 721551 - DNA, 1228 bp, Homo sapiens
agaagacacccttgccttgttttcagagttcataattgaaggagttttaggaaaattcctcctcagcagcttatgtctctctcctggttatctactgcttctcaataatgtttgacatcaataaataaatatcaacatttattagatcctgctttaaaggagactcttttctgctgcataagttatgtttcctgttgtctctttttaawacttattttcctaacaattacccagagtcttgtggcttgaaagaaaaacatttattttgttcatgaacctgtggtttgggaaaaacttggccaggacagcttgtctttgctcccttcagcttccctaggaacagctgatcagttggggaaatggaatcctctgaagctttggtcacccacttgtttgatggttgatgctgccatcggctgtaaacttggttgggacaggcagcgtgaacactgacacaggcactttcaggctatctttgtgcctgatggctctcacaattggggctgggttccaagggaaaacagtctgagatagggaagccacatggtatccctttcactacattctactcattagaaggaagtcagtaaggctggcctatattctgttttttttaaatgggatgaatgtagcttctcttttgttttaattgacacatatatacataattatgggctatagagtgatatttttatacacgtatatagtgtgtaatgatcaagctaactagcacatttactacttcaaccatttttcatttctttgaattgtgaacattgaaaattttctggctttttaaaaatatacaataagtcatagttaaccatattcaccctacaatgccacagaacaccagaactcactccacttatctaactgtaattctgtatccattaaccagcctcccctcccctacttctgtgagcttttttttgttaagagacaaggtcttgctagtgtagtctgggctctgggcaactgtagtcacccagactggagacagtggtttgatcatagttcactgcagcttcaaactcttgggcccatctgatcctcacacctcagcctcctgagcagctgtcattatgggcatgcaccattgcacatgtctgatttttgactttgtggagatatctccccatgttgcccagggagctctggaacttttggtctcaaatgattctcttgccttggtcttacaaagagctaggaaattacaggcatcagc

SEQ ID NO: 721552 - DNA, 1228 bp, Homo sapiens
agaagacacccttgccttgttttcagagttcataattgaaggagttttaggaaaattcctcctcagcagcttatgtctctctcctggttatctactgcttctcaataatgtttgacatcaataaataaatatcaacatttattagatcctgctttaaaggagactcttttctgctgcataagttatgtttcctgttgtctctttttaaaacttattttcctaacaattacccagagtcttgtggcttgaaagaaaaacatytattttgttcatgaacctgtggtttgggaaaaacttggccaggacagcttgtctttgctcccttcagcttccctaggaacagctgatcagttggggaaatggaatcctctgaagctttggtcacccacttgtttgatggttgatgctgccatcggctgtaaacttggttgggacaggcagcgtgaacactgacacaggcactttcaggctatctttgtgcctgatggctctcacaattggggctgggttccaagggaaaacagtctgagatagggaagccacatggtatccctttcactacattctactcattagaaggaagtcagtaaggctggcctatattctgttttttttaaatgggatgaatgtagcttctcttttgttttaattgacacatatatacataattatgggctatagagtgatatttttatacacgtatatagtgtgtaatgatcaagctaactagcacatttactacttcaaccatttttcatttctttgaattgtgaacattgaaaattttctggctttttaaaaatatacaataagtcatagttaaccatattcaccctacaatgccacagaacaccagaactcactccacttatctaactgtaattctgtatccattaaccagcctcccctcccctacttctgtgagcttttttttgttaagagacaaggtcttgctagtgtagtctgggctctgggcaactgtagtcacccagactggagacagtggtttgatcatagttcactgcagcttcaaactcttgggcccatctgatcctcacacctcagcctcctgagcagctgtcattatgggcatgcaccattgcacatgtctgatttttgactttgtggagatatctccccatgttgcccagggagctctggaacttttggtctcaaatgattctcttgccttggtcttacaaagagctaggaaattacaggcatcagc

SEQ ID NO: 721553 - DNA, 1228 bp, Homo sapiens
agaagacacccttgccttgttttcagagttcataattgaaggagttttaggaaaattcctcctcagcagcttatgtctctctcctggttatctactgcttctcaataatgtttgacatcaataaataaatatcaacatttattagatcctgctttaaaggagactcttttctgctgcataagttatgtttcctgttgtctctttttaaaacttattttcctaacaattacccagagtcttgtggcttgaaagaaaaacatttattttgttcatgaacctgtggtttgggaaaaacttggccaggacagcttgtctttgctcccttcagcttccctaggaacagctgatcagttggggaaatggaatcctctgaagctttggtcacccacttgtttgatggttgatgctgccatcggctgtaaacttggttgggacaggcagcgtgaacactgacacaggcactttcaggctatctttgtgcctgatggctctcacaattggggctgggttccaagrgaaaacagtctgagatagggaagccacatggtatccctttcactacattctactcattagaaggaagtcagtaaggctggcctatattctgttttttttaaatgggatgaatgtagcttctcttttgttttaattgacacatatatacataattatgggctatagagtgatatttttatacacgtatatagtgtgtaatgatcaagctaactagcacatttactacttcaaccatttttcatttctttgaattgtgaacattgaaaattttctggctttttaaaaatatacaataagtcatagttaaccatattcaccctacaatgccacagaacaccagaactcactccacttatctaactgtaattctgtatccattaaccagcctcccctcccctacttctgtgagcttttttttgttaagagacaaggtcttgctagtgtagtctgggctctgggcaactgtagtcacccagactggagacagtggtttgatcatagttcactgcagcttcaaactcttgggcccatctgatcctcacacctcagcctcctgagcagctgtcattatgggcatgcaccattgcacatgtctgatttttgactttgtggagatatctccccatgttgcccagggagctctggaacttttggtctcaaatgattctcttgccttggtcttacaaagagctaggaaattacaggcatcagc

SEQ ID NO: 721554 - DNA, 1228 bp, Homo sapiens
agaagacacccttgccttgttttcagagttcataattgaaggagttttaggaaaattcctcctcagcagcttatgtctctctcctggttatctactgcttctcaataatgtttgacatcaataaataaatatcaacatttattagatcctgctttaaaggagactcttttctgctgcataagttatgtttcctgttgtctctttttaaaacttattttcctaacaattacccagagtcttgtggcttgaaagaaaaacatttattttgttcatgaacctgtggtttgggaaaaacttggccaggacagcttgtctttgctcccttcagcttccctaggaacagctgatcagttggggaaatggaatcctctgaagctttggtcacccacttgtttgatggttgatgctgccatcggctgtaaacttggttgggacaggcagcgtgaacactgacacaggcactttcaggctatctttgtgcctgatggctctcacaattggggctgggttccaagggaaaacagtctgagatagrgaagccacatggtatccctttcactacattctactcattagaaggaagtcagtaaggctggcctatattctgttttttttaaatgggatgaatgtagcttctcttttgttttaattgacacatatatacataattatgggctatagagtgatatttttatacacgtatatagtgtgtaatgatcaagctaactagcacatttactacttcaaccatttttcatttctttgaattgtgaacattgaaaattttctggctttttaaaaatatacaataagtcatagttaaccatattcaccctacaatgccacagaacaccagaactcactccacttatctaactgtaattctgtatccattaaccagcctcccctcccctacttctgtgagcttttttttgttaagagacaaggtcttgctagtgtagtctgggctctgggcaactgtagtcacccagactggagacagtggtttgatcatagttcactgcagcttcaaactcttgggcccatctgatcctcacacctcagcctcctgagcagctgtcattatgggcatgcaccattgcacatgtctgatttttgactttgtggagatatctccccatgttgcccagggagctctggaacttttggtctcaaatgattctcttgccttggtcttacaaagagctaggaaattacaggcatcagc

SEQ ID NO: 721555 - DNA, 1702 bp, Homo sapiens
tctgaacacaagcatgaaatactttcgaattttatctagagttggacttgtccgaaagcttttgtataaacttgcttgatgagcaactgttgtccactggtaccttcactgtacaatccacacacaacaaaacttcacaactggacacctaaatttgcactttgtttggtaaagttgaatgaaaaatgttgtcttttaagcttatgctctcttatgaaagctgttattagattaattttactccaagatatgccaattaggaaataacttccaatttaatttcaccagctccctgtgggtggactaattactcacacatcacacttactctggtggtgaaatgcctcaaaagaaggtctccagagtgttgctctacctagaaggacaagaatgaagagacataaaaatcattcattaagaaggaagaagattttccttgcctagattttcacttgtaggatccaattaattttatcacttaatattttgtcctggtgggcattcactttacaaatttgtaaggtcagtagaaatggaaacttttggaaatcaaactgtaaatgttctgtagacgttgacagaaatagctatttggagctgtgcttttgccaactagacactctgagaaaatctgtgagaggatattttcaggaagtcattgaaccccctaaaaatcaagtttattgcttttaccataaatataaataatttatttattatcaaccactttcaatattccaataagtaactttattgtttatttcattgacatgatctacatagacatgcaatttatcttcttttgcgatacattcagaaaatttgctgcctggaaaagccatgttttgaaattaccacctgtttgatgattttttttttatactttaagttttaggacacatgtgcacaacgtgctgtttagttacatatgtacacatgtgccatgttggtgtgctgcacccattaactcgtcatttagcattaggtatatctcttaatgctatccctaccccctctccccaccccacaacaggccctggtgtgtgatgttccccttcctgtgtgcatgtgttctcattgttcaattcccacctatgagtgagaacatgcagtgtttcatttccacttaagtatctatctctaattgtcctttattttcacttccatcctagctctatcccttgtctccttcgtgtgtctcaggataagtgccctataacattttatatttctggaaacccttcaatataaagttattacatgtaaaaataaaaagtctgttttagcaaactttttcttcacaaattatcttttcctagttccctattagacaatttctgtaggccccatatgctattaatttatattcacctttagaagaattttcatcaaaagcacaagtcttatgtaaattktttatatgctatttgtacttctatgtatatatacacacataatcacatacatatatgtaactccggaggcctgcctggactgttaaataactgtattgaacaagagcaagaaaaagctgttcaaatttcaaacaacaagttgaactgaagagctcatatctttgaatgaaatagacactagtagcctttaaaaattaaacatttctactgttttaaaaaattatagccatcacagtatgaggaaaaatgtaataatcctttttaattcttgccattttattaaccac

SEQ ID NO: 721556 - DNA, 1702 bp, Homo sapiens
tctgaacacaagcatgaaatactttcgaattttatctagagttggacttgtccgaaagcttttgtataaacttgcttgatgagcaactgttgtccactggtaccttcactgtacaatccacacacaacaaaacttcacaactggacacctaaatttgcactttgtttggtaaagttgaatgaaaaatgttgtcttttaagcttatgctctcttatgaaagctgttattagattaattttactccaagatatgccaattaggaaataacttccaatttaatttcaccagctccctgtgggtggactaattactcacacatcacacttactctggtggtgaaatgcctcaaaagaaggtctccagagtgttgctctacctagaaggacaagaatgaagagacataaaaatcattcattaagaaggaagaagattttccttgcctagattttcacttgtaggatccaattaattttatcacttaatattttgtcctggtgggcattcactttacaaatttgtaaggtcagtagaaatggaaacttttggaaatcaaactgtaaatgttctgtagacgttgacagaaatagctatttggagctgtgcttttgccaactagacactctgagaaaatctgtgagaggatattttcaggaagtcattgaaccccctaaaaatcaagtttattgcttttaccataaatataaataatttatttattatcaaccactttcaatattccaataagtaactttattgtttatttcattgacatgatctacatagacatgcaatttatcttcttttgcgatacattcagaaaatttgctgcctggaaaagccatgttttgaaattaccacctgtttgatgattttttttttatactttaagttttaggacacatgtgcacaacgtgctgtttagttacatatgtacacatgtgccatgttggtgtgctgcacccattaactcgtcatttagcattaggtatatctcttaatgctatccctaccccctctccccaccccacaacaggccctggtgtgtgatgttccccttcctgtgtgcatgtgttctcattgttcaattcccacctatgagtgagaacatgcagtgtttcatttccacttaagtatctatctctaattgtcctttattttcacttccatcctagctctatcccttgtctccttcgtgtgtctcaggataagtgccctataacattttatatttctggaaacccttcaatataaagttattacatgtaaaaataaaaagtctgttttagcaaactttttcttcacaaattatcttttcctagttccctattagacaatttctgtaggccccatatgctattaatttatattcacctttagaagaattttcatcaaaagcacaagtcttatgtaaattttttatatgctatttgtacttctatgtatatatacacacataaycacatacatatatgtaactccggaggcctgcctggactgttaaataactgtattgaacaagagcaagaaaaagctgttcaaatttcaaacaacaagttgaactgaagagctcatatctttgaatgaaatagacactagtagcctttaaaaattaaacatttctactgttttaaaaaattatagccatcacagtatgaggaaaaatgtaataatcctttttaattcttgccattttattaaccac

SEQ ID NO: 721557 - DNA, 806 bp, Homo sapiens
ttttttctaactgagtaaattaaaagctcacaaatttgtttcgtgagagaaaagataacagattggaagagaattaccatattcattagttgtgtttttaaaaatttaaagtaaaatagagacatgatttttttcatgctttcgaatgcatctataaaaaatagacttgagggctaggcgcggtggctcacgccttaatcccagcactttgggaggcctaggagggtggatcacgaggttaggagttagagaccagcctgaccaacatggtgaaaccccgtttctactaaaaatacaaaaattaggcgagtgtggtggcgcccacctgtaatcccagatactcaggaggctgaggcaggagaatctcttgwacctgggaggcagagtttgcagtgagccaagatcgcaccattgcactccagcctgggtgacagagcgagactccatctcaaaaaaaaaaaaagttactcattaacagcatagaccaattggtttctattggaatttctccattattttcacaatgtcccaggctgtgaaaccaggatttaataacgaaccagaatgccacatctgtgtcacgtgggtagggaccagtcctgatccattaagtccgggtctccaggtaactggactcactgctgggcaaaacagaatgtccggcgtgcgttcctaacgggggacgcagagcctcataggaaatgtagtgtcaccttccaatgatgttaccatcaaggaccttgggaaccagcttttctctctgcgcatcgcgccccgcccacttcgccattttcctccggaagtgc

SEQ ID NO: 721558 - DNA, 806 bp, Homo sapiens
ttttttctaactgagtaaattaaaagctcacaaatttgtttcgtgagagaaaagataacagattggaagagaattaccatattcattagttgtgtttttaaaaatttaaagtaaaatagagacatgatttttttcatgctttcgaatgcatctataaaaaatagacttgagggctaggcgcggtggctcacgccttaatcccagcactttgggaggcctaggagggtggatcacgaggttaggagttagagaccagcctgaccaacatggtgaaaccccgtttctactaaaaatacaaaaattaggcgagtgtggtggcgcccacctgtaatcccagatactcaggaggctgaggcaggagaatctcttgtacctgggaggcagagtttgcagtgagccaagatcgcaccattgcactccagcctgggtgacagagcgagactccatctcaaaaaaaaaaaaagttactcattaacagcatagaccaattggtttctattggaatttctccattattttcacaatgtcccaggctgtgaaaccaggatttaataacgaaccagaatgccacatctgtgtcacgtgggtagggaccagtcctgatccattaagtccgggtctccrggtaactggactcactgctgggcaaaacagaatgtccggcgtgcgttcctaacgggggacgcagagcctcataggaaatgtagtgtcaccttccaatgatgttaccatcaaggaccttgggaaccagcttttctctctgcgcatcgcgccccgcccacttcgccattttcctccggaagtgc

SEQ ID NO: 721559 - DNA, 1921 bp, Homo sapiens
tttgctgcatgtttttataatatggaatctgggaattttcaagtgcttgttgcataccttctgagatgattgtgtagtttttattctttattaatatagtgtatgactttagttgtatcctatattgaaccaaatttgcattcctgaggtaaataccctttaccatagtgtataatactttctacatgttgctgatttcatttgataatatctcgctggtgatttttgtctctgtatttataaggcatattggtcttcattttccttatttgaaatgtctttgtgtagttgttcaatcagggtaaactaattcatagtatacaatgggaagtgatctattttctacttctttattattattgtattgttttgaaatatttttgataaattagtattaattttatgtgattttaataacacatcaatgagttcctgatgagggcagggaggtgaatcctaagaacaatcatgtgagtttggaaggagacccttccccagctgagcctcagcctgagccatcacctacatctagaccgaagacccagagaaactgtgagtagtatgtgtgtggttttgagccactaaggtatgtggtaatttgttatgcaccaagtagtaagtaatatacctgacagtaattgtaaggtggtattctggattaggtcctggaatagataagtatatcattattagaaaacctggtaaaatatgaaggaagtttgtagatcagttaatagtcttgaaaaacagttaaattcttagttttcatgaatatgctatggttataatagatactaacattctagttatctgaatggtatatgaaactgtctgtacttacctatgtgcatttatgtaaatctgcagttatttcaaaataaatatttttttaatattattattttgtttttttttaaaaagtaagcaagtaaagacatcagcaaaaaacttttgcctccaaatacaagtgggcatgtagggagagaacagtaaactagcttttcttttctaggcaacatttgaaacccaggagccactgcttcaggaaggtaccttcaagctccaaggactcttatcctctttctccttccccactacctagtcattagagtgtcagcatccacttcttgaaaggaagatgcctgtttttcacatatcccagaaagccccattttaggacagcatttagcagagtatattcaagatcccactaaccttttcggaagacatgaattccagatgatataaggcaagaataagaaatttcagtgtcagggaacataaatcatatttctgcattcaggatcacgttttcttggtacagggatttcttcttcaagtaatccaaagacaactttactttcaaacctttcagaaaacctgttctaatttactttgcttcattctacaggctccatcaggaactgttcaggaccatgcactctgttgatactcacatggtggaattatattgcccttggccaaccctaaagccatcaagatagcaggtaaacagagtacaaaaaatatttctaataagttgctttagggcagtccctgcttccagaggcctgggaataaatctttacaacagggtttttgcaggtgaatgctactgagtgatatatacatgttgtgcacaaaaagagaaatctcattaggtgaaaaacaaamaaaaaaagaaaacaatatacagcatatctccaaccctccatgcagtgatctgagagacagaaacaggctgtgtttgtttctgcatgtgtactggctgcccactaattctccacacagcttcctattaagaggccattgcacccttcttagtagcagcagagttgttttcaggaaccatgcctaaaaggcctacaaagccatggaactacatatatggaactacgtatgtcaactcccattgacttcc

SEQ ID NO: 721560 - DNA, 1081 bp, Homo sapiens
atttatttttgtatcatagatttaaggcctttatttctctattttaaatatgcattcataattatttttcagtgaaccgtatcaattattttcatctttactcctatttctctttcataaattgaacgttaatatcacttttattagaagcgacagacgttacacattctgttttatgattttccagagatttcctcttaaatagctctggttaaaaagaaggacagaaactattctataagccacaaggcaaaattgtcccacattaaaaagatcttcttatgtttaaaaagatctgtcaaactttctattctatggcttagtttgctgtacatgtcaaaggttaggtagataaacatttaaataatttaggattaaggcacagaataaattatatttcatatattcctatttcagatagaggcaaaattattaaataaagtataatacaggcctgtccctgtgttgcttgaaagcagtgtactttgattattgcctttgcttgagtctaaagatgaggctttggttaagttgagtttgatgttagatgctggcagaagtctgtttctcctttagaggagctacatgtatccaggagtcaattccttgtaccttaacaccacaaaaattagttaatagcacctgataagaacttcttcagggtgttggaggtggtgatacacttcacagtgattaatgttttttagctttgataagccccagcaataagtcagagacttaatttaggattcaatttgggagatgtctgtgaaagatgttagaaagcttaaaatatttcatcaaaactaaaccacaggtccttgtaaaacaatagttattcatttaaccaaagtgatcattgaaagacgttaaaggcaatataaaaagttacwcaggtctaaaaaccttactcctttcaaatttcgggttttttttttaaaagcaattaaacacttaataaaggcagcataggaactatcttgataaaatgtaaaatcttgtttcttaagccagttaccaaaaagtcaaaggaaaaccttttttagtgtgactgcctctccttagaagaaagcccatttag

SEQ ID NO: 721561 - DNA, 1494 bp, Homo sapiens
tggatgaagctggaaaccatcattctcagcaaactatcacaaggacaaaaaaccaagcaccgcatgttctcactgataggtgggaattgaacaatgagaacacttggacacaggaaggggaacatcacacactggggcctgttgtggggtgggaggaggggggagggatagcattagragatatacctaatgttaaatgacgagttaatgggtgcggcacaccaacatggcacatgtatacatatgtaacaacctacacgttgtgcacatgtaccctaaaacttaaagtataacaaaaaaaaagaaaaagaaaaaaaaccttattgctagatatgtaaatatgtctataaaattatgatctaaataacaaatgttaaaacctgtgtgagaccttcaatgctgtacttaataaaggaaatgtcttaaaaaatgtgagagattacctacaagtagtagaaatgaaaaaattgattcatagggtactggattacatcatgtggtactgaggacattagtaggaattcatgtttgactttatatacatatatatgatcaaatgtagaaatatgtgtgcgtttatagatacacatatgttgtgtttatatgtgtatgtgagagttagtatacacacatatattctattgccttgttggatgacagagtagaatcaacagatccctagtagaaatgggaacacacatagaccaaatgtttttttctaataccatgcacaaaaacaagaaactatgattccttgaaaaatagtatctggcatgtgcagggaaacaacacaataagcctggaacactttaaagtgctagcaagtaaaatcatgctaatgaacaacagaatcaaccaaccaaacaaacaaacaaaatcaaacagcaatcatgttggcaattccatatggtacaggatccgacagaaagaccttccaatgacaaaccctgaaacaatttgagcagcaaagtaaataaattagtataagtatagcttacaatacttatctataattttatataataccccatatgatataaataatcgatttaaaatatataataaatgatggagaacagataaattgcctgtggaaaagaaatgcaaatgatatttctgcaagcactgccaataaaatttaaagctaattcttcacttgtgaagtatgttttgtacttagtgactttaaaataaaagcacaacatggaaagggggaaatagatatattaatacgtataactggtataatgtcatcagagtggcacatatcctctgtggtcttcctcacctaaacccacaccagtcgaatcatcagaaaaacgtcaaattccaaatgtaggtgtaagtatcatgaaaaaaaaaaaaaacaaggaaaatttgagaacctggcacagtggagaagagcacaaggagacatgatatctaaatatgttgtggtatcctggatggaatcctggaacagaaaattgacattaaggcaaaaaatatacaatt

SEQ ID NO: 721562 - DNA, 1494 bp, Homo sapiens
tggatgaagctggaaaccatcattctcagcaaactatcacaaggacaaaaaaccaagcaccgcatgttctcactgataggtgggaattgaacaatgagaacacttggacacaggaaggggaacatcacacactggggcctgttgtggggtgggaggaggggggagggatagcattaggagatatacctaatgttaaatgacgagttaatgggtgcggcacaccaacatggcacatgtatacatatgtaacaacctacacgttgtgcacatgtaccctaaaacttaaagtataacaaaaaaaaagaaaaagaaaaaaaaccttattgctagatatgtaaatatgtctataaaattatgatctaaataacaaatgttaaaacctgtgtgagaccttcaatgctgtacttaataaaggaaatgtcttaaaaaatgtgagagattacctacaagtagtagaaatgaaaaaattgattcatagggtactggattacatcatgtggtactgaggacattagtaggaattcatgtttgactttatatacatatatatgatcaaatgtagaaatatgtgtgcgtttatagatacacatatgttgtgtttatatgtgtatgtgagagttagtatacacacatatattctattgccttgttggatgacagagtagaatcaacagatccctagtagaaatgggaacacacatagaccaaatgtttttttctaataccatgcacaaaaacaagaaactatgattccttgaaaaatagtatctggcatgtgcagggaaacaacacaataagcctggaacacyttaaagtgctagcaagtaaaatcatgctaatgaacaacagaatcaaccaaccaaacaaacaaacaaaatcaaacagcaatcatgttggcaattccatatggtacaggatccgacagaaagaccttccaatgacaaaccctgaaacaatttgagcagcaaagtaaataaattagtataagtatagcttacaatacttatctataattttatataataccccatatgatataaataatcgatttaaaatatataataaatgatggagaacagataaattgcctgtggaaaagaaatgcaaatgatatttctgcaagcactgccaataaaatttaaagctaattcttcacttgtgaagtatgttttgtacttagtgactttaaaataaaagcacaacatggaaagggggaaatagatatattaatacgtataactggtataatgtcatcagagtggcacatatcctctgtggtcttcctcacctaaacccacaccagtcgaatcatcagaaaaacgtcaaattccaaatgtaggtgtaagtatcatgaaaaaaaaaaaaaacaaggaaaatttgagaacctggcacagtggagaagagcacaaggagacatgatatctaaatatgttgtggtatcctggatggaatcctggaacagaaaattgacattaaggcaaaaaatatacaatt

SEQ ID NO: 721563 - DNA, 917 bp, Homo sapiens
gctctgttggccaggctggagtgcagtggcatgatctcagttcactgcaacctccgcctcccaggttcaagcaattctcgtacatcagcctcccaagtagctgggattacaggcatatgccaatgcacccagctaatttttgtatttttagtagagatggggtctcaccttgttggctaggctggtcttgaactcctcctaacctcaagtgatctgcccgcctcagcctcccaaagtgctgggattacaggcatgagccactgcgcccggcctcaacttttattttagattaagggatgtttcattttgaatgaaaaatcataacttttatgatagtagaaagcaatttaaatattttagtatttttaggacccattttgtaacctagagaaaagaaaaaaatgctcttgcccaggtctttcattaccctttgcatcatttaaagcattattaatggtgtacatgttctcaattttaaagttttctctctgaaaatacatcctaagattaactgtttaaggaaaatagtaaagctaagtttctagtaagaaactcaccatcctttaaaatgcccaattctctgcatggtccaatagcatatctatttgaagatcaagaattaggaagtaatatagtgcagtgctatatggtcttagaaacacagagaagctattttgagcagtgtaagttctgaagcagactaatacattagcattaaaatacccaaaraggccggacacagtggctcacgcctgtaatcccagcactttgggaggctaaggtgggcggatcatgaggtcaggagtttgagaccagcctggccaatatggtgaaacctcatctctactaaaaatacaaaaattagccgcgcatggtggcgcatgcctgtaatcccagatacttgggaggctgaggca

SEQ ID NO: 721564 - DNA, 601 bp, Homo sapiens
taaaggggcacccctgcccatcgttttgattcttcaaaagtttctgaaaacatatgagaaacactgtgcgcagtctcagacgtccrtgtgtccagccatcaaaagtgacctgaaaagcagcattgacagtgaccaggtgctcaggaaggtgagtgtatggtcttgttttcttattcttctctgaaatgaactggctagggtttactcccaagccacatgggtactcggtccttgtgtaacctcccaaggggttctttctgcccgctgcacaaataaagaccacagcattgtagtaaaaaagagtttgattgacaccaggccagccacgccatgtaaaagatgaagttatcactcaaatcaaactctctgaaaattcaggattgaggtttttaagggtaatttggtgggtagggggtcacaaggtggggaatgctgatttgtcgggttgaagatgaaatcatagggagttgaagctgtcctcttgcactgagtcagttcctgggtagggtccacaagaccagatgagccatcttacccatctgagtggcaccagctggtgctttggaacacagggtctgcaaactgtctcaagcactgatct

SEQ ID NO: 721565 - DNA, 601 bp, Homo sapiens
taaaggggcacccctgcccatcgttttgattcttcaaaagtttctgaaaacatatgagaaacactgtgcgcagtctcagacgtccgtgtgtccagccatcaaaagtgacctgaaaagcagcattgacagtgaccaggtgctcaggaaggtgagtgtatggtcttgttttcttattcttctctgaaatgaactggctagggtttactcccaagccacatgggtactcggtccttgtgtaacctcccaaggggttctttctgcccgctgcacaaataaagaccacagcattgtagtaaaaaagagtttgattgacaccaggccagccacgccatgtaaaagatgaagttatyactcaaatcaaactctctgaaaattcaggattgaggtttttaagggtaatttggtgggtagggggtcacaaggtggggaatgctgatttgtcgggttgaagatgaaatcatagggagttgaagctgtcctcttgcactgagtcagttcctgggtagggtccacaagaccagatgagccatcttacccatctgagtggcaccagctggtgctttggaacacagggtctgcaaactgtctcaagcactgatct

SEQ ID NO: 721566 - DNA, 1682 bp, Homo sapiens
cttcagccgagtctggaggtgatggagacgcagacatcatggaaggaataaggccatgctggagcactgcctgcatgccagggaggccaaatgaagtgacgggcatggctaagatgaggtgggtgacaggtgtcttcattgagtaagcagctgacagcccagaaggcaggcaggaggcagatagattagctggatttcatagctgtgtggccactggtgtgttagtttgtggcttccaagtgtcagtccaagttgacccactgtcagaggaagctccagggttggcatgtggtgagataatgaatccatgtagtcctcaaggaagaggttgggtggataatctgtttcatagtgagtgaaagaaaatgtgctattttatggaagagtagaaatacttggactgatggtccgcaagcatcaatatggagaaatattttgagcttttccctaaatcttccttcttgaggatgaaaaagttaatttctctgagcctttccctgtcatgttttggaatgtgactgacctgcttctaatcataaaggtatattttgccccttctctctccgttccttttgaagaggaatgtaagttactaggtagttttttggctccttgaaaagctcattgcaaaccactctttaagaacggccaagcagtgattatagtacatcaacagcatgaagtattgcatggtcctctaaagaaccaatgagaagtggaaaaagttcaaaagtagtgtggaaaatatttctcaaaccatctgaagtggggaaaaatagaaccatgacagatagacgcagtgacttcagctatgctaaacgtgtgcacacctgaccaacattggacagggacttcagagacgttaaaatggctgtagagcgtttggtcagatgtggtggtatctggtgtcatgctaagaataagtaattccagggccagagtgctctgagttgaaatcctgcctcccacacttgtcattttgggaatacaactcacctactcagagcctcagcttcccattttttactttgtagattaaaatgacaaactaagcttgtggcatttactaggctcagtaagcagtatgrattatctttactggagaagaatttttaaagtatgttacaaagtagttataataacttaaaggcttaaaaacacttcggttaataatagtacatgttaggcctggcgctgtggctcacacctgtaatcccagcactttaagaggccaaggcaggcagatcacctgaggtcaggagttcaagagcagcctgatcaatatgatgaaaccccgtctctactaaaaatacaaaaattagccgggcatggtggcatgcgcctgtaatcccagctacttgggaggctgagacaggaaaatcgcttgaaccctggaggcagaggttgcagtgtgccaagatcgcgccattgcactccagcctgggaaacgagcgaaactccaactcaaaaaaaaaaaaagaaaagtacatgttcattgtagaaagttttagcaatacataaaaataaaaaatattttaaaaatttcacttgtaatcatgccatccagaaatggccacagtttaacatcttagaatgcagatctgtgaacctggttcaagtcctgggtctgcctgctgccccttaggaaattacttagcgtccctgagactaaggttcctcct

SEQ ID NO: 721567 - DNA, 1682 bp, Homo sapiens
cttcagccgagtctggaggtgatggagacgcagacatcatggaaggaataaggccatgctggagcactgcctgcatgccagggaggccaaatgaagtgacgggcatggctaagatgaggtgggtgacaggtgtcttcattgagtaagcagctgacagcccagaaggcaggcaggaggcagatagattagctggatttcatagctgtgtggccactggtgtgttagtttgtggcttccaagtgtcagtccaagttgacccactgtcagaggaagctccagggttggcatgtggtgagataatgaatccatgtagtcctcaaggaagaggttgggtggataatctgtttcatagtgagtgaaagaaaatgtgctattttatggaagagtagaaatacttggactgatggtccgcaagcatcaatatggagaaatattttgagcttttccctaaatcttccttcttgaggatgaaaaagttaatttctctgagcctttccctgtcatgttttggaatgtgactgacctgcttctaatcataaaggtatattttgccccttctctctccgttccttttgaagaggaatgtaagttactaggtagttttttggctccttgaaaagctcattgcaaaccactctttaagaacggccaagcagtgattatagtacatcaacagcatgaagtattgcatggtcctctaaagaaccaatgagaagtggaaaaagttcaaaagtagtgtggaaaatatttctcaaaccatctgaagtggggaaaaatagaaccatgacagatagacgcagtgacttcagctatgctaaacgtgtgcacacctgaccaacattggacagggacttcagagacgttaaaatggctgtagagcgtttggtcagatgtggtggtatctggtgtcatgctaagaataagtaattccagggccagagtgctctgagttgaaatcctgcctcccacacttgtcattttgggaatacaactcacctactcagagcctcagcttcccattttttactttgtagattaaaatgacaaactaagcttgtggcatttactaggctcagtaagcagtatggattatctttactggagaagaatttttaaagtatgttacaaagtagttataayaacttaaaggcttaaaaacacttcggttaataatagtacatgttaggcctggcgctgtggctcacacctgtaatcccagcactttaagaggccaaggcaggcagatcacctgaggtcaggagttcaagagcagcctgatcaatatgatgaaaccccgtctctactaaaaatacaaaaattagccgggcatggtggcatgcgcctgtaatcccagctacttgggaggctgagacaggaaaatcgcttgaaccctggaggcagaggttgcagtgtgccaagatcgcgccattgcactccagcctgggaaacgagcgaaactccaactcaaaaaaaaaaaaagaaaagtacatgttcattgtagaaagttttagcaatacataaaaataaaaaatattttaaaaatttcacttgtaatcatgccatccagaaatggccacagtttaacatcttagaatgcagatctgtgaacctggttcaagtcctgggtctgcctgctgccccttaggaaattacttagcgtccctgagactaaggttcctcct

SEQ ID NO: 721568 - DNA, 647 bp, Homo sapiens
ttcacagaaatagataaaataatcctaaaagtattatagaaccacaaacaactctaaataccaaagcaatgtgagcaaaaagaccaaagctgaaggcacgctactaaaatataatacaaasttatggtaacccaaaaagcatggaactggtataaaaacagacatgggctcgggcgcagtggctcacgcctgtaatcccagcactttgggaggctgaggcaggtggatcatgaggttaggagttcaagaccagcctggccaacatggtgaaaccctgtctctactaaaaatacaaaaattagctgggcgtggtggtgcgtacctgtagtcccagctactcaggaggctgaggcaagagaattgcttgaacctgggaggcagaggttgcagtgagccgagatcgcgccactgcactccagcctgggcgacagagcgagactctgtctcataaataaataaacaaacaaacagacacatagatcgatggaacagaatagagaactcagaaagaaatctacatctttacagccaactgatttataaaacatagattaaaattggatctctctgaatgtaatttttttgatgatgttactttacagccatatacatttttacataattataaaataaataaaagtgaaagg

SEQ ID NO: 721569 - DNA, 647 bp, Homo sapiens
ttcacagaaatagataaaataatcctaaaagtattatagaaccacaaacaactctaaataccaaagcaatgtgagcaaaaagaccaaagctgaaggcacgctactaaaatataatacaaagttatggtaacccaaaaagcatggaactggtataaaaacagacaygggctcgggcgcagtggctcacgcctgtaatcccagcactttgggaggctgaggcaggtggatcatgaggttaggagttcaagaccagcctggccaacatggtgaaaccctgtctctactaaaaatacaaaaattagctgggcgtggtggtgcgtacctgtagtcccagctactcaggaggctgaggcaagagaattgcttgaacctgggaggcagaggttgcagtgagccgagatcgcgccactgcactccagcctgggcgacagagcgagactctgtctcataaataaataaacaaacaaacagacacatagatcgatggaacagaatagagaactcagaaagaaatctacatctttacagccaactgatttataaaacatagattaaaattggatctctctgaatgtaatttttttgatgatgttactttacagccatatacatttttacataattataaaataaataaaagtgaaagg

SEQ ID NO: 721570 - DNA, 647 bp, Homo sapiens
ttcacagaaatagataaaataatcctaaaagtattatagaaccacaaacaactctaaataccaaagcaatgtgagcaaaaagaccaaagctgaaggcacgctactaaaatataatacaaagttatggtaacccaaaaagcatggaactggtataaaaacagacatgggctcgggcgcagtggctcacgcctgtaatcccagcactttgggaggctgaggcaggtggatcatgaggttaggagttcaagaccagcctggccaacatggtgaaaccctgtctctactaaaaatacaaaaattagctgggcgtggtggtgcgtacctgtagtcccagctactcaggaggctgaggcaagagaattgcttgaacctgggaggcagaggttgcagtgagccgagatcgcgccactgcactccagcctgggygacagagcgagactctgtctcataaataaataaacaaacaaacagacacatagatcgatggaacagaatagagaactcagaaagaaatctacatctttacagccaactgatttataaaacatagattaaaattggatctctctgaatgtaatttttttgatgatgttactttacagccatatacatttttacataattataaaataaataaaagtgaaagg

SEQ ID NO: 721571 - DNA, 761 bp, Homo sapiens
agcctaccatactcttgttgttttcatcctctttttatcttttcactagcaaggatggagaggaccccagtaagcttggaaaccacatattgaaaatggtgtcatggttccactcagcctaatactctgagcaaagatgtggaggagtgttaaactggcatggtcatcatagagtgaacaaaatataaatgtctgctgtgtttgaggcacttacatatcaagtatgtytgatgtatcattgcagttacccaaggtagagggagtggtattttatacagggtggttaaagaagcctctctaataaagagaggctgagagaacttaatgaagggagagactcacttatgtgtctataaaaagcagagtgttaactgtcagagggagaaattattgcaaagaagtggaggcaggagtatttttgagaaagcacaaggaggctaacattactggaacagtagacacaggtgggagaaagtgaggtcagaaaagtaccgtgtggccatatcatattgagccttgaaggctgtgataaacttttaggattttattctgcataagacagaaaggcagagatataatacaatctaatcctatttagaaaatcatgagtcctgtgttgataattaaatgtaggcaggtgcatgaacaatttaaagaccattatggtattctaatataagcacttactgttataattttctttctgaactccactttagttgcatcccataaaccttgatatgtttgtttttcatttagta

SEQ ID NO: 721572 - DNA, 1366 bp, Homo sapiens
ttaagggtattagcagatcttaaaaatgattaataaaatgtaagcatggtaatataatggaccacatttataaaacagactcttaggaaggaggagatgtttatgggtcctgttagaattgggaactcatattctgatgctggacagggaactggggagtctgaaagaggttaacagaaggaggtttttagctttattaaacatccctttgcagaggatgacttaatttgaatttcctagttggctggaagctatatgttgatatttagttggttctagggaaataagtacaatatttcctgcatatgttaatttatggactgtgacctaaacccactatgttgattatataagcatatgttccataatttcatggaaagattttgtgaagacaggccttgacaactcttgataattgctacttctgagaagtggcatggaatctagggacgtaagatagaatggaactcactatttatcgaaaacatgtttgtaatgttcagttttgttaaaccaaactgaacatttaatttttcattagctgtataatagaaaattaaaaatggagacctccatataccacatatttacaaattatacaatatgcatgtttattcatcgtattatatgaacagtatatatgaatatccatattttaatatttgaaatagctatttttatagctttaaaaaattatgtttaaggtttgcaatacattttcatactatgaatctgcattttgtactaattgttggttttttaatgtttgccataggaaggatattttattaaatgaagggcatgtaatgttcttaataacagacaaacggcctgctatttaaatatatctggagagagggtatgaagaaatacactgattttaactgctcttaattttctctctctctgtatctctctatcgttcctttatctctatctctgtctctatccatctctgcttaccaagcgtaatactcttgttgagatgaagaaaaaatgccccctttttggcttcctgatcccacctttcatctgtctttagaattcaacaggcatagaaaragttatattttcatggatgctactgacacttttcagccaaaatgggctaatccttattcttctcttgaacagaggcgaacaactgtccatgctttctgaagctggagctagaatatatatataaatttaaagacacttttcattcacatgagctgcttctctgttagatccttttgtgccacgagatgactaccaggcaacaacatccaaatgcttgtttcaggatagcttaacaaaaggatttctcaaagtcgctttacaaaagatttcatataccacatataacaaaagccatatttatttt

SEQ ID NO: 721573 - DNA, 1489 bp, Homo sapiens
tgcgatgtatatttttaaatgagtagtatgcatattatgtttacaggtcgctactgtcaaatcatatagtttgaactaaatgatgcagaatggacacatacctatgtacatgggttcttttttttcacttattcactaaatccttattgactgtccagcttgagcattaaaaataaagtgaaaaaataagccttcagaaataaagagatatttccactgtggagcagaagatgtattatggggatctgtctggaaaagtaaatgattcctacaagggcatgcagccggaggagcggctgtagcaagaatgtaggacccagggctggatgcatgccttctttccttgagtccacactgaatagttgtgtgatcccacagcaaagcattccatcattttgaccttctttcctcaactggaaaatgagattaatcttacctactttatagtgctattgtgaagatgaaagggaaattgtatgcaaaattacctagcacagaggagatagccagtaaagtttttcgctttttccctttctgttatttagtggtaagatctcaagcaattcagtatcctgaaaatgcagtgtatggcacataggtcattgcaatacatttccttcatgaaactcttcctggccctgacttggcgtctcatgcaatgtccttcatttctcctcccctctcccaacccagaagtcaggttgtttgtttgttctttccccagatttctgctttcttcatcctccaggcttccttttctcttgagcatctatttgcttccctttcctttctacagcattttcttactctttttttaaaaaaattatacttaaattatgggatacatatgcagaacgtgcaggtttgttacataggtatacacatgccgtggtggttcgctgcacccatcaactcgtcatctacattaagtatttctcctaatgctatccatcctctaacccctcgccccctgacaggccccgatgtgtgatgttyccctccctgtgtccatgtgttctcgttgttcaactcccagttatgagtgagaacatgtagtgtttggttttctgcttctgtgttagtttgctgaaaatgatggtttccagcttcatccatgtccctgaagaggatatgaactcatccttttttatggctgtgtagtattccatggtgtgtatgtgccacattttctttatccagtctataattgatgggcatttgtgttggttccaagtctttgctattgttaacagtgctacaataaacatacatgtgcatgtgtctttatagtagactgatttataatcctttggatatatacccagtaatgggattgctgggtcaaatggtatttctggttctagatctttgagcaatcgccacactgtcttccacaatcgttgaactaatttacactcccaccaacagtgtaaaagcatttctttgggttctattcttctcaaaacctgtatgtatgtctgtatgtatg

SEQ ID NO: 721574 - DNA, 1051 bp, Homo sapiens
aaagagcggcatgaagagagaaacagatcaacggaacagtaggggccatttgcttttccacatcgttccgtctgctctaggttctggggtctctgattagctctgtgtcttgctgggtgatttaacagatttttttttctgacttactgacaaggaagctccaaacttccaataaacctgccatggaagccagctgggacccaaggagagagccacaagggtgttttaaaagcacctggctctctggggaagctgctgaratgtaggtgttagtaattctctctccgactgcttcttgctgcaggctggccagccttggcttaccccagagggcgacagggactttggccagaagagtcagggaaggagacaggggtgcaaactgggtgagaccaaccttgatcactgtaggatcccaagccctcagagtggggccaggcctctggggtaggccctcggtcatgggcccaagttgcaggaggactcacttgttataggacgcatctgattcttctgcaagggagattcgtgtccagaggagagccataacttgctagggctggagtcgattccccgtccacacccacctcctcttatatgtgtgtgattcttcagccactgttacatggaagcagagatgaaacattgcctctggtatgagaatacaggccttcttacactgctgcaaaagtatgaattggtaaactctggtgggggttaatttggcaatacatgacaaaagccttaaacaggcaatgctttcccccaacaactgcatttccaaaaatatattcacaggaaataatcaaacagcatttgaaagtgaatgtacaagggtgcttttgtattgttgattatcacagcatcagaacactgggaaagctctcgacatccaccaatagcgttggttagtaactgagggtataaccatgccttggagtagtagataaccattcagaatgatgctgtggtgccatatgtgttaacacggacgcatatttacagcatgttggattttaaacggccaattacaaaacagcattgcatgatg

SEQ ID NO: 721575 - DNA, 3032 bp, Homo sapiens
  misc_feature 1839, 1896, 1897, 1898, 1899, 1900, 1901, 1902, 1903, 1904,1905, 1906, 1907, 1908, 1909, 1910, 1911, 1912, 1913, 1914,1915, 1916, 1917, 1918, 1919, 1920, 1921, 1922, 1923, 1924,1925, 1926, 1927, 1928, 1929, 1930, 1931, 1932, 1933: n = A,T,C or G
  misc_feature 1934, 1935, 1936, 1937, 1938, 1939, 1940, 1941, 1942, 1943,1944, 1945, 1946, 1947, 1948, 1949, 1950, 1951, 1952, 1953,1954, 1955, 1956, 1957, 1958, 1959, 1960, 1961, 1962, 1963,1964, 1965, 1966, 1967, 1968, 1969, 1970, 1971, 1972: n = A,T,C or G
  misc_feature 1973, 1974, 1975, 1976, 1977, 1978, 1979, 1980, 1981, 1982,1983, 1984, 1985, 1986, 1987, 1988, 1989, 1990, 1991, 1992,1993, 1994, 1995: n = A,T,C or G
tacagctatggggatgattgtctgagttaaccgtgttagacttgctacaaagacaggaaaattttattgattgacaatgacatctctgccacttcaattgtgacctagtagttcatgcgagatgtatctttgctattctagcttattttccttcacaccagcgcagcatggccacagtaggataagggagcgaaaacctgtgtgagacttcctcagcaggagcaagtcctgcaggcctactggtgggcggaggcctgctgagaaaggtgtcacagaaaggtccactcggggaccaagactgtcactcaccaagactgtcactgccaccctactagctggcagtgctcagggggaggagtgtagattggaacaaaacactcttattttcattcaatagactaaaaagtatttacaattgtgttcttccaaatgaagtatttaaggcctcttatttttatctccttctactattttttttccttaatcacctcattaatttccagtttggttaaagtattcaacaggctggaactatatggctcatttattctactttacttatttactttttcaaagcaaaatggataaaatcaattaataaatttaagcccgtttgctatgatttggagagctgtcaaataatgcatcttcctttcttcactaaagtgctataaaataatttttctgtgagaataaggcaaaatggcagactgttgtcttctgaaggcttaagttcatttctgtccagagccaggatatgggctaagcagcttgcacaaagattctaccatattctatcaatgaaattcttaattgctggctttattacttatatgaaaagcataaacaattaatcagtattctgattctcttttatacatgtataaatctatttttatgatgattcctatgatgtgtttgagttttaaactaaaactaaaacttgtgtagggaatggcaaaaccactcttcagcaccaatttggaaagcataatgattgataatagcatacacacaggcaaagacacacaatctgaaatatagtcaagtatgttagaatgaaaaagtgcctgtctgatgggaagaatggatagggtatggattaaggctggtcagagaaaaggaatatgttaatgatgcccaggagaagaatgaaagggattgctaaatgctctagggaaggaagtcttcagacacatctgaggtgggtaaacttctgactgtaataatttccaacgtaggcatagcttgttctcctgtttacaaaaaagaagtgaaaacactagaaaataggtgttgagggggtggggggcaaagtgagggagagcattaggacaaatacctaatgcatatggggcttaaaacctggatgatgggttgatgagtgcagcaaaccaccatggcacatgtatacctatgtaacaaacctgcacgttctgcacatgtatcccagaatttaaagtttaataaatacattttaaaaaaagaaaataagtgttgaatagcacagctcaatctgtatctggtagtaaaaataatccactcaagggtgtcatgggtactgagttgtatatcataattaaagtgcttagaccaatgcctggtacakttagtgctcaacacatactggatttaatttatttatacatacagacacagctagtgaaagatagagatatatattacatgtatatgccatttatgaagggaaaataaataaatcacagaaatctacaaaagaaatttacacaactttgcataaggctagaaatgtttatattttctgttttcttttttaatttataattaagtagttacatgctcattgtggaaaagtgnaatggtacagaagtatatatagtaaaacattataatgtatacatcttttagccattnnnnnnnnnnnnnnnnnnnnnnnnnnnnnnnnnnnnnnnnnnnnnnnnnnnnnnnnnnnnnnnnnnnnnnnnnnnnnnnnnnnnnnnnnnnnnnnnnnnntatttgtcagtgaatgtatgcatatatgtgcatgtatatatgagtacatttgaatatgtgaatatgtacattcatatataaatgtatatatatttgtcattaacatttcatggttttctttctccaggacctacacatagttattaaataatttgaattttcattttttctattcactatgaaagaaatttttttattatatttctctatggtattgctttcattgaggaacccttaatttttgaatatttattttattaccagtcattttactgaattctcttgattatcctaataatcgttcagttgacttactttgctttgccaggataagaatagtatcacctgcgagtgatgatattgctgttttcctttcctgtagcttttgttttttcttttcatgtattggttagatatcaaatgacaaatatgagaatacaaagattatgaattttaataggaattatacttattttttatcactgtaggtaatattgactgatataagcaaataataaccagctattgtgccaagtgctagaaaactcatggttaaaaacatgcctgttcaccagaatgtaagctcgactattcataactttaaagaatggtagcatttttaaataaattagaaataaatttcaaatatatccaattaccttcttagcatattttgagaggagttcatgtttttctcctttttgaactattgacgtgaagaattacatgaatacatttctgaatattggattatcctttttcatctgtagaaaatagcacatttgatgacttcatcatttttaatactctaactggatattttttaatattatatttataacttttgagtgagtaggttgtagaacttcatagtttgagtgtagagttagaaaaatctgaatttgtatcccatttctttcctagtttagccttgtattcataagctacttctccaaacctgctaagtcttagtatctttatggataatgagatgattataaaatatcctacccttttagatggctgaaggtgttaaa

SEQ ID NO: 721576 - DNA, 916 bp, Homo sapiens
ggacttgagcatttgcagattttggtattcatgggggtgctagagccaatcccccggatgtactgagggatgactgtatatttctgttttggtatgacccatggttttatggaatccactgaaggtcttggaactatcccctgaagataagggggactacggtattaaatcacttttcaccttatgttgtatttaattttattgattttgatcttacataggttttgagttccttgagattggggatcctatttcccaaggtcttcagtgaaagaattatttactgagaattattgttactgagagagcaattagcaaatttttttgatgaacctttcaattttgtttctgtaaccttccagttttggttttgtaaaaaactatagtatcatttattttctgtcattgttttctacagactttagataaccaatctgatttaaaaattgtttgcattttaatgttcaaaaccaaaatagcctcttgggcaaatagaaaaacaaagagggtattgttattttaacctcttataatgtaactcattcattgcctttatagtacatcatgaatacaatttaataraatcattttctcttttaatagttacatacaaattgaacaccaataaggttaatcagtaaccatgtagtattaatcaacatgaagaatcagtttcaatctacatactccctctcaaaactgcttacatcaaatgcaccgaaacaacagtatagaaattgactgaagtacaggatagtgagtactagtaatcccaatattgaggaatactttaggattcatttatttatttatttggcaaacatttattcagcatctactatttgtcaggcactgtccctgacctggagaatatctgtaaataaaagagtcagctctcaactctcatggaatttaa

SEQ ID NO: 721577 - DNA, 1089 bp, Homo sapiens
tagatattgttcatgcaaagaaragagatggttggttggagtgtgggtgtgtgattcactagaatatatggatccttgtttagaaatatttttatcatttttagtatagcgatgaatacattgatggtatttctgaaatctttactggaaaatatctgttggacaaaacaatggagggatgtttggatctattcctaagtctcttgccaggggaatatttcatttattgtcagttttcccccttggcactgtaaaagtagttttttgtgtgtattattagaccataaatcttttactttttctttctgttttagctactgagtatgctggatcttggagcacccatatcaccatttgctgccccacgacccctaagtcatatgtgcaacttctgtcgacatctacattgttataggcaaaaatcatgaggagcatatggttttcattctaccaagactttcatttcacactgttaccagaagggttagaaatcctgattggatgggaaggagattagctttttccttagtggaataatttcattttaacagaggggtcaccttcctaagctaaatgtgaaaagaatgatagaaagagtacagatcatggaaaaaaaaaaaaaactagaaaggctttgtagtaaattttgatatgacttcagagagttcatcctcacttcatgtatttgaataaaccctttaaaatttaggtaactaaattattctatttcaattctcacttttctcatttacgtcacttttatacaacaagcactttccaccatctggctgatgtatagaataagaagcattttcagggcgctgactcgtctggtctatccaagttcactgaagggacctatttaacccccaaagcatcaaactctattaatacagtgtaaccaaaagagctaaactctaccctgactaaagaactttaaaagaaatatcaagtcatcaggtatctcaatgacttgtttcttattgacatcaataagatgtctattcaatagagtagaaatagaatagaaacatccatgtattttataaagatgcacaagaaataaaccaatacatgagtataatttga

SEQ ID NO: 721578 - DNA, 1089 bp, Homo sapiens
tagatattgttcatgcaaagaagagagatggttggttggagtgtgggtgtgtgattcactagaatatatggatccttgtttaraaatatttttatcatttttagtatagcgatgaatacattgatggtatttctgaaatctttactggaaaatatctgttggacaaaacaatggagggatgtttggatctattcctaagtctcttgccaggggaatatttcatttattgtcagttttcccccttggcactgtaaaagtagttttttgtgtgtattattagaccataaatcttttactttttctttctgttttagctactgagtatgctggatcttggagcacccatatcaccatttgctgccccacgacccctaagtcatatgtgcaacttctgtcgacatctacattgttataggcaaaaatcatgaggagcatatggttttcattctaccaagactttcatttcacactgttaccagaagggttagaaatcctgattggatgggaaggagattagctttttccttagtggaataatttcattttaacagaggggtcaccttcctaagctaaatgtgaaaagaatgatagaaagagtacagatcatggaaaaaaaaaaaaaactagaaaggctttgtagtaaattttgatatgacttcagagagttcatcctcacttcatgtatttgaataaaccctttaaaatttaggtaactaaattattctatttcaattctcacttttctcatttacgtcacttttatacaacaagcactttccaccatctggctgatgtatagaataagaagcattttcagggcgctgactcgtctggtctatccaagttcactgaagggacctatttaacccccaaagcatcaaactctattaatacagtgtaaccaaaagagctaaactctaccctgactaaagaactttaaaagaaatatcaagtcatcaggtatctcaatgacttgtttcttattgacatcaataagatgtctattcaatagagtagaaatagaatagaaacatccatgtattttataaagatgcacaagaaataaaccaatacatgagtataatttga

SEQ ID NO: 721579 - DNA, 1089 bp, Homo sapiens
tagatattgttcatgcaaagaagagagatggttggttggagtgtgggtgtgtgattcactagaatatatggatccttgtttagaaatatttttatcatttttagtatagcgatgaatacattgatggtatttctgaaatctttactggaaaatatctgttggacaaaacaatggagggatgtttggatctattcctaagtctcttgccaggggaatatttcatttattgtcagttttcccccttggcactgtaaaagtagttttttgtgtgtattattagaccataaatcttttactttttctttctgttttagctactgagtatgctggatcttggagcacccatatcaccatttgctgccccacgacccctaagtcatatgtgcaacttctgtcgacatctacattgttataggcaaaaatcatgaggagcatatggttttcattctaccaagactttcatttcacactgttaccagaagggttagaaatcctgattggatgggaaggagattagctttttccttagtggaataatttcattttaacagagggrtcaccttcctaagctaaatgtgaaaagaatgatagaaagagtacagatcatggaaaaaaaaaaaaaactagaaaggctttgtagtaaattttgatatgacttcagagagttcatcctcacttcatgtatttgaataaaccctttaaaatttaggtaactaaattattctatttcaattctcacttttctcatttacgtcacttttatacaacaagcactttccaccatctggctgatgtatagaataagaagcattttcagggcgctgactcgtctggtctatccaagttcactgaagggacctatttaacccccaaagcatcaaactctattaatacagtgtaaccaaaagagctaaactctaccctgactaaagaactttaaaagaaatatcaagtcatcaggtatctcaatgacttgtttcttattgacatcaataagatgtctattcaatagagtagaaatagaatagaaacatccatgtattttataaagatgcacaagaaataaaccaatacatgagtataatttga

SEQ ID NO: 721580 - DNA, 1089 bp, Homo sapiens
tagatattgttcatgcaaagaagagagatggttggttggagtgtgggtgtgtgattcactagaatatatggatccttgtttagaaatatttttatcatttttagtatagcgatgaatacattgatggtatttctgaaatctttactggaaaatatctgttggacaaaacaatggagggatgtttggatctattcctaagtctcttgccaggggaatatttcatttattgtcagttttcccccttggcactgtaaaagtagttttttgtgtgtattattagaccataaatcttttactttttctttctgttttagctactgagtatgctggatcttggagcacccatatcaccatttgctgccccacgacccctaagtcatatgtgcaacttctgtcgacatctacattgttataggcaaaaatcatgaggagcatatggttttcattctaccaagactttcatttcacactgttaccagaagggttagaaatcctgattggatgggaaggagattagctttttccttagtggaataatttcattttaacagaggggtcaccttcctaagctaaatgtgaaaagaatratagaaagagtacagatcatggaaaaaaaaaaaaaactagaaaggctttgtagtaaattttgatatgacttcagagagttcatcctcacttcatgtatttgaataaaccctttaaaatttaggtaactaaattattctatttcaattctcacttttctcatttacgtcacttttatacaacaagcactttccaccatctggctgatgtatagaataagaagcattttcagggcgctgactcgtctggtctatccaagttcactgaagggacctatttaacccccaaagcatcaaactctattaatacagtgtaaccaaaagagctaaactctaccctgactaaagaactttaaaagaaatatcaagtcatcaggtatctcaatgacttgtttcttattgacatcaataagatgtctattcaatagagtagaaatagaatagaaacatccatgtattttataaagatgcacaagaaataaaccaatacatgagtataatttga

SEQ ID NO: 721581 - DNA, 1089 bp, Homo sapiens
tagatattgttcatgcaaagaagagagatggttggttggagtgtgggtgtgtgattcactagaatatatggatccttgtttagaaatatttttatcatttttagtatagcgatgaatacattgatggtatttctgaaatctttactggaaaatatctgttggacaaaacaatggagggatgtttggatctattcctaagtctcttgccaggggaatatttcatttattgtcagttttcccccttggcactgtaaaagtagttttttgtgtgtattattagaccataaatcttttactttttctttctgttttagctactgagtatgctggatcttggagcacccatatcaccatttgctgccccacgacccctaagtcatatgtgcaacttctgtcgacatctacattgttataggcaaaaatcatgaggagcatatggttttcattctaccaagactttcatttcacactgttaccagaagggttagaaatcctgattggatgggaaggagattagctttttccttagtggaataatttcattttaacagaggggtcaccttcctaagctaaatgtgaaaagaatgatagaaagagtacagatcatggaaaaaaaaaaaaaactagaaaggctttgtagtaaattttgatatgacttcagagagttcatcctcacttcatgtatttgaataaaccctttaaaatttaggtaactaaattattctatttcaattctcacttttctcatttacgtcacttttatacaacaagcactttccaccatctggctgatgtatagaataagaagcattttcagggcgctgactcgtctggtctatccaagttcactgaagggacctatttaacccccaaagcatcaaactctattaatacagtgtaaccaaaagagctaaactctaccctgactaaagaactttaaaagaaatatcaagtcatcaggtatctcaatgacttgtttyttattgacatcaataagatgtctattcaatagagtagaaatagaatagaaacatccatgtattttataaagatgcacaagaaataaaccaatacatgagtataatttga

SEQ ID NO: 721582 - DNA, 1951 bp, Homo sapiens
ctgtataactaacctatgctttgagcaacataaaaaaaaaagccctcagccatcctcctatctagaattaaactcaaatctgcagcatgtcagggtcttgctggaatgaatcagctgatctgatctgatgtgaatttctgacctaattttgctgtaggacttagtgctcaggcagagaaaacaaggttaatgtgttgataacgggtgagattaaacagcagccagtatcttaataaccctctctaatttcagcttcctcttgtgtttgtgattaattcgaatcacttttctattaatcatttcaggggaccacaggttgctttgcttgtttttatgtaaaaatcatgcatccagattttcttcctcaaagctaaacaagatattcatatatgggagtaattttggttaaaaaatcaaatgcatgggcaagttttttattcctcaaaccataaaattagaccagaaaaattctttattgagccagaagtttaatctgcaaggctgattctaaatgaattaacttatgctaggtgctctatatatttttttcaatgctcatgggaaaagttaatctaaggagtccccttatacaggtcaaaatggcgtctgtcctgctggcctattgttttcagttagagccatcaagtttcccaagatgcttaatacaaacttcagaatttataaatttacaatttacattatacttatattaataatagagacaatcctgggtttttcatctagtcacctgccaggacagattagagacaacatttaaaaaagttcctttaaaggtgcctgttagggtaagcctccttcagtcttctcacgtacctttcaagagctatttatacttttggttgttttgactttaattatatcctagacctagcacttattttacattttaagaagctcagtatctgttctatatctgaaataaatagacagatgttggcaagaggaggggcctttcagaacagagccccatgtgagctactcagtcagcatgagaattaagctcttctgacagaggaaattgcagtgaagagtggaccttccaaacatccaacaccatggcaaattgaatgattaaacagaagcccgttggagaatttaaggtaatctttctttgaaaagtaatgttgaatatggagagatggttatagactgactgtcaatagtttcctgttgaggtctattttttatattcttcaagctattggaggatatctttaactaaagatggcctttgtaaaatgtttccaaagaacccgtaagagaaagaaattattatggagtaaggctatgagtcaggggactttttgaactactaaaaatgcaatgtctcctagagaatgtgtgtaatgtaacaaatgaaactgctagaatagagcctgagcatgctaataaaattgctccaagkcttctaactttgaggtagcctaaagaaaatgtcttcattatacatgtgtgggttaccttaaaattaattttaatcatgaattggtaaaaggaaaatcaagtcccccctcaaaatgaatctctgcttgaaacacatgcctctagttaaaagttattctcaataatgctcatatttggaaatacacaatggaatattcatgtccatactggaatgtaaatatagccagcctgctaggaagcagaaaaaaagatcacttaaaaaaatagagaaaagcaatttcaataagatgtacaaggaagatgttttaaaaaataaaaaagaagtatttaaaatccattattttaattagtaaattgcattttcgtctctgatttggggctaagtataccactcagcatatcctgatgtttgaataaaaaatgaagtggttcagcaaagaatgaagagggccgttaccaaggatacttcttaattttctattaggttgatgtttatatgtattgcatagctattttgtttccatat

SEQ ID NO: 721583 - DNA, 1411 bp, Homo sapiens
catgagcatttcatttggaagttaagtggaaaagctaattgtgcattatgtatctgaaattactttcattggaatgcctcrgaatggaattatcaggcttttctttaattaatttggtacagaagtttattgtgaggagcttcaggaataatgccaaggctctgataaaagagttgaactgttggcattcaagtgtttgaaagcctgggttttacagttgggagaattccctcccacccgcccattgcctggaaactcacaaatggtcttcacagcagaagaaagtcagaaggacagcccagcaacgctccttcagcgtacccacaaattgcaaatgagaccattatgcaggtaagttgaatatgaatggcagtgggctttgtcagcctaataaaggagtccaaaatttcaggaaggaaaatgaataaataaaattaaatacactcaacaaagtgaaagtttcattcttaagggaaaaaaacatacttgagatctgataatacattttctttttaaaagtaaaatttttttcacctcttagcagtgaaaaactgaatcactcctacaaccctaatgctgctttcctgaactcagccagcccctattcctagaggacagcacatggaagtggcacctggccaggatggtgggatggggcatgggtgtctgccacaactttagcccagggtttaactctctttaaaaatgctttgcaattttcaagattttcctcaaaatatattttccattccagggaattttttataatacctccaagaaaggtattttgttatgtactatgctttaaaaatattttttctatgttttacaaagttagtgtttgttccattttgtaaatcacttccaattgacattgaattactaaagtcttcaaataaagtttgactctaactctctgagctgaatttgctggaaatgaagaactttggaatgttggatctgtgagaaactttagaaaacatctactttagtcctccagtatccaaggggggtacattctaaggcccccagtggatacctgaaaccacaaccaaactctttatatatactattatatatctatgatgaagtttaatttataatttaggcacagtaagagactaaccataataactaataataaaatagaacaatcataacagtatgccaacatcactacttttgtgctttggggccactattaagtaaaataagggttccttgaagagaaatcccccaattttagtcagttggagagatggatttgagacttattttctgttctcctcagctgcagcatctgattaaagccttcttccctggcaatacttgttgtctcagcgattggctttctgtgcagtgagctgcaggacctagaccaaacccctggcattttgctaacagatcttgg

SEQ ID NO: 721584 - DNA, 1234 bp, Homo sapiens
ctttttctttattctagcaacccattgaaatgtatgtatctcaaatataaaatatgtataggtttatgtaatactaataccctgctgacaatagtgataaaattattatgtatcttgtaataaaatgtttaaaagttattacatattttaaatcaacataacctgaataaaaagctaaatggtatcttacagtattattgagtcataagacaatgtcatataaatacattcctcaaattaatacatatatttaatgagattccactcagaattcaaagattttaaattaaactagggagttttattttttaaatttatgtataaaacacaaatataaaaaaccttctaaaagatttttcaaaaaagagatgaggataaatgtcctgcaacatataaaacatactatgctgcttattaaaatcaatatagtaagtgaagaccaaatacaaagcaaaagtgcagaagataagttgaaaaataaacacacaaatccaagtatttgtggaaaaatcatagtttatttaatcaaagatcttagcataagcagctatagatcttagaatgaaagaattaaatccctgctttgcagtataaaatattaaattccagaaggattaaaataaaaaatgtaaaaaccaaaatataataaaaataggaaaatgtttgtataacatagggcaaggagacatttatcaaacaataaatccagatgccatgaaagtgttgatagatttgactgtatatgaattaacattttgaataaaaaggaagaccattaaagcgatagtcaaataaaaatttgactattaaaaattgtttgaaaatgccttaaagctccttagttcacgaagagtctctataaatcaatgtaaacaagacaaacaatattatttaatgtgacaataatataaacaaaataatcacagaaaaaggaagaaatatggccaaaaacttcagaaagatccacaactcaagaataaaccaaaaatacaatcaaatcaacattgagaatccattattaacccactgcattctattgaaatttcaatacgttgatcacactctgttctggagaggatgtgggaaagcattaattatatattgttggagraaaaaaaagcattgtgtgtaatgtaacatagcagtagctaataacctttaaaacacatgcactttgactcagaatttctattttagcaaagctatgctacagataaaagcatatgatcattat

SEQ ID NO: 721585 - DNA, 1226 bp, Homo sapiens
  misc_feature 766, 807, 808, 809, 810, 811, 812, 813, 814, 815, 816, 817,818, 819, 820, 821, 822, 823, 824, 825, 826, 827, 828, 829,830, 831, 832, 833, 834, 835, 836, 837, 838, 839, 840, 841,842, 843, 844, 845, 846, 847, 848, 849, 850, 851, 852: n = A,T,C or G
  misc_feature 853, 854, 855, 856, 857, 858, 859, 860, 861, 862, 863, 864,865, 866, 867, 868, 869, 870, 871, 872, 873, 874, 875, 876,877, 878, 879, 880, 881, 882, 883, 884, 885, 886, 887, 888,889, 890, 891, 892, 893, 894, 895, 896, 897, 898, 899: n = A,T,C or G
  misc_feature 900, 901, 902, 903, 904, 905, 906: n = A,T,C or G
catttacatctcagtattgttggaagaatatacacaagtttgtatgacattcttagcmcagtgcatggcatgtggtcaataagtattttccaaaatcaatattgttatcccaaaaaaactaagtctattatgctgatcaccatggtctattaaatatcacctagattctctgttaacaaagaaaagctgacccacaatgaacatacaggaaataatttaaatttaacacttgaaggcacaccagctacagtcctgtaggaaaggagagctaaggacattgttagaaggaatgacactacatgggggaatattggagtggttaagcatggattgtagagtcatcatctatattagaatcccggctctaacatcaccaattgtatgataaaggccaagacacttaacctttccgtgcttatgatcctcatttgcaaagtagggtggataataatggaatctacttatgggattgagaattaaatgaattcatgcatgtaacatatacagcatactgtctggcacactgtgaatttttaataatttaatttttgtaatgataaaaagtagtattgttgtcagtacagttggggttatgagggtctgctttagccaactgtcagttaaaatgataactgagttcacatctgtttggttttccccagaggacctgcttttgtgtatcttccccaagtgctaatcttttctgacagaaaagtacatggtaaatgaagtacctatcccgttattggggaaaatggctgttttnccacaaggggatctcctagagaagactgcgaggtcagcaannnnnnnnnnnnnnnnnnnnnnnnnnnnnnnnnnnnnnnnnnnnnnnnnnnnnnnnnnnnnnnnnnnnnnnnnnnnnnnnnnnnnnnnnnnnnnnnnnnnaaggcaaaagtttagcagacatgctaaattgacctaataaagaacgttataccttgaataaatacacatagtatgcaattgaatatctcctaccaactgatgagggtatatttcatcattcttttcacttatcatttgttagcctccgggcatatttaaaagaagatcctcatcagccctgatgaatgctggtatttggccagctctacaacttcagaacaaagtggaggaatgactcaattatccctgctcatgcccgaattatctgtgtaattgggacagagaagtgcaagcaaagaatattgcctattgctattttt

SEQ ID NO: 721586 - DNA, 1226 bp, Homo sapiens
  misc_feature 766, 807, 808, 809, 810, 811, 812, 813, 814, 815, 816, 817,818, 819, 820, 821, 822, 823, 824, 825, 826, 827, 828, 829,830, 831, 832, 833, 834, 835, 836, 837, 838, 839, 840, 841,842, 843, 844, 845, 846, 847, 848, 849, 850, 851, 852: n = A,T,C or G
  misc_feature 853, 854, 855, 856, 857, 858, 859, 860, 861, 862, 863, 864,865, 866, 867, 868, 869, 870, 871, 872, 873, 874, 875, 876,877, 878, 879, 880, 881, 882, 883, 884, 885, 886, 887, 888,889, 890, 891, 892, 893, 894, 895, 896, 897, 898, 899: n = A,T,C or G
  misc_feature 900, 901, 902, 903, 904, 905, 906: n = A,T,C or G
catttacatctcagtattgttggaagaatatacacaagtttgtatgacattcttagcacagtgcatggcatgtggtcaataagtattttccaaaatyaatattgttatcccaaaaaaactaagtctattatgctgatcaccatggtctattaaatatcacctagattctctgttaacaaagaaaagctgacccacaatgaacatacaggaaataatttaaatttaacacttgaaggcacaccagctacagtcctgtaggaaaggagagctaaggacattgttagaaggaatgacactacatgggggaatattggagtggttaagcatggattgtagagtcatcatctatattagaatcccggctctaacatcaccaattgtatgataaaggccaagacacttaacctttccgtgcttatgatcctcatttgcaaagtagggtggataataatggaatctacttatgggattgagaattaaatgaattcatgcatgtaacatatacagcatactgtctggcacactgtgaatttttaataatttaatttttgtaatgataaaaagtagtattgttgtcagtacagttggggttatgagggtctgctttagccaactgtcagttaaaatgataactgagttcacatctgtttggttttccccagaggacctgcttttgtgtatcttccccaagtgctaatcttttctgacagaaaagtacatggtaaatgaagtacctatcccgttattggggaaaatggctgttttnccacaaggggatctcctagagaagactgcgaggtcagcaannnnnnnnnnnnnnnnnnnnnnnnnnnnnnnnnnnnnnnnnnnnnnnnnnnnnnnnnnnnnnnnnnnnnnnnnnnnnnnnnnnnnnnnnnnnnnnnnnnnaaggcaaaagtttagcagacatgctaaattgacctaataaagaacgttataccttgaataaatacacatagtatgcaattgaatatctcctaccaactgatgagggtatatttcatcattcttttcacttatcatttgttagcctccgggcatatttaaaagaagatcctcatcagccctgatgaatgctggtatttggccagctctacaacttcagaacaaagtggaggaatgactcaattatccctgctcatgcccgaattatctgtgtaattgggacagagaagtgcaagcaaagaatattgcctattgctattttt

SEQ ID NO: 721587 - DNA, 645 bp, Homo sapiens
tgcatagtcgttaaggacacaaatcatagagccagactacagagcttaaaatccccgctgtaggccaggtgtggtggctcacgcctgtaatcccagcactttgggaggccaaggcaggcagatcacttgaggtcaggagtttgagaccagcctgaccaacatagcgaaaccccatctctactaaaaatataaaaattagccgggcatggtggcaagcacctgtagtctcagctacctgggaggctgaagcaggagaatcacttgaacccaggaagcagaggttgcggtgagccaagatcatgccactgcactccagtctgactctgtctcaaaaacaaasaaaaacaaaaaaacaaacaacaaaaacaaaaaacaaaaacataaaatcccagctttgctgcttgcaaactctgtgatcttggacatattatttaacttttgtaaactttagtttttcttctctgtaaaagggaacaatggtacctaactcaaggggttgtcatgagaatcaagtgaatatataaagcactgagaacagtacctggcacaatctattatcaagttcaaatatggtccttacatactcacttctcagattactttgctgagttagttcctttctgatgaataagagggtccattaat

SEQ ID NO: 721588 - DNA, 1545 bp, Homo sapiens
ttctactggagatggtggaagtaccatctaaaagtcttaggtgctacattctggtactggccctttcatggccaagatatgttcctttgggcaagttgttcaaactctctaagcctagtttttcaactgcaataaagatgattccagttcaaaatctgggcaagtgtgagttactgccactacgtgcagtcaagttctgtcatgtttcctccatcaagctacccagcaggcttgggagaatcaaatgtaaggaggtgtaatgctaccaagtttagaaaatctactaatgctgcttcaagacaacaacttccctccttctagctcatttgaatcccacagcaatcaggaaacataactgtcaggtaatatttttatttccttttgggatgagcaaactaagcttaagcgaggttaggtaatttactcagaagcacatagctaataagcagactaagaagaacttgggcctttaactgaatactgcagactttctaccccactcgctgactctattaaaaacgcaaactggccagaccaggcatggtccaccagtcttaccagtgtcacccaggtgctggcttgtattaggttggtgtaaaattaattgcggttttggtcactacttttaatggcaaaaactgcaattacgtttacaccaacccaatacttcctgatgcctttatttttaccaagcagaaggggaatgcaccccttcctcatgcttccacacaggaaaatatactctactaagcattgctgagcaatgttgatctcactagagacttcatttcatggggatagaaacattggagaatttgactttgtatctccacacaccacatcatcatcaccaccaaagatggtttttttcctacaggctcttctctctgcctcagcctctatcaggctgcagatgaccagacagggagaaaagaaggggagagagagagagagagaaagagagagagagagaaagagaaagagagaaagagagagagcgagagagagatagaagcagagcctaggatgctacatgtaaacagtgaagtagatacaccactcccaaatcaatgactgtaatccaaactctaaccacatcctgcagagaggggcaggttcagaatttccataaggaagagtgtcacttagggggcccaatctagctggaaggaatgggggtgcattgttttgacactgcatgtgcaaagcaaacacattgttttcatttagcttgtgtgcttatctggggtgacattggcaaatcagaaacatgactatatgaaagagtgtttgtgtggaggaaaaaaaagacaaagacagtgaccaaagagacttcagcactctgccaggtgaaggaaaaaggtgcaaaggcccagactgttcccccagtcgggaactcacagcctaggagggaggcatgtagtcagtgaaactcagcaggaagaagcatgggtccaggggttgggatgggggctgaagttccatcrtatgatgaaatactctctgagcattctagttttttattttcctattttgagacgttgt

SEQ ID NO: 721589 - DNA, 1259 bp, Homo sapiens
ccatcagctactaatcagagaggttcattgtatgggctggggcaaatgtagaatggttcatatataatcacccaaacatacctttctcaatataccacatcatcattcttgtgttattaacacagtattttttgttagagattttagtgacattagttgaactgatagcctcagtcaactcagaatcacttagaatctgatgggctgctaaaccctttgacataagccataagcatttttaccatgccattgtatttcaacaactcaatcagatgagccattttaagctcacattttaaggaagctcttctgcaaaatattcacctggatttgaagctgtatggatagttagaaaagggagtaagtaaggtaagcacaagtgtagataatttatggtgatctgataccagtgtttggatatatgggccaactcataactccagacggggttttgtttaaattcacagctctattgaccagtctgcaccagcttgaaaataagtcagaactaccatgataacttcacaaccagccttttccccctaaatattcttaggggggttaacctagacctcctggggcttctgcgaacttgagtgggacctcttagatttttcagtatccatccaagtccctggagccatatacaaacacattgatatctagtagtggagagcatgaggaaaacgatttaatttattttctcagatgagatgttggcctggttgttgggtaactgtgacaatgggatacctttggatgatgggtaaggcaaatagagtggttgcagtattaaaactgtttttagtcaatatcattaaggaaaaacatggttccccacctgcttttaaattgcttctcccaacactgtccacatgttccctaaatgttaatcagactggactatatgctgttacctgattgaggcctatgcttttgctcatggtactttctctgccaggaaaaaactagctagactttgagatcagctagatctacatgttgagtctggatatatttagcttctgagtgactttcagcaattagttaaactatattatcttgaacttccttttctaaggaacaagaaggctaatctttgggccttatagaattattytgaggatgaaatgaaataactgaatgtgcctagcataggacctagtaacctagcaggtattctgtatatgctcattttaaaaaaaattatagtcttcctggcaacacctctaatttcatgacccactttaaaaaaaaac

SEQ ID NO: 721590 - DNA, 653 bp, Homo sapiens
gctttttgaaaggatttgcttttagtttcagttttacattcacatatatcatataaacgattatggtcccagttattgttttctaggcgtaataatcacatttgccaatatcactgaaaaacatcattgagaaaacaacttatacctatctctgtgcrtgtgtgtataaaacccttatgttctaccaagttgaacacagaattttaaacctgatttatgatttcagtgtcaatgttgactccccaaaacctgtaaaaatgaatctagatgattgtagtatgccagtttagaaaggaggtcacaagtcaaggaatttaaaacgaaaacatcttaactgcaatttatttttttagctcattgaatgtgcaactcagctagatacttcataaacattacttcatgttcacaaaacccacatggaacaagtgttatgattctgtttttacagcagggcaaactggagttcagaaagaataggtgacttgcctttggggcactgcacaacctggcggcgaaagggggatacgaaccccagtctgtgttaccataaagcctgagctccagggaggtctcacttgctgggtccaggttttgatcaaatcagacccatgtcaaccccagtggaagccatttcaagaaatatagcaatctga

SEQ ID NO: 721591 - DNA, 653 bp, Homo sapiens
gctttttgaaaggatttgcttttagtttcagttttacattcacatatatcatataaacgattatggtcccagttattgttttctaggcgtaataatcacatttgccaatatcactgaaaaacatcattgagaaaacaacttatacctatctctgtgcatgtgtgtataaaacccttaygttctaccaagttgaacacagaattttaaacctgatttatgatttcagtgtcaatgttgactccccaaaacctgtaaaaatgaatctagatgattgtagtatgccagtttagaaaggaggtcacaagtcaaggaatttaaaacgaaaacatcttaactgcaatttatttttttagctcattgaatgtgcaactcagctagatacttcataaacattacttcatgttcacaaaacccacatggaacaagtgttatgattctgtttttacagcagggcaaactggagttcagaaagaataggtgacttgcctttggggcactgcacaacctggcggcgaaagggggatacgaaccccagtctgtgttaccataaagcctgagctccagggaggtctcacttgctgggtccaggttttgatcaaatcagacccatgtcaaccccagtggaagccatttcaagaaatatagcaatctga

SEQ ID NO: 721592 - DNA, 653 bp, Homo sapiens
gggaggccaaggcgggtggatcacctgaggtcgggagttcaagaccagcctgaccaacatggagaaaccccatctctacaaaaaatacacaattagccgggagtggtggtacatgcctgtaattccagctactagggaggctgaggcaggagaatcgcttgaacctgggaggcrtatgttgcggtgagctgagatcgtgctattgcactccagcctgggcaacaagagtaaaactccatctcaaaaaccaacaaacaaaaagcccttatccaatggtcatgccactctatctggccatgtaatttctcctcctgtctttctgtagcaacagccttctgaagaacctcactctgcctttcaaaaccccttcaacttgtacccttcatcagcaaagtacttagctcaacatgtatgcctctgggggtactcatccacatgccatttaaggatatttccagcatcatcatcttcactaccccaggatggcattttagagtggattacgtgcctgctggatgtgttgtacttgaacgagctagagaaaatgccacactttaagacgaattaagagtctgttcatttagccggcggctaagaaatggctaacgtttaaagttctctcggcctcgaagaaggggctagattttctttta

SEQ ID NO: 721593 - DNA, 653 bp, Homo sapiens
gggaggccaaggcgggtggatcacctgaggtcgggagttcaagaccagcctgaccaacatggagaaaccccatctctacaaaaaatacacaattagccgggagtggtggtacatgcctgtaattccagctactagggaggctgaggcaggagaatcgcttgaacctgggaggcgtatgttgcggtgagctgagatcgtgctattgcactccagcctgggcaacaagagtaaaactccatctcaaaaaccaacaaacaaaaagcccttatccaatggtcatgccactctatctggccatgtaatttctcctcctgtctttctgtagcaacagccttctgaagaacctcactctgcctttcaaaaccccttcaacttgtacccttcatcagcaaagtacttagctcaacatgtatgcctctgggggtactcatccacatgccatttaaggatatttccagcatcatcatcttcactaccccaggatggcattttagagtggattacgtgcctgctggatgtgttgtacttgaacgagctagagaaaatgccacactttaagacgaattaagagtctgttcatttagcyggcggctaagaaatggctaacgtttaaagttctctcggcctcgaagaaggggctagattttctttta

SEQ ID NO: 721594 - DNA, 865 bp, Homo sapiens
ccatgttggccgggcctggtcttgaactcctgggctcaagtgatccacctgcctcagcctcccaaagtgctgggattacaggtgtgagcccctgcgcccagctagagtctaccattctttgaattcactgcagtgcaaagactggaacatgtggaactccaggtgtatatgggttatgtagagatgctaggggcagattaaggaaggaaagatatgagaagcctgcagagcatgctttcccagactgtatgggccctgggaaaggagaagtggacagaaagggagcactaggtaccctggaagagaagattcatccaagtcatcagggaagttactaatgcaagggaaaaaatttagagacagggccagccacgcttcttccaagtcctttctgtctgctcagtcacctctatgcttatttttcttctttcctctaagtagtgtcatgcgttttcttcctattcctagtcgctcctagtcaactaactcctctctttaccatcttttcatcagaacttgaaacctcctctccttcatgtattagtgatcatrtttctccataatactgctagaaacaagaattgaaacctggaaaacctgcatttgagaaccagatctccctctgctagctatttgagaagttattttgttccattctttttgttgttgtcgaaacagggtctcactctgttgcccaggctagagtgcagtggttcaatcttggctcactgcagcctcaatctcctgggctcaatcaatccttccacatcagcctcctgagtagctgaaactacaggtgtgtgccaccacagctggctaatttttaatgctttttttttgtttacttattttttttttttgtaga

SEQ ID NO: 721595 - DNA, 865 bp, Homo sapiens
ccatgttggccgggcctggtcttgaactcctgggctcaagtgatccacctgcctcagcctcccaaagtgctgggattacaggtgtgagcccctgcgcccagctagagtctaccattctttgaattcactgcagtgcaaagactggaacatgtggaactccaggtgtatatgggttatgtagagatgctaggggcagattaaggaaggaaagatatgagaagcctgcagagcatgctttcccagactgtatgggccctgggaaaggagaagtggacagaaagggagcactaggtaccctggaagagaagattcatccaagtcatcagggaagttactaatgcaagggaaaaaatttagagacagggccagccacgcttcttccaagtcctttctgtctgctcagtcacctctatgcttatttttcttctttcctctaagtagtgtcatgcgttttcttcctattcctagtcgctcctagtcaactaactcctctctttaccatcttttcatcagaacttgaaacctcctctccttcatgtattagtgatcatgtttctccataatactgctagaaacaagaattgaaacctggaaaacctgcatttgagaaccagatctccctctgctagctatttgagaagttattttgttccattctttttgttgttgtcgaaacagggtctcactctgtygcccaggctagagtgcagtggttcaatcttggctcactgcagcctcaatctcctgggctcaatcaatccttccacatcagcctcctgagtagctgaaactacaggtgtgtgccaccacagctggctaatttttaatgctttttttttgtttacttattttttttttttgtaga

SEQ ID NO: 721596 - DNA, 1034 bp, Homo sapiens
cttcttacaggcaattcctaactcttgggttttgtagagggtccaaaactctttagaacctataattcaaggaaaggctccactttggttttgcattttgtctggtctctttgggtgacagaatttatgtcacaaggtgcacatgttttggggaggctcatggacagcccatcgctcttgtgctttggtaggaaatatgtgcagttatggggaaggagttagttactcatctagggaacaattgggtagaaagagatggactccctgtatttgaaattcagaactcaagcttggctctaagtgtttccttgctttgctgtgctccacgggaggcactgagcagaaggaagcgagttgcctgagattcctcaaagcccgcagcccttttggaggttacattgttattctcagagcctttatgatacataataaagacctagcttggaccaacattaggatgagttatcttgctattaacattctttcaggtagaagttgcttttaggtagaagttggtcccatcttgctcacaatcctccaaagcttggaagttactttccaggagacttagcttgcactgagagccgccctcccaccctctctccaaatttcctcttgggagtagcctaacaaggtgctgtcmcagacccttgccagccacgatgaccccacccagaccatccctctgctgtttcactctttgatattctctggagctctctggggaggggtgagacctgctgtctggtttgtacggtttgcccaagtcttacagtcatggctggctgcctctctctgagaactgggactcctgaacttggtgaaatgcctcagccattgatcatgtgaaattatcggtgacactcatttaaaatccgagtctgctccagatggactctgactctttctgccctgactatgagagagagagatcgtgagagacagagaccatgagaaagaccgtgagagagagacacagagctagagagagagaccgtgtcctgacctgctggacagtggagatgcttgtgggc

SEQ ID NO: 721597 - DNA, 769 bp, Homo sapiens
tgattaaaaataaaaataaggctggccatggttgttcacacttgtaatctcagtgtttttggaggctaagacaggaggattgcttaaggccaggagttcaagaccagcccgggcaacacagggagaccccatctctacaaaaaacaaacaaataaataaatagccagacatggcgatgcatgcctgtagtcccagctactcaggaggctgaggtggcaggatttcttgagcccaggaggtcaaggctgcactaagctgtggttgcactactacactccagcttgagcaacagagcaagaccccgtctctaaaaaataaataaacaaataataaaaaataaacaccaacttcattattcaaaatcgtgcatagagcttcactaaacattgaatagcagttctttcatttttttcttcccaacaaccctataaaatagatgctcttatttccaccactttaaagaagaaatcaaaacctagagagaagtgacttgagattaaaaatgtaaggttgggctgggtgcagtggctcacacctgtaatcccagcactttagaaggctaaggtaggtagattgcttgagcccasgagtttgagaccagcctaggcaacacagtgaaacaccatctctacaaaaaatgcaaaaaatgtgtctgagtgtagtggcacgtgcctgtggtcccagcaactcaggaggctgaggtgggagaactgcttgatcccgggggtgttgagtctgcagtgagccatgatcatgccactgtgagata

SEQ ID NO: 721598 - DNA, 769 bp, Homo sapiens
tgattaaaaataaaaataaggctggccatggttgttcacacttgtaatctcagtgtttttggaggctaagacaggaggattgcttaaggccaggagttcaagaccagcccgggcaacacagggagaccccatctctacaaaaaacaaacaaataaataaatagccagacatggcgatgcatgcctgtagtcccagctactcaggaggctgaggtggcaggatttcttgagcccaggaggtcaaggctgcactaagctgtggttgcactactacactccagcttgagcaacagagcaagaccccgtctctaaaaaataaataaacaaataataaaaaataaacaccaacttcattattcaaaatcgtgcatagagcttcactaaacattgaatagcagttctttcatttttttcttcccaacaaccctataaaatagatgctcttatttccaccactttaaagaagaaatcaaaacctagagagaagtgacttgagattaaaaatgtaaggttgggctgggtgcagtggctcacacctgtaatcccagcactttagaaggctaaggtaggtagattgcttgagcccacgagtttgagaccagcctaggcaacacagtgaaacaccatctctacaaaaaatgcaaaaaatgtgtctgagygtagtggcacgtgcctgtggtcccagcaactcaggaggctgaggtgggagaactgcttgatcccgggggtgttgagtctgcagtgagccatgatcatgccactgtgagata

SEQ ID NO: 721599 - DNA, 918 bp, Homo sapiens
tttttaaagaacccccaacctctttccaatcatgatagtgttgctttcttttctttttctatttttttttttccttatctatccaccgaaaatcttctaatgaaagagagtaccacttcaggaacttcagggttgggaaaatcagacggattcgtggatttcaagttagaaatgcctcctagaatatttaaaatcaaaacagatagagaagtggaaacttaagttctttgccccttgaagaaatgtacatgtctcttgcagatattcttsggggcaggcaatagtggggttctctttcacagcatcctcatcactttcgtgattctgaatcgcccctgtcaccctttgaaagaagaagagacccagctccgtgctcagcatgcctgcttctcagagctgccccctttggattttgagggagaagggtttatgttgtttattggggtggtaaaaaaaaatgcctgatgcctgtttccttgtgcttagcacaaccagggtggcattcatcttcaataatgtaagtgtatgtgcattacctttgaagacctagggtagtataaggaatggttgggagtggcccgtcgggactaatctcctctacctgcagtgtcccaggacccacgtttggcttcatggagaacctggaccacacatctccaacctgccatgttcttcctccaggttctgtcactgagtcataaactcagggaaggtgctagagacatcaagatggggaatgtctattccctgtccatctggattttacaataagcagcaagatagattcatccaaaagagctcagttttttaaaagatattgagcaaagatgagcatgtacaaaaacatgaaaaaccatgctctgaggaaagactcatgcgttcattgaacaagtaagataattgagctgtagaaagaaa

SEQ ID NO: 721600 - DNA, 918 bp, Homo sapiens
tttttaaagaacccccaacctctttccaatcatgatagtgttgctttcttttctttttctatttttttttttccttatctatccaccgaaaatcttctaatgaaagagagtaccacttcaggaacttcagggttgggaaaatcagacggattcgtggatttcaagttagaaatgcctcctagaatatttaaaatcaaaacagatagagaagtggaaacttaagttctttgccccttgaagaaatgtacatgtctcttgcagatattcttcggggcaggcaatagtggggttctctttcacagcatcctcatcactttcgtgattctgaatcgccmctgtcaccctttgaaagaagaagagacccagctccgtgctcagcatgcctgcttctcagagctgccccctttggattttgagggagaagggtttatgttgtttattggggtggtaaaaaaaaatgcctgatgcctgtttccttgtgcttagcacaaccagggtggcattcatcttcaataatgtaagtgtatgtgcattacctttgaagacctagggtagtataaggaatggttgggagtggcccgtcgggactaatctcctctacctgcagtgtcccaggacccacgtttggcttcatggagaacctggaccacacatctccaacctgccatgttcttcctccaggttctgtcactgagtcataaactcagggaaggtgctagagacatcaagatggggaatgtctattccctgtccatctggattttacaataagcagcaagatagattcatccaaaagagctcagttttttaaaagatattgagcaaagatgagcatgtacaaaaacatgaaaaaccatgctctgaggaaagactcatgcgttcattgaacaagtaagataattgagctgtagaaagaaa

SEQ ID NO: 721601 - DNA, 918 bp, Homo sapiens
tttttaaagaacccccaacctctttccaatcatgatagtgttgctttcttttctttttctatttttttttttccttatctatccaccgaaaatcttctaatgaaagagagtaccacttcaggaacttcagggttgggaaaatcagacggattcgtggatttcaagttagaaatgcctcctagaatatttaaaatcaaaacagatagagaagtggaaacttaagttctttgccccttgaagaaatgtacatgtctcttgcagatattcttcggggcaggcaatagtggggttctctttcacagcatcctcatcactttcgtgattctgaatcgcccctgtcaccctttgaaagaagaagagacccagctccgtgctcagcatgcctgcttctcagagctgccccctttggattttgagggagaagggtttatgttgtttattggggtggtaaaaaaaaatgcctgatgcctgtttccttgtgcttagcacaaccagggtggcattcatcttcaataatgtaagtgtatgtgcattacctttgaagacctagggtagtayaaggaatggttgggagtggcccgtcgggactaatctcctctacctgcagtgtcccaggacccacgtttggcttcatggagaacctggaccacacatctccaacctgccatgttcttcctccaggttctgtcactgagtcataaactcagggaaggtgctagagacatcaagatggggaatgtctattccctgtccatctggattttacaataagcagcaagatagattcatccaaaagagctcagttttttaaaagatattgagcaaagatgagcatgtacaaaaacatgaaaaaccatgctctgaggaaagactcatgcgttcattgaacaagtaagataattgagctgtagaaagaaa

SEQ ID NO: 721602 - DNA, 918 bp, Homo sapiens
tttttaaagaacccccaacctctttccaatcatgatagtgttgctttcttttctttttctatttttttttttccttatctatccaccgaaaatcttctaatgaaagagagtaccacttcaggaacttcagggttgggaaaatcagacggattcgtggatttcaagttagaaatgcctcctagaatatttaaaatcaaaacagatagagaagtggaaacttaagttctttgccccttgaagaaatgtacatgtctcttgcagatattcttcggggcaggcaatagtggggttctctttcacagcatcctcatcactttcgtgattctgaatcgcccctgtcaccctttgaaagaagaagagacccagctccgtgctcagcatgcctgcttctcagagctgccccctttggattttgagggagaagggtttatgttgtttattggggtggtaaaaaaaaatgcctgatgcctgtttccttgtgcttagcacaaccagggtggcattcatcttcaataatgtaagtgtatgtgcattacctttgaagacctagggtagtataaggaatggttgggagtggcccgtcrggactaatctcctctacctgcagtgtcccaggacccacgtttggcttcatggagaacctggaccacacatctccaacctgccatgttcttcctccaggttctgtcactgagtcataaactcagggaaggtgctagagacatcaagatggggaatgtctattccctgtccatctggattttacaataagcagcaagatagattcatccaaaagagctcagttttttaaaagatattgagcaaagatgagcatgtacaaaaacatgaaaaaccatgctctgaggaaagactcatgcgttcattgaacaagtaagataattgagctgtagaaagaaa

SEQ ID NO: 721603 - DNA, 992 bp, Homo sapiens
tcggactaaataacttttcttgttaatgagatctttctcataaagaaattaggaaaaaaataatggttggtgtgtttcagttaaggatttaacacgttagggcctattagagctttaaaatccctttataatagttgaagtttttcataatctgggagaatgggctttggtggggctgctaattctcactcaccatgggaagatcgtatgtatcccagacagcagaagctcctcagtgtacagacgaagcagtctcatagttgtcccactatgtgaataaactcatctttacacagaaaggaaatcacaccaacatccagaccacaaagtactgctatttttaagcatttcccaaaccgggattctaggaacattgcttgtacaggatgctaataacgatgtactgtgaaaaaattgttctctgatggaaatttaaaatctttcttcactacattacatctcagagyccctgaaatcttgttgtgattctcctgaggagctttgcggggatagcgtgtggcgtgaatcctaaacatagtcaaccacagagctccttcagcagctctcacagcttgtgttcgaaggtgtgccatctgggaaagggggacagttcgcttctgggcagcaagggccctgccctgtcacagagggcgtgtgatgttctggatgccataagctttcagtaaacagttgtctgagcgaagatttataatgtggccacatgaagaaaacaaacattgggtagcattataatgcctttcattctccagtgcctaattattgattggtctcataaaaataaaacagttcataggactctacatagcacccgtgggtcccttccccaggtggcacaggaagcctgcagaggaagtttgtaggtaaggatcgtaaatctccttagggagcattttgaatttaaacgaaaatgtccaaagtcataggcaggggcgcctgttcctttatgtgtcagccctaagtggcttcgctag

SEQ ID NO: 721604 - DNA, 1101 bp, Homo sapiens
ctctgtcactaatgtagctatgtgatcctgagcaagttgcttaatcttcctttgcctcagtcttcctatctatcaaatggtaacaatatccttcttcatagggttttcctggagattaaatgagttaatatatttatagtattaaaaatagcacccatcacatagtaaacactcagtaagcattagctgttatttaattcaacaaactttaagatagatatataaaataaaaatgatatgaaatctaaccttttgagagtttaatttgggaagacagataatacaaaaatwcttgagaacaattttaagacagattttaaggaattgcatggtggggtagtaaactatgaggccctttttttgcctctgcgttattatttatcttgttagatgaacgtgaaactctgagtttgggcactgaatcttccacctgtttgtatatccagggcccagcttatgatagacactcagtacaaatttattgataattattacaggaaactgaagtaatttgaagatcattgtatttttagtaattgaaaaaagacttcatgaattatgagttatgatctggaaagaattataagaattcagtaagctgaaaagaaaagcagaaaagaaaagaaaagggcattctagtagggaagggtatggtagagtgtgatggaatgctgtgttaaaaaggacaatggcagcaatgtgtaaaatgtacatggtgcatggcagatgactgacttatttgatcttggacatgatggagtagtgatgaagctgattttatcagttggttgaagactaaatatcttatgaatatttttggatatcagaattgatctgagacacagtagaaacaatgacagattctttcacaggaaaatatcataagaatattcacattttaagaattaagcagtggagtgcataattagtaaaatttgaaaaagaaaaactagaggtaagaagacctattaggagatgattaaagtccagaggggaggtcttaaaaagggcagcttctcttcaaaggcctgagattagaagtgcagtctcagtctctttttgagggtataataacagcttcaaaaggcatcctagttgctt

SEQ ID NO: 721605 - DNA, 671 bp, Homo sapiens
gtcataacattatttcccttttctcttttattacccccaagcccagtttgtggagagttaacatttttatttggccccagattgggagatctgttactctttcatggaagagttaaaaggtggttagaccaaacagaattttgcatccaactggaatactttgcatctgaggagaaaatgctatttctagtacaagcaattaatgaccactggagcggtctgaattactttaatttttattatatgtttgaaagttatcacatagtccaagaagagtgaacagaaggcatttactttttaaaataacttctttttggaccaaaaaaaaaaaaaccccattaatatcataagaccctgcaattgccatagtaatcccttgtctgataatactcattggggtaacaaaaacactagggattgttttatatctcagmatccaagtacagcaactattgatctgaaattctatacttgagatcaatccaactgggtcacctgcaggttatttcatggggatttaacccactgactgcaaagatttaattccctggaaatgacttgtactgaaggcattattagtactgtaaatgtgaactcagtagaaaagcacagccagggagttttatgataggtgatgcaatcttgtggctagaggcctgcaggggtccaga

SEQ ID NO: 721606 - DNA, 2365 bp, Homo sapiens
gaattccaaatgcccccctaaaacataaccataaaagtaatttctttcctatcctcatcaacacttcagatagttaatagctgcgggcacatgttataaaagaagttgctgaagaagggaacttgaagtgaatttggcatagagtcatggatggtactaaacacatggatgaagttatttacttaaaatttttcttgtcggcctgatttggctatattttcaaaattgacacatactatgctgtagacttctattttcactagctgagaaacagaatgattacagacttttgcatgttatgcatttttaaatatcaccaagttaaacttagattttgattccgtgcccaggaccaagtggaaaaaaatctccatcttcaatagttcctatttcttttagtcacagggccacatactgtatttcttccatgagtaaactcccacttggaattccaagcattgcataactagtggagtattcatatcatatataactcagtaggccttcatatcctaatcagctatttcatctgcacaatattcttcttagcagttaaaaatcttaaaatcatagttcagaatggagccaacatttaattcagccaacaaatatttattaaacacctacttctactactggtgttacaaccatgactactactttacatagttttgtattgctttaaattgtttttacaaacctcatctcatttactacagtgaaattacctactgctttgaaggagcttagagactcataaagtagattaaatcaattgtcagaaaaactgggctttaaagaacttgtctacgatggtaccggctactgtagtattttagatgattttggtgaactctcagttgattttaggtaaaagattcatctgcacaaatgtatatttatctttcattgtattttttattacaatctaatattttttaaaagctaagaaaatgcaatgaaaataacattttaaaaagtgtcagctatatgaatgatattcyttaatgcatgtcacatttaaaatatgacctatttttaaagtacattgtatatgtcacaagccagatttggtcacaggccatggtttgctaatctctgtcctaaagcaatatggtagttctgaacgtttggctgaagaacatggatggcggtagaagtccctaaactggtcttcatagcttagaataacagaactgctgagtttgaaggaaaccgaacaacttatctcacttactctccaaacactgttcaatttctcttcatacttttttttacaatgtggtagtctctatatttatatttgattcaaaatataatgttttaaaacggcctgtactgatgtctcttcaaaatctttatcttgcttaatcttagaaactttcttgccaaggagtgtaggagtagacatgatagcaagggaaaggtaatagaataaattttgaaagctaaatgctttattttgatatagctaatattcatagaccttaacatttacattagtcagcaatcaaccaaaagtcatagtttcaaatacacgagggcagaatctgcctagctacacaggatttgaccacttaaaagttgagctctatgattattctgatgaagtggattggagaccatcacctttctcttagtaaatatttgtccttcacataccaatcgtaagtataattaagcattttttacttcatctggtgcttcaaattttgtatgatgcaggatttagttttctattctaattcctaaaagccatatttcaggctgcattctattaggggtgtctcacttaaaataagaatactattatgtagcttaacttgcatctatttcctttttattatggccactcaattgttcctgactttctttgggaatgatttgttaattttattccagtctcagctatgtgccttcacttaacaatgaacattgactactggatacttagcttaccttttttacaagatatatatttcaaggttttgttttcatataacataaaacagtaaggcattcattaatcactattaaattcattcttttcctctttattgaattctaaaggaaaatcagctagtcttttttttggcatgtgtcagcaaaagtatgttattatgaggtgttcttaaataatatatcttcataaaacaatataggtggaggtttaaggagaaataaggaaagaaattggaaccatctggatatccaaagtagagaaaagtttttactaatggttgtcatgtacacgttacaaaaataacattatacagctttctaactggacaggaaaaggcagaactatcaaaaagttgaaaaagaagatagccctggagtgaagcaattgacaaataaaatcatt

SEQ ID NO: 721607 - DNA, 2365 bp, Homo sapiens
gaattccaaatgcccccctaaaacataaccataaaagtaatttctttcctatcctcatcaacacttcagatagttaatagctgcgggcacatgttataaaagaagttgctgaagaagggaacttgaagtgaatttggcatagagtcatggatggtactaaacacatggatgaagttatttacttaaaatttttcttgtcggcctgatttggctatattttcaaaattgacacatactatgctgtagacttctattttcactagctgagaaacagaatgattacagacttttgcatgttatgcatttttaaatatcaccaagttaaacttagattttgattccgtgcccaggaccaagtggaaaaaaatctccatcttcaatagttcctatttcttttagtcacagggccacatactgtatttcttccatgagtaaactcccacttggaattccaagcattgcataactagtggagtattcatatcatatataactcagtaggccttcatatcctaatcagctatttcatctgcacaatattcttcttagcagttaaaaatcttaaaatcatagttcagaatggagccaacatttaattcagccaacaaatatttattaaacacctacttctactactggtgttacaaccatgactactactttacatagttttgtattgctttaaattgtttttacaaacctcatctcatttactacagtgaaattacctactgctttgaaggagcttagagactcataaagtagattaaatcaattgtcagaaaaactgggctttaaagaacttgtctacgatggtaccggctactgtagtattttagatgattttggtgaactctcagttgattttaggtaaaagattcatctgcacaaatgtatatttatctttcattgtattttttattacaatctaatattttttaaaagctaagaaaatgcaatgaaaataacattttaaaaagtgtcagctatatgaatgatattctttaatgcatgtcacatttaaaatatgacctatttttaaagtacattgtatatgtcacaagccagatttggtcacaggccatggtttgctaatctstgtcctaaagcaatatggtagttctgaacgtttggctgaagaacatggatggcggtagaagtccctaaactggtcttcatagcttagaataacagaactgctgagtttgaaggaaaccgaacaacttatctcacttactctccaaacactgttcaatttctcttcatacttttttttacaatgtggtagtctctatatttatatttgattcaaaatataatgttttaaaacggcctgtactgatgtctcttcaaaatctttatcttgcttaatcttagaaactttcttgccaaggagtgtaggagtagacatgatagcaagggaaaggtaatagaataaattttgaaagctaaatgctttattttgatatagctaatattcatagaccttaacatttacattagtcagcaatcaaccaaaagtcatagtttcaaatacacgagggcagaatctgcctagctacacaggatttgaccacttaaaagttgagctctatgattattctgatgaagtggattggagaccatcacctttctcttagtaaatatttgtccttcacataccaatcgtaagtataattaagcattttttacttcatctggtgcttcaaattttgtatgatgcaggatttagttttctattctaattcctaaaagccatatttcaggctgcattctattaggggtgtctcacttaaaataagaatactattatgtagcttaacttgcatctatttcctttttattatggccactcaattgttcctgactttctttgggaatgatttgttaattttattccagtctcagctatgtgccttcacttaacaatgaacattgactactggatacttagcttaccttttttacaagatatatatttcaaggttttgttttcatataacataaaacagtaaggcattcattaatcactattaaattcattcttttcctctttattgaattctaaaggaaaatcagctagtcttttttttggcatgtgtcagcaaaagtatgttattatgaggtgttcttaaataatatatcttcataaaacaatataggtggaggtttaaggagaaataaggaaagaaattggaaccatctggatatccaaagtagagaaaagtttttactaatggttgtcatgtacacgttacaaaaataacattatacagctttctaactggacaggaaaaggcagaactatcaaaaagttgaaaaagaagatagccctggagtgaagcaattgacaaataaaatcatt

SEQ ID NO: 721608 - DNA, 649 bp, Homo sapiens
tacttttatgtttgtttgtttaacccattttattttgtacagcaaaactaatacatggtcttttgggaaaaaaaaagtactaatcaraactattgaaaagtaaaaagtaaaaacctcccctgtttcctagtcaaatttcttcataactataattaacagatgggtgttccttctggatgtttttctactcatctatccatctacctattttatatatatttatatatatatacacacacacttgtatataaataatttttttcctttttagaaaagatgaaataaaaaatacataatgtgctataatttgcttttccccccttaactatatatcacgggcatgtttccaagtcagtacatataaaaatacctcattcttttaaaaaagttgttatatttcatagtatggaaataccttaatttatctaaccatttctctgctggttggtttttaggttgcttcttctaattctttgctattacagacaatgctacagtgaaatccttgcatatgtagatttctaagtttctttatgtcttaagagtaacttttcattacttttgtggcacatacattctcccaattcttgtgtttcttaattttatttacttaagttcttatgtagtcatatctagtactatttctttt

SEQ ID NO: 721609 - DNA, 608 bp, Homo sapiens
gttgaagcgactctcatgcctcagcctcccaagtagctgggattacagtcacgcgttaccatgcctggctaattttttgtatttttagtagagacggggtttccctatattggccaggctggtctcaaactcctgatctaaagtgatctgcccatctcagcctcccacagtgccgggattacaggcgtgagccactgtgcccagcctctgtgtgtattttgattcagtactctgctgtttaaatcactgtaactttactgtatattgggatatttctcttcccattttttttttcttttgtttagacgtaagagaaaattttcaggtgaactttttcagatgaacaaaatgaccctgagaaagactgaaaatttgatccaagccacacaggcagtaagtggcagagcctagattaagatgcagatctttattactctgtgatataaatgtattttctgcaagtagctaagatccaagaattttgartttgacatcaagagacttcttaatggagaggcctgagacctgaggaagacttgggaaaaaagtgagtcagagtcaacaagaagtcttgggtgacatattttgattttttaatcacctaattc

SEQ ID NO: 721610 - DNA, 1088 bp, Homo sapiens
ttttccaaacttgttctgatcattctagggcagaaattctctatccagactgcatattaatatcatctgtggaacattcaaaaccatattaacctctgggacccatccacataaaatctgttgcaaacggcttgcagttaggcctgggtacattttaaacgctctgcatgtgattctcttctaactggagggaaagaaccattgctcttgatctggaagctcaaaatcttaagtgctagttctataggtactgactgtgatcttagatgggccctaccatttctctgagcctcagattcttcatttagaaagtgaagttaatggcaaaactgatctcataggttgttttgaagattaaatttaaaaatgtatgtgaaaaccctttgcaagctagagaaacattttttttttcttgagactgatttacgtttttgctgcctgtgccggagtgcaatggcactgtcccggctcactgcaacctctgcctccctggttcaagcagttctcctgccttagcctcctgagtggctgggattataggcatgcgccatcatgccccactaattctttggatttttaatasagatggggtttcaccatgttggccaggctggtctcgaactcctgacctcaggtgatctgcctacctcggccttccaaagtgctgggatcataggtgtgagccaccacgcccagccagaaacattaatttttattatatgtgattacatttctttctgtcaattgttttataaacatggaaagggagattagaactcactggttttccactctggctcaggcttttaataaaggaaaggaattgcacagagattctgatttggtagttcagggttgagacccgggactcagagttgctaaaaagcttcacagatgagcctggtgtgcagccagggttagggacttcttggttaatgatctgtccaaaggttacacagtgctaataaagtcaaagaaccagggactcaactctagccctttccatgcttctctagagttttatctactattatccatgctgagtgctctttcgtgtacatacttattgtaacattgtatgttaatca

SEQ ID NO: 721611 - DNA, 1217 bp, Homo sapiens
acccggtgccccaacccagttaccctttgatggagatgttagtgagcagtgaattggccaaaaatctgtgggaggaaaaagaaagaaggaaagtcgatcaatcttcaaattaataaaagctatttttatgtgatgcttctgcaatggaaggtcctgccacacgtagaatattgtctgggttaatgttcttatcatacatacttgtacaataaacccacctcaatagttttattaaattcatataggtaagcaaaatagcaattcactttgttcaaaaatattaaaagttgcagatatggttgaagtttcttttgaatttaccttcaatctctcagatctgcctccttactcaaaaggagctgcatcactctgatatctacttattattagacaaaatgtccagctttttatccaggttttttctatgaatttacatagaaatttagtcagagaaaataagcacattcttttgtttttacagtaataatagcctacctacatagtttagctgtgtggggtgacactgttacgcgttgcccaaatctcccttcagtgaaggactcattgcctcatcagggagcacttccagcagactgtctgcgtctctcagccccttcttggaccacctctgccacaatagccccctcaccctcaggctcacccctgcagagacaggcaatggtcagtggctgatccagttccatttggtaccaatgtactagttctcatgcaagctcattgtaagactataaatgtcttgccatgttggccaaaactgggttaactcagaaagatcttcctagcctcagagctgcctgtggggtggctgaggttgctgtggagcccacatcataactcagcttctccctttgcccaatcctgcttccttagatgctgatgccaagaattttcctaacgtacytccagaaccgtaacttccatctcatagtctgcttcccaggaaaccatcctatgacatgtcacctgcttagtttttcacagaatatgtcctggaacgcccatttgctagtaaacatagacctatctcattattttaatcttgtctttgtgtcagaactgagatgttgttcatcaaagccctggttccctatgtccctgaacttgcgtttagactacatcatgattaactatgactaaattagtgtgttctagccaatgggctgtggacagaagtgatatatggcactcccaggccc

SEQ ID NO: 721612 - DNA, 1390 bp, Homo sapiens
tttcatcaatgttatgtagttttctgccacaaaacatgtacaattgaagtcctgtacatgttttgttagatttatacttgggtttttttagcaactgtaaatggcatttattttttattttggtgtctgttatggacaccatatactaccttcccagctggtagtattccagcatagctagacttctcaggaaagactgatggggtgagagagaattaggagatccctcttgtggtggtctaaggtccattttctaagattccaaattcctgtatcaagtactataacttccatctgttatggatgccaaaataaaattgacttttgtatgtttgtattacatcttgcaaccttgaggaactcacttatgagttctaggaggttgttgttttgcagatttcatggaattttctacctaaacaatcatttcatctgcagatagggacagttttattttttcctttctcatctgcatgcttttttttcttcttgtaccttttgaaattggccagaactacctgtactatgttgaataagagtggtgagagcagacattgttgccttgttcttgatcttatggagaaagcattcagtccttcaccactaaaaacaatattagctagagccttttggtagacactctttatcaagttgaggaagtttccctctagggcattttttctaagagtttttatcatgaatacatgttagattttttaaaatgctttttctgtatcagttgacaagaccacatgatttttctcctttagccattaatatggaagattacattgaataattttcatatattgaatcagaccttgcatttctggaacaaaccttccttgggagagtggagaggaccattagggagtgctttgctgggtttttagccacctggtacaggatggtgagaagttcaaccaggaaaggtaggaaaaaattttcacggtgaggttaacaagtacaagagcactgacacatgaaactggctttctttttcaatgcaaatatttcaggatggcaggaatgttgagcccaagaaggagaatggcaggatataaggctaagatataggaaaggcagagctccaagagcttgtatgccatgctctggaccttggcctttcacctcaaggtggtggcaaccactgtgaggctggatgcagagaataatccagtaaagattgccttttagaaacccagtgcaaagggtagactggagaacaaatcctggagagggggacccaacaggratactataggaagagttcaggaaagaaaagatagagtcttaaattactgaacttgttatcttccttcttcaaatgcttctcttctgagctactgactttcctcattcacccttctaccactcctactgaaggtca

SEQ ID NO: 721613 - DNA, 1341 bp, Homo sapiens
taacacatgttgtaaatggaaaacaaatatttgtttactggtaataagtcaaaggctagttaagcctttcactatatctcattgcccctaatctttaaactccactttccttttccttattcttagccaactgtgaatatctgtgttcaagaagttaacaatgtagataatccaaaatgaagtgtgttttgtagcattatctgagcagtagatattagatgactaatgtagtatgctctggaaactcgtaacagttcaaaggaaataaagccattttataatgaaaccactttaaaaatcctccactgttttcatcttcacgagaatgacaaagcaccaacttaaagtaaaccaactctttccccttctctgagcttgctgtatttcctaagaaggaaggaaaaagtcaaacaagaattaagtcactaggaacttgatgaaagttctaccacagtatatgtacccaaatttacagtatcaaatggtttccaatatcagttgagacccgaggcatttaaaaatatattcatttattcatatatatattcactttacaatactgcattttaacatacataaaaatctaaagcgtttttaagaatttttcaaagtcctgtactgatgctttggcaatctcttcacaaaatatttcatcaggaatagatactagtttgtccaaagagatgtagttaggttttgctggatcatactgtgctcttcctaaataggtaagaaacaagtgtctttctttgaccttaaacagccttgtattaaatacctagaaaagaaaaaaaagtttttaaaaaacactgcacacrggaggatgaaatattaaaaagtttacttggcaaaaattttaataggttaaccaataccaagtactgaccatgtgttcagtaagtaggataaatgccagaggatttaaatcctatattttctgtgaagaaactagaaaaagggattcaaaatcaacatacaaaacaataataaaataattcagggctatactgtgtgcaaagaagattgagtgctccagagacagaggagaatgtgttaaaaaagcaaatcttcggccgggcgtggtggctcacgcctttagtgaggctgaggcaggcggatcatctgaggtcaggaattcaagacaagcctggccaacatggcaaaaccctgtctctactaaacatacaaaaattagctgggcgtggtggcgcatgcctgtaatcccagctactcaggaggctgaggcaggagaattggttgaacccaggagacggaggttgcagtgagccgagatcgcgccactgcactccagcctgggcaacagagtaagactccatctca

SEQ ID NO: 721614 - DNA, 3170 bp, Homo sapiens
atcacttttattttttgyatatgctttaaaaatctaaattttaaaatgtaattctttaattcatctgaaatgccttttcgtataaagggtgaataatataacagtcagggatacggatgagaaactcagaaaacatcaaatgttcctgccatcatccacagggaaaaaatcaagtccaagaagtgctcagttattcacttattaacttaggacctgagtcttgagctagtaggtgtaatttgtgaagccaaggtcacgtgcttcaatttaccttcaattgaaggtaaattcaaaagtaaaggctgggagacagttccaaatgctgactttgagaggtagaatttataatgtgggaaattctcaaaaacttaacatgagtatttaaaagatgttgagttgccaaaaatgataactattccctataggcgaggaaataaatttgccattgtttaaaagactcactgattgtgccaatattatttattatgtaatcttttatttcttcatagttatactgtatcttcattataacatatgcattattacatgtacaaaggtaggtgtatggtttgggttcaatttttaatagtattattacctgagtatttcggaagtttaacctaagacctgaagccagccaagagtgagacacacacacacacacacacacacacacacacacacacacacacagatattgacttttatacagtcaaccctccttatccatggtttccatatcacagattcaaccaactcttgatggaaaatatgtgaggaaaaaaaaaataacaatacaacagtaaaaatagtaccaataaaaacaatacaatataacaattatttaaatggaatttacattgtattaggtattataagtaatctagagatgttttaaagtatatcggaagacatgttttaagttacatgcaattactatgctattttatataaaagacttgaatacccaagtatttaggtatcctcaagcattctggaaccaatcctcaaaataccaaggaacaacagtatattactccaacagtgactttcatttggacgagttgcaattttaaagagcgtcttcactattaggttattaagcatttcttaatcctcagataatgaaagcaaattatagtacccaaagcctgtgctcttaacctccattgtcagtattatctccattttacaaatgataaagaaaagaaaaccttatataatgttctaagatgcgtgaactattatatatagatgagaaattccatcagttgccatcttcaaatgttaaagacagatatgtgtgtgctttggtaataaccctttccccctaagagagtctatattcctgttcactaaggatatagaatagtcctcataattacaaaatcacttagcacattactccaattttcaccaagatcacaaaatcagaacataagacagctttatccctcaagaaatttaccaataatttttttttgtaaagttgttgttttatttagttcttatgtcttcgcctcagaattgtcccggacatagaaattaatttataattccagttagagtatagagcggaaaaaatactttgaggaagaaattgaagattatacattcgacgggattttgaatgggacacattaaatggttaccttaataagggaaatacaggctacgttgcccaacacatagatagcatgccttaggagtgtgaggcaccatcttaggctttttccctttaaccctaaagaatagatattattatcccagttttaaacataaggaaagacatgggcattttcttttccaaccagttgcccatcttcaaagttaatgcttttcccactaatgcaggtcaaagaagcaaatatttttacatcacctcatctcatttctctctctatatccttggtactcactggtaggaccagtctgggcattactgtgagaggcacgtttcatatgtggtctcggagaccaggaaagcctaaatattcaatgatgctgtactaaaatttcatttcttgatgggtttcgtcattggaatgggtattccaggaacttacaagttcataagtaatgtagcaggtagtcagaataaaacattagccaaaacattggagaaattgatatgattcataaagggccacagcccttgctctgtccttattacttattttccctccttgatccctgagatgggctccactattttcaggccatagggttatgagggtgatgttcataaaaatatgctgtggaagaaggatgaaagaaaacaagtcctaggactctgaagaataaggagtatagaagatacaggagacttttgaagacttaaccttagacaaagttcatgaatgccttaattatttcacttctgtgactcaacattaatatgtgattgggtcaacgtactttaaaagtgacatcattttgagggtcatggctttataaacacaaaatgtaaaattaagctcaacaatgctagatgagatatttatgcatttaaagaagatgaattagcaaaagttgtaaccattcttacaatatcttcgaatagtaattttctataatgtatagactcatctaaaagtttattattgtcatggttattaccttcatgagttgttgactttagcagaaattctggggctaactaatgcctatcaaggtgtatttactgtgattttattttataaatatagtttataaaatttaaatttgtaatttataaaatttaaataaaattaaaatttaattgtagtttataaaatttaaataaaattaaaatttaaaatgatatttaactattttacagtttatgtgttattaatttttttcaacttttattttaggttcaggagatacatgtgcaggtttgttacatgggtaaactgcatgtcaccggggtttggtgtaaaaatgatttcatcgcccaggtagtgagcatagtactctcacccttctctgatcctcccgcatcaagcaggcctcagtgtctatcattccgatctttgcatacaagtgtactcaatgtttagttccacttataagtgagaacatgtggtatttggttttctgttcttgcattcatttgcttaggacaatggactccaggtgcatccatattgctgcaaaggatataattttgttttcttttatgactg

SEQ ID NO: 721615 - DNA, 3170 bp, Homo sapiens
atcacttttattttttgcatatgctttaaaaatctaaattttaaaatgtaattctttaattcatctgaaatgccttttcgtataaagggtgaataatataacagtcagggatacggatgagaaactcagaaaacatcaaatgttcctgccatcatccacagggaaaaaatcaagtccaagaagtgctcagttattcacttattaacttaggacctgagtcttgagctagtaggtgtaatttgtgaagccaaggtcacgtgcttcaatttaccttcaattgaaggtaaattcaaaagtaaaggctgggagacagttccaaatgctgactttgagaggtagaatttataatgtgggaaattctcaaaaacttaacatgagtatttaaaagatgttgagttgccaaaaatgataactattccctataggcgaggaaataaatttgccattgtttaaaagactcactgattgtgccaatattatttattatgtaatcttttatttcttcatagttatactgtatcttcattataacatatgcattattacatgtacaaaggtaggtgtatggtttgggttcaatttttaatagtattattacctgagtatttcggaagtttaacctaagacctgaagccagccaagagtgagacacacacacacacacacacacacacacacacacacacacacacagatattgacttttatacagtcaaccctccttatccatggtttccatatcacagattcaaccaactcttgatggaaaatatgtgaggaaaaaaaaaataacaatacaacagtaaaaatagtaccaataaaaacaatacaatataacaattatttaaatggaatttacattgtattaggtattataagtaatctagagatgttttaaagtatatcggaagacatgttttaagttacatgcaattactatgctattttatataaaagacttgaatacccaagtatttaggtatcctcaagcattctggaaccaatcctcaaaataccaaggaacaacagtatattactccaacagtgactttcatttggacgagttgcaattttaaagagcgtcttcactattaggttattaagcatttcttaatcctcagataatgaaagcaaattatagtacccaaagcctgtgctcttaacctccattgtcagtattatctccattttacaaatgataaagaaaagaaaaccttatataatgttctaagatgcgtgaactattatatatagatgagaaattccatcagttgccatcttcaaatgttaaagacagatatgtgtgtgctttggtaataaccctttccccctaagagagtctatattcctgttcactaaggatatagaatagtcctcataattacaaaatcacttagcacattactccaattttcaccaagatcacaaaatcagaacataagacagctttatccctcaagaaatttaccaataatttttttttgtaaagttgttgttttatttagttcttatgtcttcgcctcagaattgtcccggacatagaaattaatttataattccagttagagtatagagcggaaaaaatactttgaggaagaaattgaagattatacattcgacgggattttgaatgggacacattaaatggttaccttaataagggaaatacaggctacgttgcccaacacatagatagcatgccttaggagtgtgaggcaccatcttaggctttttccctttaaccctaaagaatagatattattatcccagttttaaacataaggaaagacatgggcattttcttttccaaccagttgcccatcttcaaagttaatgcttttcccactaatgcaggtcaaagaagcaaatatttttacatcacctcatctcatttctctctctatatccttggtactcactggtaggaccagtctgggcattactgtgagaggcacgtttcatatgtggtctcggagaccaggaaagcctaaatattcaatgatgctgtactaaaatttcatttcttgatgggtttcgtcattggaatgggtattccaggaacttacaagttcataagtaatgtagcaggtagtcagaataaaacattagccaaaacattggagaaattgatatgattcataaagggccacagcccttgctctgtccttattacttattttccctccttgatccctgagatgggctccactattttcaggccatagggttatgagggtgatgttcataaaaatatgctgtggaagaaggatgaaagaaaacaagtcctaggactctgaagaataaggagtatagaagatacaggaracttttgaagacttaaccttagacaaagttcatgaatgccttaattatttcacttctgtgactcaacattaatatgtgattgggtcaacgtactttaaaagtgacatcattttgagggtcatggctttataaacacaaaatgtaaaattaagctcaacaatgctagatgagatatttatgcatttaaagaagatgaattagcaaaagttgtaaccattcttacaatatcttcgaatagtaattttctataatgtatagactcatctaaaagtttattattgtcatggttattaccttcatgagttgttgactttagcagaaattctggggctaactaatgcctatcaaggtgtatttactgtgattttattttataaatatagtttataaaatttaaatttgtaatttataaaatttaaataaaattaaaatttaattgtagtttataaaatttaaataaaattaaaatttaaaatgatatttaactattttacagtttatgtgttattaatttttttcaacttttattttaggttcaggagatacatgtgcaggtttgttacatgggtaaactgcatgtcaccggggtttggtgtaaaaatgatttcatcgcccaggtagtgagcatagtactctcacccttctctgatcctcccgcatcaagcaggcctcagtgtctatcattccgatctttgcatacaagtgtactcaatgtttagttccacttataagtgagaacatgtggtatttggttttctgttcttgcattcatttgcttaggacaatggactccaggtgcatccatattgctgcaaaggatataattttgttttcttttatgactg

SEQ ID NO: 721616 - DNA, 554 bp, Homo sapiens
tgagaatatacttgaaattgattttgtttgtggtgtgaagtaataattcaatgtttccccatatggctaataaattgtcctggcttatattctcactcatctacaatgcctcttttcttatatttcaaatatttacacttatatatgatgatctatcttgatgtcctttattgtttcatctgtttattcatgtattcgtgcatcgaccatggctttaattaacatagttatataattagtcttgattatctggaaggaaatatcatgtagcattaaattatattmaaaaatgtcttgggcattttaagctttctgctctcccatatacatttaaaaatcaacttatcaaattccaccaaaacaaaacaaaaagcctaggaggttctttattgaaattttattgattgacttggaaacaatgaagttttgtgcttatatttggccttcctctttatttacatatattttaaaatatgttactgtaatttttatctttttctgaatacatttcacttagttgttttattttataaatgtaaaatttattaatgtta

SEQ ID NO: 721617 - DNA, 646 bp, Homo sapiens
ttataaatgtatgaaagaatatcactgaaggaattggggagaagaaarcgctcacctaagtaacttcagaaatgagcaaagtctgtaaaactaaaggcaaaataaaagcaaacagaaaaattgtacataaacactctagttgataaatttgctcccttacacgggtgtgggttaacagttctgatgggtactgctcttcatccatactggaattgaataaatgaatggcaggtgttagaagccagatttctcactgttggagtgagtttacaggtaagcaagggggcagttagaacgactcatgtgataatgagttagaattagatacatcagtataagctcatgtttagcttaatagagacattaatattttctgatggaaatatatttgtatttatccatgggatagtataccacttatatttccatgttctgtctgctaaaagggcctaaaaaaaatgacaccttcataacaaccaacactcatagaccacatcttgatttctaatatcactttacaataaaagaactaaggcctgttttaaaaatggctgattctaagactgggacaggatctaaaaagatgagtgtgaagcattgtacagggtcagaaaatatggaagtaccaaaagcaacacacatacaa

SEQ ID NO: 721618 - DNA, 1321 bp, Homo sapiens
aaattagacctggccaaaatctctagtaaaatgtttaattagaagtcgtgggagtgaacatcactttctcgttcctgattttaggggaaaagtatccaatcgagtttttttgctatgataaaatgctggattttgtcaaatgcattttcttttttttattttaatttttattttaagttctggggtgcatgtgcaggatgtgcaggtttgttacataggtaaacatgttccatggtggtttgctgcacccatcaacccatcacctaggtattaaccccagcatgcattaactatttttcctaatgctctccctctctgcacccscaacaggcccacacaacagtgtgtgttattcccttccctgtgtccatgtcttctcactgttcagctcccacttataagtgagaacatgcagtgtttggttttctattcccattagcttgctgaggagaatggcttccagctccatccatgtccctgcaaaggatgtgatcttgttcctttttatggctgcatagtattccatggtatatatgtaccacattttctttatccagcctatcattaatgggcatttgggttgatttcatgactttgctattgtgagtggtgctgcaatgaacatatatgtgcatgtatctttgaaacagaatgatttatattcctttgggtatatagccagtaatgggattgctgggtcaaatggtatttctggctctagatctttggggaatcaccacaccaccttccacagtgggtgaactaatttacattcccaccaacagtgtaaaagtattcctatttctccgcaaccttagcagcatctgttgtttcttgactttttaataattgccattctgactggtgtgagatggtatctcactgtggttttgattgcatttctctaacgatcagtgatgttgagctttaccctcaaatgcactttttacagccattgagatgatcatggcttttgttttgtttttgaggttttttttttttctgtcattctattaaaatggtgaattatattgattgatgtcaaaccaatcttgcattcctgggataaatcactcttggtcaaaatgtataatcctttttcacatgttgctaaattcagtttgctaggattttgttggaggatttggccatttaattttataaattgcttttaggtatctatgaagataatcatggattttctctttgaggtcttaatatagtaagttatattaataattttcttaacatataaatatccattaggtagtgatgtactatctttttcatattaggttggaatctacttgctaatatttta

SEQ ID NO: 721619 - DNA, 488 bp, Homo sapiens
agtgtcattaagtaaataatataaaatcttcagtattttaatagaaagatcaagaaaactaatataggctaacakcaaacatatttgaatgtaaatatatctcctatcttctcaacacaatgaatttctagtaactattgtctaaggataatcaccctcaagagaattgagcctacacttgttatttatttcttctgaaaatcacaataattgaataatctagaaaatatatggaaatggaagtatatttatgtcacagcacagcctgaggtgctatgttaatagcaaatattccctgtacctggtgagattatataaggtgtaaagagcctatgaataatagtaagaaaacacctaggacttctgaatcaaaggcctgcattatagtcgacattgaaatagctttacctgaataattattctgcatctctcttgataatgataataaaaactagcaactgttgtgcaatgcattattttaatcctta

SEQ ID NO: 721620 - DNA, 488 bp, Homo sapiens
agtgtcattaagtaaataatataaaatcttcagtattttaatagaaagatcaagaaaactaatataggctaacatcaaacatatttgaatgtaaatatatctcctatcttctcaacacaatgaatttctagtaactattgtctaaggataatcaccctcaagagaattgagcctacacttgttatttatttcttctgaaaatcacaataattgaataatctagaaaatrtatggaaatggaagtatatttatgtcacagcacagcctgaggtgctatgttaatagcaaatattccctgtacctggtgagattatataaggtgtaaagagcctatgaataatagtaagaaaacacctaggacttctgaatcaaaggcctgcattatagtcgacattgaaatagctttacctgaataattattctgcatctctcttgataatgataataaaaactagcaactgttgtgcaatgcattattttaatcctta

SEQ ID NO: 721621 - DNA, 665 bp, Homo sapiens
aatcaaagaaaatgtatattcctacatttataataaaccatatctgatatttataactttaaaaataaatgtatttattttgtctgtccaagttttacttttatcagaaatgaagaaacaatgacatcatctttgtaaaactttttacgtttggttgtttatatttttttcttacaattccttcagtctaaacatacattggatacccttatttcttttcttttttttttctgtattttttttttttagtacagacgggatttcagcatgttgatcaggctggtctcgaactcctgacctcatgatctgcctgccttggcctcccaaagtgctgggattacagcctgagccaatgtgtycgtcctggatactcttatttcttaaagacaagatctaaattatataaacatttatgtaagtatgaaaaccaaagcaatttaaattatttaaagttttaagttacaatgtattatgtattaatttgccgaacagttaagccatgttttgaaagtctttggacatcaatttggttcactttgtttgcctgttaacttactgtgaatatacatgattaaataattaatactaaccctcatgaaacaattattgtgatgaaagtagcctttttgtatcatttgtattaaaagtattgctaaagtttatag

SEQ ID NO: 721622 - DNA, 665 bp, Homo sapiens
aatcaaagaaaatgtatattcctacatttataataaaccatatctgatatttataactttaaaaataaatgtatttattttgtctgtccaagttttacttttatcagaaatgaagaaacaatgacatcatctttgtaaaactttttacgtttggttgtttatatttttttcttacaattccttcagtctaaacatacattggatacccttatttcttttcttttttttttctgtattttttttttttagtacagacgggatttcagcatgttgatcaggctggtctcgaactcctgacctcatgatctgcctgccttggcctcccaaagtgctgggattacagcctgagccaatgtgtccgtcctggatactcttatttcttaaagacaagatctaaattatataaacatttatgtaagtatgaaaaccaaagcaatttaaattatttaaagttttaagttacaatgtattatgtattaatttgcygaacagttaagccatgttttgaaagtctttggacatcaatttggttcactttgtttgcctgttaacttactgtgaatatacatgattaaataattaatactaaccctcatgaaacaattattgtgatgaaagtagcctttttgtatcatttgtattaaaagtattgctaaagtttatag

SEQ ID NO: 721623 - DNA, 1276 bp, Homo sapiens
gaaaacatgggttctctgtttcagtttctgttctctgttatatctattctttgttgttttattattgttgttgtcaatttgacaacaatatgcataaagccatgaaaaaataagtgggtgtaatatggtttgttgactgataattatattatatagttttgtagttttactgaaaagagattgacctaattttctgtttctttctattataactagaagcacacatatatatgtacatagacaaaaaggaaaataaaagaaaaacaccctgaaagagcaacctcaatactcataaaaagctacttttaaaatcaggaaaaaatatagtgacaaaacaaaaacggaaaatattattttggtcttataaactgtataaaaataatcattgaaactaaaacatatgttatgtgtggttttattattatccccaaatcaacaagaatgtgaaattcttgagagcagtgttcaaaaatgttatttgtgtaatgttctccctctcatcttagtgttttatccaaaaataagccatcaaatgatgattaattctaacatttatttttaaatgccctctcttatgcatctaaatatacttctgagagaaatcagaagataatctcatctctgcttctcattatatttccccagtgcttacagattttactgaaacctctgaatgtctgttttcattcacttttaaagatttcattattatctacagactacattttggaaatctatatctattatractattttttttctgaaaatagttgatttctgatatttttattttaaacaatatttttatacaaagccttttattttatataaaaatattttttacaaaagaaacccaaaatgttcccaaatatatactttctcacaaaacacaaaatttccaaatatttagtcatttttcatggaggctatttcacaacttgttcttatctttctataattcctatctaattacttcatagcataacattaagattaacatgttctcactttgggaggccgaggcgcgcggatcacgaggtcaggagatcaagaccatcctggctaacatggtgaaaccccgtctctactaaaaatacaagaaaattagccaggcgtggtggtgggcacctgtagacacagctactctggaggctgaggcaggagaatggcgtgaacccaggaggcggagcttgcagtgagccgagatcacaccactgcactccagcctgggcgacagagcgaaactctgtctcaaaaaaaaaaaaaaaaaaaaaaa

SEQ ID NO: 721624 - DNA, 1320 bp, Homo sapiens
aagaagttgtctttgtttctaggatgtgaaatcaggaaatatatgtttgttgaaatgtataaagtagtggtgaatttcagctcaactgatttgccagtatacagagaaaaacacctgttctttgagatacacagtgcctgttgggaatctgcaaaaattgtttgttggtagtcactaaactcttgttaccctgaattttattctctttcgcttcccccactactagcctaataaatatttcagaataataacaaagtttaaagaaagaatacttagcctgttcttctgaaatagtctttgtttttcttctctgtttactaacctccttttgaggataaaatcttatttcctttctttatcctgtagtttcctttgtacactcatagcctttcttcagatgcagattttgcagtcagataaaagtctctactttaagcaccaattaaatcaggaaaagatgatgggcctggagttattgtcttcaagttcctgattttgaggaaactctgattatgtcagtagtgcagttatctgatagtaaggttacactgtccaaataaggtgactttggaagaaaataacataaagccatctcatgatctggcagcctttcgctgtttcgctttctgcagagcggcattccttctgcatgtctctgtcagtctctgtgagagtggggtttctatccacacagcactgcggtgcagcttctccgtgttggcagaatcttccatgctctgctggttcgttgtctttccagctgtgctgtgcagtgcaatgtgctggctgctgagctcatgagacacggcccgtctcaactgagaagtgctgtgcgtataaaacacacaccaagtagagaagacttgataggaaaaaagtgtaaggctgggtgcggtggctcatgcctataatcctagcactttgggaggctgaggtaggaggattgtttgcttccagtttgaaatgagccggggcaacatagcaagatcccctctgagaaaaaaaagtgtaaaacatctcattaatttttatatcaggctgggcgtggtggctcaagcttgtaatcccagcactttgggaggctgaggcgggtggatcacctgaggtcaggagttcgagaccagcctgaccaacgtggagaaaccccatctctactaaaaatacaaaactcagctgggtgtggtggcgcatgcctataatcccagctactcgggaggctgaggcagaattgcttgaacctgggaggcggaggttgcagtgagccaagatcgygtcattgcactccagcctgggcaacaagagcaaaactccgtctcaaaa

SEQ ID NO: 721625 - DNA, 638 bp, Homo sapiens
tctgtctcaaaaaacaaaacaaaacaaaacaaacaaaaaaaaaacctccctggacctttctttccctgacatataaattcctgacaaagattacccagagagacaaaaaatgaaatatgaatctggaagatattagaaggaaaggcaatttccaatgattataaatttggattgctagcttttgccaaggataatcaaacctaatgtagactctgcattcattcattcattcattcattcwttctttcacttactcactcactcacttattaagaaatggtctcaccctgtcacccaggctagagtgcagtggtacaatcttagctcactgcagcctcaaactcccgggctcaagtgatgctcccgcctcagcctatcaaagcactgggattacaggcatgcgccaccattcccagacaggctcttcctttaaaaaggggtgagagccttgaaatccttccaggacctctctcagtattcacttctcacattagcttcctcctgctcttcctggactatccacgcatcctcaaacatccccgtcttggggtgggggtgggggtcaggactgtatctcccttcccttccccacgtcatcagttcctacccatggcagcaggttcttcaggtaccagttc

SEQ ID NO: 721626 - DNA, 638 bp, Homo sapiens
tctgtctcaaaaaacaaaacaaaacaaaacaaacaaaaaaaaaacctccctggacctttctttccctgacatataaattcctgacaaagattacccagagagacaaaaaatgaaatatgaatctggaagatattagaaggaaaggcaatttccaatgattataaatttggattgctagcttttgccaaggataatcaaacctaatgtagactctgcattcattcattcattcattcattcattctttcacttactcactcactcacttattaagaaatggtctcaccctgtcacccaggctagagtgcagtggtacaatcttagctcactgcagcctcraactcccgggctcaagtgatgctcccgcctcagcctatcaaagcactgggattacaggcatgcgccaccattcccagacaggctcttcctttaaaaaggggtgagagccttgaaatccttccaggacctctctcagtattcacttctcacattagcttcctcctgctcttcctggactatccacgcatcctcaaacatccccgtcttggggtgggggtgggggtcaggactgtatctcccttcccttccccacgtcatcagttcctacccatggcagcaggttcttcaggtaccagttc

SEQ ID NO: 721627 - DNA, 623 bp, Homo sapiens
ttttttaaatcattaaactgctttgtattctttaaacatgagcactgtatttgaaataaaaggtattactgcattattacattttaagttggttttagtatttttataccagtgggaagttttaattagaaatcttagcttattctattcaaaaatgaatgagatagaggtaaatgcaaatgaagcattaatctgctaaaagttttttttctctttatatattttgttttctttttgtcttctgccaagcaaaagagctctgtgtatcagtgccaggaggagcctggtaatgattaattgactgagctgtcaaactaggacagtatgtgtataagcaggtgagtagtatgaggggcacaggctatccctcttatgagagaaactttgtttgaaagtcatttgtaattaaraaagggtaggaggtggtggatgaaaaaagagacgagagaaatgacgaaatgaatgttcccattaagaagttcattattaagggaaatttcaagctttcaaatatgccctaatccttctctatgttagcatgttctctgtatattttaagaattatattttagctaattaataggaaacttacaatgttccaatggtcaatctgacagtttcca

SEQ ID NO: 721628 - DNA, 1332 bp, Homo sapiens
tatttatttttaggggctccgttgggaaaagagaatacaaataaaccttgtgtctaatattttctaaatttatggttgtaactcagtagtcttaactttaagagggccattcagtgttagatatcttgagagatcatacatgaaactaactctagttgcatggtctgtgttcacatagaagttagttcaccatgttcacccactagcagtgagaagacttatgttgcttaagtgtaatcttttcttttaaaatattgatgagctttgaacccagaacctaatcaaatacttaatcatagaaaacctcaaaacagaagacatatacttcatataattaattcagttacaaggatagttcatcattatttcattgtatcctgaactaactgtaccaaaattaattttttctgtaataaagtaccttttaaagaatacaagttatatgcaataataaattggtatacactcagaaaataaagtggttctataactatatgaacatcaaataatacatttctagtagcacctctatttggatattacttaacaaggtctatggatctcattctcaagaattttgtgaaattgaactattaggataatagttacattattacactgcttccactaatgaacctatatcttatctactctaatgatgataataattaacatttattcaacagttatttatgccaagcatttaagtttcatagcagcactcagaggtaggtttcattttccacatgaggaaactgaggttaagaaaagatactttaactttctgatcagcacaggagttttgacctgctgtgtttctaacctgggccagctcacccctccttgggcaacctggtggttccctgctcctgggaggtcaccatattgatgccaaacttggtgcggacacctgatcctgctagagaactcctaggctcaagcgatcctcccacctcagcctcccaagtagctgggactacaggcacgtgccaccatgcccagcaatactttaattttctaaagccatattagttgctgaattggaattagaaaccaaattcacctaatccgaaatcacatcctataccacccaccactaccaactctcccctccaccccccaacccaggccctggacacttttcctattctgctctttaygacttctgcttttaagcctttagttttacgtgaacaaacgtagttggattttttttgtggggtttatgtcattccaactttttatataggtagcagacattactaaagagtttttttgcatgtatcttccagaagacatccttcatttgtaagatctttgtaagttctcatt

SEQ ID NO: 721629 - DNA, 1959 bp, Homo sapiens
tgtatgaggtataagtgtgacttctttgttcactgctatatccacagcctctagaacagtgcctgatacagtacacactcaataaatattttcttaataaataaatggtcaattgttttagagctatttgcctcttttaacattttaaaaaatttattttcataagttctgatrcactgagaaaactactaaaaatgctgtataatcataaaattgaaaacagaaggactattgtggtagcaaggatgagaaatatcttaggtaattgatcctggaggatttccactaatatttctttcaaaaaaagggagaaatctctttcaaacagcatagatataaggtaacactttcatgatttttagctttagaaaaattgatttttaaaacattttcatcaagactcctacttacatttcttgtgaagtatgctctggaaatataaatataatggcctaagaaaagagagggaggtcttgtgaatattctgcttttctatttgaaatctttttattttcattttaatcatttggataatagtctcacagttgttccccactgtctgatagatttagagcttttggaagaagcccagaaatgaatgagtaggcagagtgttaactgattacacatatcagcagtataacatcaatttattaatttctgcttcatgccagttttttaagggagtggagagtaaaggcatgttgtaaccaggatgagcttaaggggcagaagaggccctactgcatcttacctaagctgaaaattcatgcagactctattttatcattaactacaatgccttagtctgaatgagaggaggagagagaatacagagaggagatttagggacccaaagactagtttttacttcttcacaaatctgaaaactccttaacgtattttcagttttaatatgttcatgtgttcattcatctattcaacaaagactttttgattgcttgttctgtgccaagacaatatgctctacccaggttatattcattttttactgaaaaaaaaaatgcattgcacccctactagtgccaggccctgttccaagccctcatgatagagaagcaaaaatattaagttcctactttcactgagcttacattatatgaagaggaaaataatagtaagcaagaaaccaggttgggcgtggtggttcacacctgtaatcctaccactttgggaggccaaggcaggaggatacccttgagcccaggaattcgagaccagcctgggcaacatagggagactctgtctcagaaaaaataaataaattaaaaagaaaccaaacagacaaacaaacatacattaccatgttctggcaaatgctatgatgcaatatatagctaggtaggtggaaatggaacatgggatgaggacatagaaataaatctgtggtgaaacaaatggcaatattattttttgtggttttgtgcttaagaaagacagctctagaggcaagtgtgagggccagtctgaatgatggtaagactggggtctgatggttagatatcattgcagctgtttagggcagagatggcaatggctatgctaaggtggtgacagtggagtagagtataagtaaatagagagaaagcatatattctatatagtcaagcaccacataatgacatttgcatcaacagtgagccatatataccactatggcaccataaataagattataatgaagctgaataattcctatcacttagtgatgtcacagccattgtaaagtagtgcaatgtattaccttttctattcagatatgtttaagatacacaaatacttattgttgtgttacaattgcctatgttattcaatacgccatatagatttgtagcctacgagcaatagtctctgtggtataggcatgtagcaggctataccatctaagtttgtgtaagtgcaccctgtgatgtttgcacaatggcgaaatcacctaag

SEQ ID NO: 721630 - DNA, 658 bp, Homo sapiens
atgtattttaaaagtcctgtaattgctattaactcagacaagtttacttaacttgttctaagctyctgttatttactacaatttactttatcactcaacaatctctattatatatgttgttttccatgagaaatttttttattaataattaggattcttcagggataagaaaatatttgaataactaagtttgtgcataaacacattaaggtcaaatacccatgacaatattgtgtgtttctgtgtactagagacaaaaacttcaaaaaaaattttaatgaatatacattaaaaactgctttcattacactgagatgatcttccctcaatgcatgaataccttcagaattcacaaagaccaaagaattgtataaaatataatagccttaaaaatcttatttgtacctggcacagtggctcctgcctgtaatcccagcatactggcaagctgaggcaggcagatcacctgagatcaggagtttgagagcagcctggccaacatggtgaaaccccatctctactaaaaatagagcatttagcagggtatggtagcacatgcaggtagtatcagctactcgaggggctgaggcaggagaattgcttgaacccgagaggcagaggtggtaatgagtcaagaccgagccactgcactccagcc

SEQ ID NO: 721631 - DNA, 658 bp, Homo sapiens
atgtattttaaaagtcctgtaattgctattaactcagacaagtttacttaacttgttctaagcttctgttatttactacaatttactttatcactcaacaatctctattatatatgttgttttccatgagaaatttttttattaataattaggattcttcagggataagaaaatatttgaataactaagtttgtgcataaacacattaaggtcaaatacccatgacaatattgtgtgtttctgtgtactagagacaaaaacttcaaaaaaawttttaatgaatatacattaaaaactgctttcattacactgagatgatcttccctcaatgcatgaataccttcagaattcacaaagaccaaagaattgtataaaatataatagccttaaaaatcttatttgtacctggcacagtggctcctgcctgtaatcccagcatactggcaagctgaggcaggcagatcacctgagatcaggagtttgagagcagcctggccaacatggtgaaaccccatctctactaaaaatagagcatttagcagggtatggtagcacatgcaggtagtatcagctactcgaggggctgaggcaggagaattgcttgaacccgagaggcagaggtggtaatgagtcaagaccgagccactgcactccagcc

SEQ ID NO: 721632 - DNA, 658 bp, Homo sapiens
atgtattttaaaagtcctgtaattgctattaactcagacaagtttacttaacttgttctaagcttctgttatttactacaatttactttatcactcaacaatctctattatatatgttgttttccatgagaaatttttttattaataattaggattcttcagggataagaaaatatttgaataactaagtttgtgcataaacacattaaggtcaaatacccatgacaatattgtgtgtttctgtgtactagagacaaaaacttcaaaaaaaattttaatgaatatacattaaaaactgctttcattamactgagatgatcttccctcaatgcatgaataccttcagaattcacaaagaccaaagaattgtataaaatataatagccttaaaaatcttatttgtacctggcacagtggctcctgcctgtaatcccagcatactggcaagctgaggcaggcagatcacctgagatcaggagtttgagagcagcctggccaacatggtgaaaccccatctctactaaaaatagagcatttagcagggtatggtagcacatgcaggtagtatcagctactcgaggggctgaggcaggagaattgcttgaacccgagaggcagaggtggtaatgagtcaagaccgagccactgcactccagcc

SEQ ID NO: 721633 - DNA, 658 bp, Homo sapiens
atgtattttaaaagtcctgtaattgctattaactcagacaagtttacttaacttgttctaagcttctgttatttactacaatttactttatcactcaacaatctctattatatatgttgttttccatgagaaatttttttattaataattaggattcttcagggataagaaaatatttgaataactaagtttgtgcataaacacattaaggtcaaatacccatgacaatattgtgtgtttctgtgtactagagacaaaaacttcaaaaaaaattttaatgaatatacattaaaaactgctttcattacactgagatgatcttccctcaatgcatgaataccttcagaattcacaaagaccaaagaattgtataaaatataatagccttaaaaatcttayttgtacctggcacagtggctcctgcctgtaatcccagcatactggcaagctgaggcaggcagatcacctgagatcaggagtttgagagcagcctggccaacatggtgaaaccccatctctactaaaaatagagcatttagcagggtatggtagcacatgcaggtagtatcagctactcgaggggctgaggcaggagaattgcttgaacccgagaggcagaggtggtaatgagtcaagaccgagccactgcactccagcc

SEQ ID NO: 721634 - DNA, 1141 bp, Homo sapiens
tggcagctgaggccaagcctgaaggagcagctggaggctctatgtgggcagttgggagatgtatgctatgtccagcacactctgcttacttagggtggacacattcattctctgtctgctccagttatactggagagaagaatatggaatgtggatagaaaggacccacttctctttttatcctggaaggcattgaaagtgctcaactggttcaaatggggtcaataagctttgtgagatgtgggatctgtttatagtcagatatccatttccagaatcaatggaggacaaagagaatccacscaaactgccgtaaagaattaagctatttcctatgatggtgaatggtaagaaccatcgtaactggcaacctcatttgcactctcctgcctctcctctcaaatttcagacagtatttgggtggatgtgagtgaagaatatatcaataatacgggaaactaactataaaatacagctatatcctatgttatcggaatagtttttgttctatttcaatcctgtttacagtcattaatttcatattagagccaaattatttaacacctatagataattaaaagacaatttaacctatgtgtctaaataaagagtttaggcagctctgagagtgacttgcgagagtgttggtttctaaggatactgagaaaaaaagtaaaagatgacagggcaacatcaaagccagctagagctccgatttaattacaaggccagctccaaacctgagagccaaatggaaaggtatcaaggaaggtattaagaaaacagcctcaggtatccacttccctggctcaagaagagtcacaaagccccaaactctatctttccatatgtttagttgagtcacccaagctgtgtgtatggaaacagatagactgtcaactctttaccctgagctatttatggaaaaccaaaggagtaggtgatgctgagtgaacaggtggattttagtaaaatatttccctggctgctttaacttatgcaaatccaaactgaagaaagcaacatgatgctaattaaagctgtagctcagagtttgccaaaactgctggctttgatgaacgagcctttcaaagcctcccaagctcatggatgatctaccagtcagcatgcacctcattca

SEQ ID NO: 721635 - DNA, 1141 bp, Homo sapiens
tggcagctgaggccaagcctgaaggagcagctggaggctctatgtgggcagttgggagatgtatgctatgtccagcacactctgcttacttagggtggacacattcattctctgtctgctccagttatactggagagaagaatatggaatgtggatagaaaggacccacttctctttttatcctggaaggcattgaaagtgctcaactggttcaaatggggtcaataagctttgtgagatgtgggatctgtttatagtcagatatccatttccagaatcaatggaggacaaagagaatccacccaaactgccgtaaagaattaagctatttcctatgatggtgaatggtaagaaccatcgtaactggcaacctcatttgcactctcctgcctctcctctcaaatttcagacagtatttgggtggatgtgagtgaagaatatatcaataatacgggaaactaactataaaatacagctatatcctatgttatcggaatagtttttgttctatttcaatcctgtttacagtcattaatttcatattagagccaaattatttaacacctatagataattaaaagacaatttaacctatgtgtctaaataaagagtttaggcagctctgagagtgacttgcgagagtgttggtttctaaggatactgagaaaaaaagtaaaagatgacagggcaacatcaaagccagctagagctccgatttaattacaaggccagctccaaacctgagagccaaatggaaaggtatcaaggaaggtattaagaaaacagcctcaggtatccacttccctggctcaagaagagtcacaaagccccaaactctatctttccatatgtttagttgagtcacccaagctgtgtgtatggaaacagatagactgtcaactctttaccytgagctatttatggaaaaccaaaggagtaggtgatgctgagtgaacaggtggattttagtaaaatatttccctggctgctttaacttatgcaaatccaaactgaagaaagcaacatgatgctaattaaagctgtagctcagagtttgccaaaactgctggctttgatgaacgagcctttcaaagcctcccaagctcatggatgatctaccagtcagcatgcacctcattca

SEQ ID NO: 721636 - DNA, 1349 bp, Homo sapiens
acacctatgagactctttagctgcctcatcattgtattttaaatgtggcctcacagagaaaccatggattttagaatcgggaagatacacctccaccacttattagttatgtaaatttaacaagctaatttgtctgtgtgagtcttgattttctcagctataaaatggggacaatagcaaaaaataatgataagataatcagattaaaagatatatcatagagatatatatattatcttttaatatatattaaaagatatattaaaagatatatctgtaatagagatattacagatatattatagatatagatataatagatatatgacagatatattatagacaaacacctggcaaatgagtgggcttacactgggtactccccaaaatttacccccaccccttccaaattctgccaaattttatagagtagctatataaaaattatttttatgtgttttcttaaatgctcttcttaagacattggcccttatgttgtaggaaacacctcgatgccaggttgaagttcaatacttacgttaacacattatctttctattttatatcaatgggagttatttaaaccaccatatttcttttcagcttaaattatcagaaaatttagatgtgaaattaatgctcaaaataaaaaagtgtttctcctctctatattacttatggttattcttaaaaacaaatcacccatttacttattcaacaaatcattttggccatccaataaatttattgagagggtatatcctcaagaggaagagctaagtcttatgcctgcatgtaatacactttatttattaactgagtgatgatggacaagctatttcttagcctcaaactcctcaaatgttaaattaggctaataatagtatctcacaagattgttgcggggattacataaatcatgtacttagaacaatacctggcatttggcatgcactatagcaatgttatttagtattatttaccaaagaatagttactgaagatacacagtaaaaaagcatcttaaaaaggtaaaaagagtatataaacttacctaagtggaagttaagtgtagcataaagtatatcttataaatgaataatggagtaaatgaaattcttattcatctcatctaatgcaagaaaactcaactaccaacrttatggaattttgatttgatatcactcctaactctattttcactctccctgaaggtgttcctcattttccctccttgagtctgtctatatgcaagaatggatgagcaatcagaaatgtgtgctcactgatatgtggatatagacctctgaagcatctaccccattctaagatggtccctgctcaaaggga

SEQ ID NO: 721637 - DNA, 642 bp, Homo sapiens
tgtgacattttcctttctgtgcctggcttaattcacttaacataatgatctccagttccatctgtgttgcaaatgacaggatctcattcttttttatggctgaataayactccattgtatattatgtaccatattttatttatttattcatctgtcagtggacacttagcctgcttccaaattttgctattgtgaccagtgctgcaacaaacatgggagtacagatatctcttcgatatattgatttgctttattttgagtatatacccagcagtgggattgctggatcacataatagagatcataaatctctattatgtgatttttaaaccaccaatttcctgctagtatgtcctaataaacattttataaagcacaattatataattttaaattgttttgagttttaaaaatgtcatatgcaaataaaaaatgatgatgttactgtaattattcttgtaaagagacagccaggcttttagaaggggaaacatagatgacgagtcaaggtagggaggacttgaactgcaaaagattttgtatcagtcattgggatgcataggattttgtatcagtcattaatgactgaagaattattggagctgtctggttgtctttgtgaaattgtttgatctatttatt

SEQ ID NO: 721638 - DNA, 596 bp, Homo sapiens
caaaaaagtatattgcttactccacctcatgtaacttattggtatagtcttggctttcatcattcttccctgtccccacaatacattaatgatgtgactttattattcacatacacacagaacaatatctagaacgacattatagctgactgaaatgaggttactctttgtgtcagagacagcctggatgawtgcctgagtgaatagtgataaataagcagacctttattatgtggaggcatcaagattttgtgattagtttgttaaaacaactagtattaattacctgaattttatagtttaattaagtttgatattttatgtaggcatctttacttagttgtaattttgaaggttattatttttaaactaatttgttaatctatcaaaaagttattaaaatatgtcttaaagttaatgtgtggtttaatcttttaaaataaagaacaaagtatatgtttagatggcattaatatcagttgctttcaaaaattcagcgtgtaggctgtcatttaaaaagtttaaacaaatagtaccaaatgagattataatttaaaaataaacaatggagtgagatttggtaataggtcatgaac

SEQ ID NO: 721639 - DNA, 579 bp, Homo sapiens
tgggcttggaaacataaataatgtttaaaaatattatgttcttgtaggattatgtgttctaacttttcatagccacagagatcattttatccatgacaaatttaaaatgaaagaagccaagtatcttattgaaggccacagagtttgtaagtggtagagccaaaacctaaagaggggtctgttatatatggcattgaagactgtacaatttctattctaccayggaatctcctaaaacacatgtatgttttttaattaagtcaatgaaaactctgaaaggctaaaaattttacttctaatccttaaatttttttaactgagtatcattcattcaaacatttactgggtactgttttacctaaaactccctctagtaatcaccaatactaataaactattactgacattgtcaatgaaaaaaatactcaaattattttaaaaactcaccactgttattagaaatttatcataattatttcttttacctatgaatgtttgatgtgctgagacttctgcaaaggtaacagattgttatatataagacacccttcttgctcaaaacagaaatgctttattgaa

SEQ ID NO: 721640 - DNA, 981 bp, Homo sapiens
ttgctggacagaaaatcataaaaccctctgaytaagcagaaggaaagaggagatgaaagactgagtctagcctcagctgtctcactgattgctaggaattccaacaaaccatttcatttcttagaccctcagtcttctcacctgtaaaatgagctggttggactacagaatcaccaaggtctctttctctcatgtctctaaaaatcttggattctagaacagttttccgattgcttcattacagttcctgagatgtgtgctctaattttatgtaaatgtgtgtattttagatatgcttattaaatatttagtcagtattgttttcttttgagacttaaggccattgactaaatttttgtttcttaaatttttcctaaaagcaaaatgagtgagccccatttacatgggtaaaactgaattaataaccttgacataatgaaaggcacatggtctttgaagccaggtggagttgtactcttaatactgctcctctccatactagctgtgtaacattgaccaaattacttcatctctctgagctttgcagccctcacttataaagagggactattaacttctttacacagttgtatgagaagtaaagaaagacaggtgcaatgcccagcactcagtagtcagtccacaaatatttacttctgctttccttctttcctccacatctagtttaagaatttatacaaaagcaaaagagataatgcctttgaaatatttttgagtcattaattatatctaacatttggattagatttgcatgagataaaaggttacagaaattcccccaaataaggctggaagtttgctctactgacaaacaatgttcttttcttggatgctgaaattgatttatctattaacaaatttatcagtacttcctccatccaagaggcatatctgtaaaatggaaagatttgtagcttaaaacaaaaaataaagaaaacaagtggagaaatggtcatgcat

SEQ ID NO: 721641 - DNA, 1490 bp, Homo sapiens
atcagaaataatttattcaacactatatctcaaccttgagtcaagacagtatactaragatcttaactctttgctgtaaaagagaattcactaagttcaagtttcaaacaatacttatcctcacatagtctttatttgcactattctatacagcagccacatgtagttactgagcatatgagccacatgggctaactgggctcttgagactagatacaccttggattttgaagactttcatttaaaaaagtaaaatatttcatttgtttatgttgagagcatattgaaataatatttttgatatactagattaaatattattaaaataatttcacctgtttcttttaacgtattttaatgtggctcctagaaaattttaaactacatatgtaacttgtattacatttctattgaacagtgttgactatgtcattcaatctagcacttaataaccatagtattttttcaagcaatttcaagcaagttcaaaccctttaaatgggtcctttacttgactcatacaattttttgtgctgatcttgtctttccaactagaatagacacttaagtatttaataagcagatatttattgaccaaacttcattcattcattcattcaaaactacaatcttaattttatcagaagaggatcttttatatttcaggatccatgaagcatgtttttctggaaatatgtgatgagaacccaagattccctcaacggaggtattttatcaactccttaatctcctatagaaatagatgtgatctcaagtctcaagtgagtacatttaggagaatttatccttgagggtatatttttaaaaatcactactattttccttattttattaatcaatcttttaatggatatcccctcctcattccaactcaatgatccattaaagttcagtgtaatttttaaatgcttaaatgcaatgtaaaggcctatccagcccatggttccttacctgtaccacagatcacagaaaataattttgagtgtttattttttcaattatcccaagaatggcacatccctagggaccactctagatgcacgagagagaagttaattcatttcacagaatagatgccttaagttttatctatgaattctccagtagagcccaattaagaaatgactagactcttgtattgcctaaatattgattaagattcacaaacagaaagtgtttttatctatacagttgtggtttctcatctgaaaaaagcatgtttctaagaaaacaagctctcaaaaaaaaagaaagttagcattttgtctggcagattgtataattatgctctaaaaagacttctaagatttactcagaaaaacatggacaacaaggagtgggtcagtgatgtcttgaacctagacactgtactctattattacttaatcgagtacaatcatgaattttaataaagtacacatatgaattccatatttccattcttaaaataccactaagtaatcacggtt

SEQ ID NO: 721642 - DNA, 2528 bp, Homo sapiens
tattctaatgaaatgcttgattctttagtgtaaggctagactcatatcagaggaacaacaactaaattggtctcagaatgctagaagaaaataaacatttgtagtaccttgaaagaaaacagttatgactcaaggatttttatacccaagcaagctgttgttattacgtgaatgccattttaagattatcgatgttatcagagaatataccatttcgtactttttcacacacggaaaaataaaaatttgctccatgttaccacgagataaatcaaaactaaaaactgaataatgagaaagaaattggagatttgactggcagtgagtattgatattagttaaaaatctagagataagcccaaagcaatgttgttctgttacgaaaacatcaaattcatggaatgttaaaaaatattctaggacaaattgactccatagtcaaacaattttgagaaagtttgcataatgcaacttcctgaagacaagccacaatatttatgattatattaatctctctttaaaatctctcttaaaataaagatgtcartataattgtgcttacctcaggcaagcctcattgccaggtttcccttaccattaaagattttcttttttcaaaacacttattaatgtattataaaatagagtgtttgggggcagtcacagatggggaaatgctagcctaaataattgtgataaatggacctaaaaagaaaacataagagacaaaaattataaagcaatacttgttaaaaagaaaaagaggggatcaacatgacaaagatgaagatgacaaagatgggatggataatgtattgggaactaataaagtagacaaagcaacatatacaattttcatcttccatttgaagaaatcaagtttttttttgaattgcaagaaaataaatatgtttaaaaatggttttggaaatcaaacactgaaaaatttaaatgcatttgcctaactgcagatcaaggagaaaatacattataaatttagttattttttatttacacttttaatttaaaaaaataacaatttagaagaataataaaattaggaatatttatatatctaagtttttggagtaaaactaaagctgcatcaaaagtaaattcacatcttatatacaacttttattaaacaaagagaatcaaaaattaaatgaattaaactttatttcaagaatttagaaacaatacttcaagaagttctaaggaaatgaacagaaaggaaatactaaatatcaaatcaaaaataaatgaaatctaaaacagaaaaactgaggaaatcgcagaaacaaaagccttgagctgatttcttgtattgcggtcagctgaggctatgcttaagcagcttaagaaatctctcctcttattctgcctttggagcacccttgctttgatttggtagccccattgtccaccttatagcttcaaacatgttttctgtccatatgccgaggtctttcagcttcgctataaaagaattccattgaccccttggtatggacgtgtttcagtttcagtttcccccccgtaacctatttttttcatataatgctatattctaccctttgtagctaaggtccagaatcttaggtttgagtatgggagggaagatggagtattacaaatgacaaagggcatataaaatgtatatatatatttatatttatatacacagaatgtatatcttttataatgtaatatttatgatgtaaacatataatcatatattttaaatcataaataatataacattattaatatttatatttacatatatatacacatatatattcacattccactaaaaaaagttcattatatgagactattgtatgttttccccaagtcagaattttctgaaatggacattttctgtaaaaatataagccattattacatagtaacaaagaagtaacaaggtaaatcagaaattaaaaataaaaacaaatgtaaaagaattgtctatttaaaaagatcttggcttgaattctttgtggattttttttatcttcatgaaacagatccttcttttaatatatatttttcttagcacatagagaaaatacaaagaaaacaaaaatctagcatagagaaaatataaagaaaacattaattttgaaagcagtcaatgataaaaggatattggagaaaacctcacataaacatatatgcaagagtactttaaaacattagcaaatataatttcaaactttaatttaaaattaaattcaactttaattacaattgtcttacataataatatcattaaaatttattataaagcaaaataaatctatgtaaacccattactaaattttaacaaatgtcaactcatgaccaatcttgtttcctctataattctactctcttctcccttctactaccattgctagattacattaaaaccagtctcagacattgttacattttatctttaaatatttcataagactcttaattgataggattttttttccttttttgtttttcttgctatttatttgttaaagagacta

SEQ ID NO: 721643 - DNA, 652 bp, Homo sapiens
ttgcttctgtctagagactttccctcaacaaatgagaaatttagtaatctcacagcatttgccctattctccttgtcttaaagcaagcatgaaactatttttatggtttttctcacagttttggtaattaaaggtaaaatgtgactaaaaaaattgcttactatctatctagggstttttttttttctttcttctgcttccactctagtagcaaagataataatgatgcagatgataatggaaggtttatgtagtaaaatttgcctcatgttcagaagaatccccaagcatttcgtaagagcagatgaggcatagtttgtagttaggaagctgaacaggcaaaagggagacttgtggagaggtgacgaggaatactctgaaactaccccgaggtggagagaggataagggtaggaaaggaaacatttgcatcagtggcttacagacttactttcccctacatctcctcaatctttctcctcctgtctccatggaacctacctgaaaagacgcagagaatgaacaatggatgaaacaattttgagaaagctagagacaggaaagccaccggggagacaatagcctgggccgatgtagggaaaaggaaggtagagatctgaactgaggggcaatatctgtatctactcttatga

SEQ ID NO: 721644 - DNA, 652 bp, Homo sapiens
ttgcttctgtctagagactttccctcaacaaatgagaaatttagtaatctcacagcatttgccctattctccttgtcttaaagcaagcatgaaactatttttatggtttttctcacagttttggtaattaaaggtaaaatgtgactaaaaaaattgcttactatctatctaggggtttttttttttctttcttctgcttccactctagtagcaaagataataatgatgcagatgataatggaaggtttatgtagtaaaatttgcctcatgttcagaagaatccccaagcatttcgtaagagcagatgaggcatagtttgtagttaggaagctgaacaggcaaaagggagacttgtggagaggtgaygaggaatactctgaaactaccccgaggtggagagaggataagggtaggaaaggaaacatttgcatcagtggcttacagacttactttcccctacatctcctcaatctttctcctcctgtctccatggaacctacctgaaaagacgcagagaatgaacaatggatgaaacaattttgagaaagctagagacaggaaagccaccggggagacaatagcctgggccgatgtagggaaaaggaaggtagagatctgaactgaggggcaatatctgtatctactcttatga

SEQ ID NO: 721645 - DNA, 899 bp, Homo sapiens
gagaaatacctaacgtaaacgacgagttaatgggtagaacattaaaaaaaaaaaaaaaagattctaggaaacttggcaggggagagagttcggtatgtgactttctgtctagaacccargatttcattgtgtggatagccatctattcagcttattgatttttaaaagttaaaaaaaactgaacaagagtaatatcttaattccttcaaacaaaatgatgtcctcttacctcaacttcaaatctcatctcagcgcagtgttgcatccaaaagaaataaattagaggtgtcttgaagaggcaacaaaaagaggaaccaggaatactactacatataatagagataattttttctataatcttttttggatagatttttctcttatgtcctttgaattaaaacaatcaattccctaaatttttcatctttgtgtttccaaaagcacctctagcctttttttccattattgacctccattttcttatgtaagcagaagtcttcacactgcaattctacccagtattctggtcagtatattagaagcccaggaacctggcagtgatggcaaagaactctcctttagagggtggagagagggtcaaaaatcatgaacacatatcttcaatatttttgcttctatagcatcaaagtaatatcacattatcaaaaagacaaagagttcttgtttgaggaccaatttatcccaagtcagggctgatccctattcagtcctctgaagagtaacaagtatgaaaataaatggtatactagaagacagtttcaggtctaggtacacagtgactcaatgaacatgctcctctttccgtctggaacactattttcccatgtttgttgacttagcaaactccaaaacatgcttgaagaaccaactattaacac

SEQ ID NO: 721646 - DNA, 722 bp, Homo sapiens
gagacctatattttctaacctttctaattccttcggatcagaaatcctcaaagaaccctgaaaacacatctgggaattttgctgattttattctttggggaactacatacaaattttcactacagtaagaatctctctctttttaaaatagttcccaatctcttacagaatactttttactttaacattaatatatcctttaaaaatttacttggtgagccaggcacagtggcccacacctgtaatctcagcactttgggaggctgaggctggcggattgcttgagctcaggagtttgagacaagcctgggcaacatggagaaaccctgtttctacaaaacaaaacaaaaattagcagggtgtggcagcacatgcttgtagtaccagctactcgggaggcttagttgggaggatggctcgaacctgggatgttgaggctgcagtgagcagcctgctgaagtcttgtcaagaagtacattcaatgagtatttattgagcactttttctgtgcccaacacatggcaaggcaaccagaatattaatataacaccatccagcctacacctgagaagctcacacctttatcccagtccatttgtrtgtattgcctattcatatgcagcatagtcagtcatttatttaacaggtaccaatgacatagtaacaagtgccaggaactgtgctggttcagagttagaaatataaatacaacatacattcag

SEQ ID NO: 721647 - DNA, 514 bp, Homo sapiens
cttgagtgcaatggcgcgatcacagctcactgcaacctctgcctcccgggttcaagggattctcctgcctcagtctcctgagtagttgggattacaggcacccaccaccatgcccagctattttggtatttttagtagagacggggtttcaccatgttgatcaggctggtttcgaactcctgacctcaggtgatcagcttgcctcggcctcccaaaatgctgggattacaggtgtcagccaccacgcctggcctatagtcatttttaaataataaattacagtgattgctgggcataaagtaatattttaagataacatttagattcttaaagtaaatatggggagataaagaatggaaaataagatagtattactagtgaaatgtctattgacatactaactcagtgcagaaagccctgtcaaagctaccaatatcctaaygctgtatcctcccataacattaactatgagattttaactcaaaaaaagctgagaacggtgtaactggggcat

SEQ ID NO: 721648 - DNA, 1117 bp, Homo sapiens
caccccgttttttcactgctaattgtttttctttctcatcacttcttttttgtttttcacactatgctactttaagtcatgccctatcttctctacacatctcattgtgctcttattcttccagaaaaatatcaggggaaattattagtgtcagggtctctcaaaagaggggatcaatgagcatactttgttctctcttctgaagacagatggtgttttagtcaagctagatagtctgcaccatattactcagagaatggtgtcatggatgctttttgatttgggaagatatatgttagatgaaaaaaatatgagaaatattagttagtgggagttctagttatcctggctttgcctctttgccctcttcctgtgccagaaagctgacttatgtggactacctcacccaggctcttttacctttccacatcaagttggatttcctccatgaattgcattgcaaggacattagatagcagacagaaaaggaagtcagaatatttattcatcccctttccatctacgctcaactataatgatttagcagtggctgagcctgtctattaaagaccactgctcttgttggatggctttattcccctcagctgcatttttcactagcttctggtaacagacctggtaaaaagcaatgcatgatttgtacctttgcatgtccatctctataaataattctttattaaactctctgcaactatcatttaaagatatgttttctattttctgcagcaattctgactaatataaaagagattggaagggattaaaaataaggtgacaagttagaataattttgcagtattcctggtgtgaggggatatgagcctttacttgggataatggcagcaagaattcttttaaaaaatgggagtgtcttaaaatatattaaaaagaaaaagatagtaggatttaatgtttgatttgatatgtttgtaaattttaaagttttaggggattacctttccaaacatagtcatasggtgaagcataagttgaccttaatggatcactgattgtttaggtatttccttcaaatcaatatataaactctttataactcaagtaagtcaattctaagctcatgttactcttaaacttg

SEQ ID NO: 721649 - DNA, 901 bp, Homo sapiens
tttaaaagtttatattacaggtagaaaaaagattaatgcaaggttaatatgcttctgagtgacatttatgggcagcacattttgagcaccggctgaacatgttccaatgatttagcgtctatcaactaagaatttcagggacccgtattctcataaattttagagctaggccgggtgcggcggttcacacctgtaatcccagcattttgggaggccaaggcaggtggatcccttgaggtcaggaattcgagaccagcctgaccaacacgaaaccctgtctccactaaaaatgcaaaatcagccaggtgtggtggcacatgcctgtagtcccagctacttggaagactgaggcacgagaatcrcttgaacctgggaggcagaggttgcagtgagcagagatcacaccactgccctccagcctgggcgacaagagcaaaactccatctcaaaaaaaaaatttagagctagaaaggaacttaagagttgtagtatttccaacttccttactttacaatgaaaaatctgagagcatggaacctagatctatcctgacatccaactcaggtaattgtttatgaggaaaataacactcccctatataaaaggcatgagcttttctagaccctccagacacagaagaaaataattatacatatttattattatactatggtcatttgttaagatgttaccaactgtatgaaatcaaagatgaagagtcctggaggactgggaaagtgtgaggaagaaaccctaactccttcaattaaaatgacttccttcaagctcttcagaatcagctcactaatggaaaaaaaaaaaaacacagaaattgaaacaaaatgcagggagatcagcaaataaaaagggcacagttttactactatactcccctgagtcc

SEQ ID NO: 721650 - DNA, 976 bp, Homo sapiens
taataaattattaactataatttcccactgtattattgaagtggaagtgaagtcaatttagaatggtgtgaaaagtgagtgggaaggaagagaacggtgatgcctgatgaagcagcccttaagatgtgtggtcaagcaggcattagagactgaggtcaatagctgcaaagaaaaacgaagtacagagttgtttttttcttaattaatatttttttcccttttaagatggaaggggttcacaacttttatatgcttatggtaaggatctgggagacaacaaaaagggtggaatcctatacatgtgaatttagtataaaattcaggacatgcaaaaacatatttaaaaattgaaacagcatttatggcccaatattttaagcctacatatagtcacattaggacattttaaaatgagggctttatcacatagcttatatgtgttctttgtgaactaaattggtgacttgcattttttttattttaatacatctagaacattttgtcaataactacagtgtttactgagacaaagtagggatagatgatagtacttaatgatttttgcaataaagactaacaaaaacaaaaagactacttattaaaaagaccaagtggtgaaataaatgataaaagtataatctggaggaaatgcagtattaaaagacagtgtcagaattcttggaaaaatgaacagttttcattatatgataaaggtaagatgattttttactttaaattttttataataacagataaggatggaataaaagcaagttaattggttttaggaagtcactaggaaaaatcgacatttaaaaaataaataccacaaattccatcaaaggtgaatggtaagagaaaatcttaaaagaatgcacagaagcctggactggagtataatcactaaaatgattacatggtccttgttccatatactagagatgatamccacaaaacttaagtcactagttcagca

SEQ ID NO: 721651 - DNA, 1241 bp, Homo sapiens
tgtgtgtgtgtgtgtgtgtggtgtgtgtatgttagaaactaaaaacaacatgaatgtctttgaaaatttgacataaagcattacaggtgaactccagactttcttctgagtgacagaaggcctgcctgaaagatccccagagacacagttgtggatttcactgtcaccctcrcatgtcattggtttgggctgggctctctctgtctcttccctgaccaggaccagatgttgagctccactacttgcagttggaagtttatattttcaacaatgcactgaggtctaagttgctctacagatggaaccaaacaaacatgggcgcctttgaacaaacagtgcctgacatttgtactgatcccaggagaactcttcccagctctctttcttcttggttctctcctgcaggccagcagccctgcagtttagcctggatctcccatgcattcacccatctccgtccaagtgcattttaccacagcctccaccgtttttgaagcaactcttgggctttgtaattctccacactctgttgtaaatgaagtcaggtccttcaagaccagattcgggactctattttatgaccaaatttcagcctcacccccgctcctgagacagagctccaagataagattctgcaggtggagattaggagtgtttttcttcttcaaggtaggagctgagtgctcagtgcagggttggggagaaactttccactttatcagcatgcagctcctgctggggtagaccttcttccatagaagcagggttgggaaccagggggccaacgtcttcagtgctgctgcacccagggcagagccttcatccatcagtgaggctgtgtggaagaagtgagtctctggttctcagtagctcttgtccagaactgagcctcagcagcatgttctgtcggccccagtgtcctggcccctagggagcagcatcctaaaatgggagctagcatatttgagaataacaacatctacgcattcagaagctctttggttttctttccagctaatataatttcctcttttttgtgtagcaacctgtacacatgcatactgatgcatagagacctatgacacttttttctcgataagtaaaaaattattggtcactgtgatcttttctccaagttcaccatttccctgaaggtgagcacaggtccttctgcatgtgttcaaacaaaaggcccagagactacctggtaagtgaggtgctcacctggttctggatgtttg

SEQ ID NO: 721652 - DNA, 900 bp, Homo sapiens
tggccccagtgggcttctgcagcctagattatcttaattctgaggcagctcacacaaggttttcatgtatcagatgtttcagttgcatttgagtggcattataattgtgaaatttaaccttgtgatagccgttgtctaacaagtactctatacttcagccacattgaagttcttaccattttttaaactttcatacctctttgcttttatctatatcttktcctctatatatagtctagtccctttttaaaaaaccttatttattttatataaaagctcttaaatttttccttgtggagcagggctaactcgtaagcagtgtgcccagagttggcctgtcccttcccttttgtctgcatggcaaactcctgttcatttttaggacccagtttcttctatgatgccttcctgaattttctggactaacagttaatcatcctttgttttatgatcccactgcactttgcttacattgctgatataaaagaaagcacacgagagaggattcccaattttccttgccttcaaccctcgcctcctttccccgttatccctattttgccacctctcccacctgtgaaccttgaccaactgagaaactacaaggcttgtaagaacaactctcaaaatataataacagttatccggataggattgcatcagtatattcctgaggaagaggtataaaaaaatgaaacaatctccaaccaaaagtttcacatcaattaacattaaaaactgttacctgagctaaaccacacggacatacaaccctttcttctctttactctataaagctccaatcttgctttacttgggaagttacctggagttcaagtgtaccctgagtgcatcagctaaataatgcttcttcttcttcttttttttttttttttgaga

SEQ ID NO: 721653 - DNA, 900 bp, Homo sapiens
tggccccagtgggcttctgcagcctagattatcttaattctgaggcagctcacacaaggttttcatgtatcagatgtttcagttgcatttgagtggcattataattgtgaaatttaaccttgtgatagccgttgtctaacaagtactctatacttcagccacattgaagttcttaccattttttaaactttcatacctctttgcttttatctatatcttttcctctatatatagtctagtccctttttaaaaaaccttatttattttatataaaagctcttaaatttttccttgtggagcagggctaactcgtaagcagtgtgcccagagttggcctgtcccttcccttttgtctgcatggcaaactcctgttcatttttaggacccagtttcttctatgatgccttcctgaattttctggactaacagttaatcatcctttgttttatgatcccactgcactttgcttacattgctgatataaaagaaagcacaygagagaggattcccaattttccttgccttcaaccctcgcctcctttccccgttatccctattttgccacctctcccacctgtgaaccttgaccaactgagaaactacaaggcttgtaagaacaactctcaaaatataataacagttatccggataggattgcatcagtatattcctgaggaagaggtataaaaaaatgaaacaatctccaaccaaaagtttcacatcaattaacattaaaaactgttacctgagctaaaccacacggacatacaaccctttcttctctttactctataaagctccaatcttgctttacttgggaagttacctggagttcaagtgtaccctgagtgcatcagctaaataatgcttcttcttcttcttttttttttttttttgaga

SEQ ID NO: 721654 - DNA, 553 bp, Homo sapiens
taagcaatgtattagtctcttttgtcacttgtgcactgactcaacatctgtgaaactattcttgtgtgacagttatgttgctaagcataggtaattcaactaagatgcagtcsccaaagcaaggaactaataagctagtgagaatatagatgataaacccaaagtgataaactgtaatagatgctgtaatagccatgtattcaggatctgatattagtagatgggaaaaaatagatgtgatggggtgcgggaaacccaaagccttcttggagcaagggaagattgagttgacttttgaaggacaaaaaggaattattcaggcacaggacagggaaaggaggatttgaaaaccttttatgtaggaatgacagcattgtctgagacacttgagggagtgaagtagatgtcattcagaataactaatacaaaaaatattgcaaaataaattcagagggccaagaagtagtctggttatgtttctttctaaatataaaggaaatggatttgaatttaatcctgctagggttgggatgggtgctttgaagaaattaaa

SEQ ID NO: 721655 - DNA, 2405 bp, Homo sapiens
ccttgttccttggaactattctgcttctgatattatagagacagaatcacagagaggataacaacctcctagctttctatccttcaaatattaatcaagcctatttttcttcatgcttaccatcacctacctgttactcattcatcccattattatttcttttctagattattacttctacctcttaactgatctcactgactctaatgtgtaactcatttctgtttacacatcttcagtgttctttctatataaaatgcaaattagattattgtccttaggacagtttctagactcttgaacatatgtactttgagcccatttctttatttttttcattttaactctcatattgccccactttcatcttttcacttctgcaagattgaaactcactgagttctgcagggattccatatgctcttacctataagcctttatatacacttcattcagtctgagatatcaaactgttcctacctgccagttctatctccaccttacccttcccttttagctcttttctacatatttagtaggttctaacttaaattttactttttaaaataaagctttcctaaaacgccactagcccaggcaccccacactgaatgtagtactcttatatttatgctcctacagcatcctctacttcacagtcagataatggattatactttattgtaattgtatttttctctgtaggttctttaatcaacttacatttggactacttatgaagagttagaaatgcctaaacatctctactcttaactgtctatatgttatggtttgaggaaggaatgcagtgctatattttcaaaaaatttctcagctcaggcttgtattgtatgtttacttgatgaaaaatatttatactgtaagggggacagtttgagagaaatgaaaaaccaagattcactgataattatgtaattttaatatttattgtttcatgagcacctattttagtgcatatgttaatgcattagtattaacagggcctagatgaatatcaataaaagctaacatttgttaattaacatatactagttatcatggcattttgcatgcatttgctcatttgtcccttcacaccttattcaaaagtaggcattactctttgtcctaatccattttctgttgcrataacggaatacctgacactagcaaatgtataaagaaaagaaatttatttttcactgttctgaaaactggagtccaagagcatggcggcagcatttggtgagggtgatccaatggcagaaggcaaaagtgagctgatgacacagagagcacaagagtgagctgagttcacttttataacaaccaactctcataaaaactaacttgctctcatgaaacagcattaatgcactcatgatccaatcacctcttaaaggttccaccttttaatgtagttacattagcaattaagtttccaacatataaaattggggggacacattcaaatcatagcactcttataaccacaatttacaaaataagaaaactgaagctaataaagtttaagtaacgtgtcaaaggtttatgatttctccaagtgatgaagccaagagttacactcagatgcttaggttccagggcttgcccactgaaccactcacatgttttagcaaaagagtaacttgtatatgacgggaaaagggtggtggtttatgtgtgaaataatgtgatttcaagaaatcggcatttgaagtagaaacaagatcctatataccatttttcaagctggttctatttatttattatcacctgaatagctcgtactacctgtaatattgaacaacattaaatatttttattttatattgatattcatgataaagaaacttacattattgatctaggagatgaaaatggaaagcactgcttgccattctttttatctaataaaaagtaaccaagaatcttgtgaaaaatacatttacttaatgaggaaatatcatacagcctcccagggcaacacaatcaagcaccttgccaagagcttattcaagaactatggattggatagtcccaaattcttaattaagtgccctttcctctaaattccctgaagtacggtccaatttactaatagctacaaatataattggcacagaaatgacttcttttgcactaaaatatcacatatgccaagggaatgagtacaacaacagactagtgatactgattctctaaagtctgggttattaaactaagctcacaaagtcaagaacaaaactcttgtgaggaaggtctatacactatgtggttgggatttgtggaatgggtggcaggctgagaggaagagatgacaaatggggatggctaatacattttccattttaggagcagaataggcttctgcatttctggacttttgtttattcatttactca

SEQ ID NO: 721656 - DNA, 3275 bp, Homo sapiens
taccaatcacaagagaatttataagcatctgaaaaataactacacataagttattttatagtttcagaatgaaggcaaaatactgtcgcgtatagattcacaaaacaattgcatggtcacaacatacaatttgacaactgtgggattaggtgttttatccaaacatatataatcaatagcctgggcaagaattagtcaaattctgccaattctaaatccaaatctctaaactctgcaacctcctcatttgaatatgaatttgtgagccaattaaacattggcatatgtcttctgtgaaatagtcttaggattaggcaatttttgtttagtagcctacattgatataagttggatcatataatattaactgttatatggcattattattattattaagaaatctaggctgggcatggtggctcatgcctgtaatcccagcactttgtgaggctgaggcaggcagattacgaggtcaggagatcgagaccatcctggctaacacagtgaaatgccgtctctactaaaaatacaaaaaattagctgggcatggtagtgggcgcctgtagtcccagctactagggaggctgaggcaacagaatgaacctgggaggcagaggttacagtgaaccaagatcatgccactgcactccagcctgggcgactgagcgagactccgtctcaaaaaaaaaaaaaaaaatatataattttttttttaaaaaagaaatagagcaatgagatgattctggaggttgtaatttctgttcgttctacctgcttctattaaggagttcaggttcttcataaattctcagcttaaaggatttttgttattcggctgaagcacaagttgttctcagacactcttatttttctaggctttattttctggagcctcattcctggatgggatgatattaaagggagctggatttaggatgtggtgaatgggagtagaaggagatcggccttgaagagtcctgtccctggaggaaccccctgataaagatgaggtctgtgagaggattggttgctagactggtcataggcttcccagaaaggagccccttgtcatccatggtgatatgcttttaagtgaccatatgtaagtgaccatgtgggcttagaaaaagagaatatccctgaaggcataatgattagaggcttttccctagttctcccatatccagacaagtttcctaaattctttttcttcttttttcttttttttttttgagacggagtctcgctctgtcgcccaggctggagtgcagtggtgcgatctctgcctcccaggttcaaacaattctctgccttagcctcctgagtagctgagattataagcacccaccaccacgcccggctaattttttgtatttttagtagagatggggtttcaccatcttggccaggctggtcttgaacttctgacctcgtgatccaccctcctcggcctcccaaagtgctgggattacaggcgtgagtcaccgtgcccagcccctaaattcttttatgaccctagggaaagaaggacagtgaccataacaatggatatgaaattttctggcaagtcagttagatacgatctcaaagtcacactcaaataaatgttttaaatggacggtgttttcttcctcaattttgtgacttcaaatccttacacacaaagatgatataaagtgttaatatgggcattaaataaatagaattatttgccattgaccttatggatgtcaagtcatcaacactgggtttacctttggactctattccaagatttttccatttccccaaaaaaattgcaagaaaaaaagcctgaatcctgaaccacacattagtcaacataaacttaaatgatttgagtattttatgtgtacatacacagctaatgaaacattagtgaatttttaagcactttgtaattataaatatagaaattattaaagagataactaaaggaagtattaaaattatagccataggaattattgaaaattataggaattattagttaactagcaaaaagctaagtgagaggaaggtgatcctgggttggttgtaggatgaaaaggcaatgtaagaactgaatatctcactatagcaccaatcatgagaggtatcacttataaattttttaaatgaagtaaggacctcgtgcctctctccaaacacggactcccagcaaatgtcatactgttattctgaacttacagttcttcagtaaaatgacagtatctgaagagttaatatttctaaagaaagagagaggaattttcttatagatattgtttgctaaaataagtctcattgtaaaaggtaaggattcatgcattaatcagagctttgtgaactctcacattaagcagctttgttatgctaattaacttgtaaatgaagaatggagtgattctcccattattgaatatcattcttaagggcctgatttagaaaaataaagatatcctttatgcttgcaaatgatgctaagctgtggatcaggagtctattttagtggaaaagtcaccctattttttaaaaagttgctacatatccattaagctttatatttagttttartccgccaatgaattttacaaaagaaatatctgttcgggaaggaaataacacaagacaactttgagaatttatttccacacaatctccccttgaaaggccaatgtatcataactaagaaaaatctcagtgcatctataccagaggtcaaaactgctgatctgaaggttatagacttgtcaaaagagatgtatcatttaacgagtagtgttttgctttaatttttaaaatttgaaatttggtattttttaaaaaatgagagagtgcataccaaaatcctgatttctagattttggtggaaaattagaagatatgacaaatacaagagcaatgtttatactggacaacaatcacctggagctgaatagcagctactgctactaaagtgacattttctctagttcatgccacatgttagatgcagtgtatcatcatagcttacactatcattcttcttataacagaattacaagaaaagggatatattcttacaatgtctctatcaaaagtgaggaaaaaaataaacagcttccatcttcaagaaaaatattagaaagtacttttttgtataaaataacatttagtttttatattaaaaaggattctacttctaaaataccaccaagatacataataatatctaccacatcattaagagtggcaactaatattgaaaagaggacttactagtaaaaaaaattcag

SEQ ID NO: 721657 - DNA, 612 bp, Homo sapiens
aagaaatagaatacctaccaaaggaattgaggatatgactaatactgccattcaccaatgaaatgtgtttagagtggtttttaaggacttgaacttgggggctgcctagaggagggtttatttttatgggggcagttacttatgattttggattcrgtgctttggcagggacacttggatatggtcctagtagtaatttgctggcatggctccttgaagcctagactaaaaaaaagccatatagtaaataaagtagagatgtcagagtctttgggtatggtattaaagaagggatcaggggatgataatgttaaaatgaatgtattatgtttgttctggcaactcaccttttgactgtgttccctaggaggcttctgaggagactgtcttcacttaacctaataagaaatgccctagaaaggaaaatattagcatatttgagaagcttggtagtggttgtcccttttaaggcccttgttgacagtaggagttgatgcaagagagccaggttccataatattcatggattgtagaggccaggtcacaaaatttaaccatctggcaatatgggcttaattaccataataagcagcaaggctggagtggcaatgc

SEQ ID NO: 721658 - DNA, 1660 bp, Homo sapiens
attgccagcaatgatatcaaattaaaatttaataataaagttttattttcatgctgttgatttttacaggtaccttttaattcagagaaaatttccccygttatttacttagtgtagtgcatttaaaaataaagttaattttaaaataagttaaacactaaaaagtgaacggattaaaaaaagtgttagtataggatgaacttcagtgtggctaaaaattactgatgatgggacatacttctttccctttgctgcgaatagacttaccttgtatataaacctggggtaaaatatagtccttggagatttgaagagtgcctttgattccctatagatttttataatttagggagggagaagaaccctaaagagctgtgttggtttcgtttgtctcaggacccaatcacgttttcagctggcatggttacatgtgtccatagtcccagctactcaggaggctgaggctcaagtgtgagcccaaaagttcgagactgcagtgagctatggtcatgccactgcatgtcagtgtgggcaacagagtgaggccttttctcaaaacaagcaaacaaaccctccaatttttgttcagactgtttttctctatgaattgtttttcgcttatgtaatagttctgatttctctctaacacttgtgctttctctcttaggaatacttaatgcattcttcccaagttttctttgtttaattgttctcaaagtcagggctctgagtggtgctgggagcatgttagaaatgaaaattctcaggccccacctcagaccagcaatgtctgtttagacaaggccttcatgtgacactgatgtaccttaaagtttgtgatcaatgacagattggataaagaaaacgtggtacttatacaccatggaatactatgaagtcataaaaagaacaagattatgtcctttgtggcaacatggatggagctgaagaccattatccttagcaaactaatgcaagaacagaaaaacaaatgccacctgttctctcttataagtgggaactgaatgatgagaacacatagacacaaagagaatgatagacactggggcctaccgagggtgagagatcggggaaggaaggagacaagcagaaaaaataactagttttagcacctaggtgatgaaatactctgtacaacaaactcctgtgacatgagtttacctatataacatacctgtacgtgtacccgtgaacctaaaataaaagtgaaaaaaaaaaaaaaggttgtgatccactgttgtcattcatacatacaggcatagctacaaagcaacatctcttttgaagcatttcctgcttcttttagctggaaacattctctttcttaaccgaattgccatagcagttcatttgagttcccttagagtattgtggcactgcagttatttgcaggcagtattgactgtttcaccgtaagctccctaagaagagaagctctctctctctctctctctctctctatatatatatatatatatgtatgtatacttacaaatttatatatgttattaataaattatatgtacaaatataatttataagtatacaaataaattgataattattacatttacaaatttatataatgtatatgtaaattatatataattataaatgtatataatatatataaattata

SEQ ID NO: 721659 - DNA, 1660 bp, Homo sapiens
attgccagcaatgatatcaaattaaaatttaataataaagttttattttcatgctgttgatttttacaggtaccttttaattcagagaaaatttcccccgttatttacttagtgtagtgcatttaaaaataaagttaattttaaaataagttaaacactaaaaagtgaacggattaaaaaaagtgttagtataggatgracttcagtgtggctaaaaattactgatgatgggacatacttctttccctttgctgcgaatagacttaccttgtatataaacctggggtaaaatatagtccttggagatttgaagagtgcctttgattccctatagatttttataatttagggagggagaagaaccctaaagagctgtgttggtttcgtttgtctcaggacccaatcacgttttcagctggcatggttacatgtgtccatagtcccagctactcaggaggctgaggctcaagtgtgagcccaaaagttcgagactgcagtgagctatggtcatgccactgcatgtcagtgtgggcaacagagtgaggccttttctcaaaacaagcaaacaaaccctccaatttttgttcagactgtttttctctatgaattgtttttcgcttatgtaatagttctgatttctctctaacacttgtgctttctctcttaggaatacttaatgcattcttcccaagttttctttgtttaattgttctcaaagtcagggctctgagtggtgctgggagcatgttagaaatgaaaattctcaggccccacctcagaccagcaatgtctgtttagacaaggccttcatgtgacactgatgtaccttaaagtttgtgatcaatgacagattggataaagaaaacgtggtacttatacaccatggaatactatgaagtcataaaaagaacaagattatgtcctttgtggcaacatggatggagctgaagaccattatccttagcaaactaatgcaagaacagaaaaacaaatgccacctgttctctcttataagtgggaactgaatgatgagaacacatagacacaaagagaatgatagacactggggcctaccgagggtgagagatcggggaaggaaggagacaagcagaaaaaataactagttttagcacctaggtgatgaaatactctgtacaacaaactcctgtgacatgagtttacctatataacatacctgtacgtgtacccgtgaacctaaaataaaagtgaaaaaaaaaaaaaaggttgtgatccactgttgtcattcatacatacaggcatagctacaaagcaacatctcttttgaagcatttcctgcttcttttagctggaaacattctctttcttaaccgaattgccatagcagttcatttgagttcccttagagtattgtggcactgcagttatttgcaggcagtattgactgtttcaccgtaagctccctaagaagagaagctctctctctctctctctctctctctatatatatatatatatatgtatgtatacttacaaatttatatatgttattaataaattatatgtacaaatataatttataagtatacaaataaattgataattattacatttacaaatttatataatgtatatgtaaattatatataattataaatgtatataatatatataaattata

SEQ ID NO: 721660 - DNA, 1660 bp, Homo sapiens
attgccagcaatgatatcaaattaaaatttaataataaagttttattttcatgctgttgatttttacaggtaccttttaattcagagaaaatttcccccgttatttacttagtgtagtgcatttaaaaataaagttaattttaaaataagttaaacactaaaaagtgaacggattaaaaaaagtgttagtataggatgaacttcagtgtggctaaaaattactgatgatgggacatacttctttccctttgctgcgaatagacttaccttgtatataaacctggggtaaaatatagtccttggagatttgaagagtgcctttgattccctatagatttttataatttagggagggagaagaaccctaaagagctgtgttggtttcgtttgtctcaggacccaatcacgttttcagctggcatggttacatgtgtccatagtcccagctactcaggaggctgaggctcaagtgtgagcccaaaagttcgagactgcagtgagctatggtcatgccactgcatgtcagtgtgggcaacagagtgaggccttttctcaaaacaagcaaacaaaccctccaatttttgttcagactgtttttctctatgaattgtttttcgcttatgtaatagttctgatttctctctaacacttgtgctttctctcttaggaatacttaatgcattcttcccaagttttctttgtttaattgttctcaaagtcagggctctgagtggtgctgggagcatgttagaaatgaaaattctcaggccccacctcagaccagcaatgtctgtttagacaaggccttcatgtgacactgatgtaccttaaagtttgtgatcaatgacagattggataaagaaaacgtggtacttatacaccatggaatactatgaagtcataaaaagaacaagattatgtcctttgtggcaacatggatggagctgaagaccattatccttagcaaactaatgcaagaacagaaaaacaaatgccacctgttctctcttataagtgggaactgaatgatgagaacacatagacacaaagagaatgatagacactggggcctaccgagggtgagagatcggggaaggaaggagacaagcagaaaaaataactagttttagcacctaggtgatgaaatactctgtacaacaaactcctgtgacatgagtttacctatataacatacctgtacgtgtacccgtgaacctaaaataaaagtgaaaaaaaaaaaaaaggttgtgatccactgttgtcattcatacatacaggcatagctacaaagcaacatctcttttgaagcatttcctgcttcttttagctggaaacattctctttcttaaccgaattgccatagcagttcatttgagttcccttagagtattgtggcactgcagttatttgcaggcagtattgactgtttcaccgtaagctccctaagaagagaagctctctctctctctctctctctctctmtatatatatatatatatgtatgtatacttacaaatttatatatgttattaataaattatatgtacaaatataatttataagtatacaaataaattgataattattacatttacaaatttatataatgtatatgtaaattatatataattataaatgtatataatatatataaattata

SEQ ID NO: 721661 - DNA, 628 bp, Homo sapiens
tcactacttctgacacattcttgctatgaagttcttctacttaaatttaaattaaaagcattagaccatacacactaaggaaattagaatatttcttgttctaacaatttaaaacaaattttactatgtttcatatttcaatgggctctaaaaaacagaatactaagaaatggcaagcgtgtgaagctaagaaatatgtgtcaaaatttgtcaatttggaaagttattcacagtacttttcagaaattttaaatgaagcagtaaattaaaattttggttaaaagtaaactatgagtgttccttgatgtttttatttaggcatataattttttctcataatatttatcataaaaacttgcattattctttttcactactaaggtctaatctgtaatattcaaaatagctaattatttgccaaccagcatgctccctcctgtgttcaagaaatcactttcttcagattaagccacttcttaatcaacatattggaaaaatacactcaaatttcttaggacactctgatcattttatcaaaaatctataaaatcttaacacctattaatagagtttgacggagtttgaagaamgataagtgtatcacaattcacttagtgatgagatcttg

SEQ ID NO: 721662 - DNA, 1116 bp, Homo sapiens
taggtataaaaagtttctaccatatttacaatctctatatttttattttactaagaattttaaaactcaggaataaatttgattttattaaattactttttcttggctgggcacgatggctcatgcctataatcccagcastttgggaagccaaggtgggcagatcacttgaggtcagaagttgaagaccagcctggccaacatggtgaaatcccgcctctactaaaatacaaaaattagccaggcgtggtgacatgtgcctgtcatcccagctactcaggaggctgagtcagtagaatcacttgaacttgggaggtggaggttgcactgagctgagtttgcatcactacactccagccttggcaacagagcgagaatccatctcaaaacaacaacaacaacaacaaaagtatttttgtatatatgagatattcttaatgttttatccctttactctaatttattttaaattgtaagatgtgcttacttactagtggagcatctgtgtttgttgatataaatccatttttctaaattctaattaattaactaattaattaaagttttgtgattgataagtcttgtgtttcctttttttcttgttctaggaatttctcctaggaatttcatcagtctgtgttcttacttttaatttttaattttgctagttacggttttaaatagttttatgtgacaatttaaaatagtatttttgaatctgtgtttctgaacaccaaattttgtaatgttttcttttcagagcatgatttgcaagaggaactgctacacattttacacttatttactccaacctttcctgctaattccaggtttattggtaagcactggggcctgttccaagatagctgcatatatatttttcacagcataacttttaattccacattcacaatatttacattttgttttttataaatgtataatgtaaaaaatttctaaatgttacctataaggtaaatcctcaagggtaacattattataaaatacgtagtatttagaaagttttaaaaacctatattgcatgtgtgtatattttataaggttataaaattgtttaaaaattattatatgttgtttgagttgatatactatatt

SEQ ID NO: 721663 - DNA, 1116 bp, Homo sapiens
taggtataaaaagtttctaccatatttacaatctctatatttttattttactaagaattttaaaactcaggaataaatttgattttattaaattactttttcttggctgggcacgatggctcatgcctataatcccagcactttgggaagccaaggtgggcagatcacttgaggtcagaagttgaagaccagcctggccaacatggtgaaatcccgcctctactaaaatacaaaaattagccaggcgtggtgacatgtgcctgtcatcccagctactcaggaggctgagtcagtagaatcacttgaacttgggaggtggaggttgcactgagctgagtttgcatcactacactccagccttggcaacagagcgagaatccatctcaaaacaacaacaacaacaacaaaagtatttttgtatatatgagatattcttaatgttttatccctttactctaatttattttaaattgtaagatgtgcttacttactagtggagcatctgtgtttgttgatataaatccatttttctaaattctaattaattaamtaattaattaaagttttgtgattgataagtcttgtgtttcctttttttcttgttctaggaatttctcctaggaatttcatcagtctgtgttcttacttttaatttttaattttgctagttacggttttaaatagttttatgtgacaatttaaaatagtatttttgaatctgtgtttctgaacaccaaattttgtaatgttttcttttcagagcatgatttgcaagaggaactgctacacattttacacttatttactccaacctttcctgctaattccaggtttattggtaagcactggggcctgttccaagatagctgcatatatatttttcacagcataacttttaattccacattcacaatatttacattttgttttttataaatgtataatgtaaaaaatttctaaatgttacctataaggtaaatcctcaagggtaacattattataaaatacgtagtatttagaaagttttaaaaacctatattgcatgtgtgtatattttataaggttataaaattgtttaaaaattattatatgttgtttgagttgatatactatatt

SEQ ID NO: 721664 - DNA, 1116 bp, Homo sapiens
taggtataaaaagtttctaccatatttacaatctctatatttttattttactaagaattttaaaactcaggaataaatttgattttattaaattactttttcttggctgggcacgatggctcatgcctataatcccagcactttgggaagccaaggtgggcagatcacttgaggtcagaagttgaagaccagcctggccaacatggtgaaatcccgcctctactaaaatacaaaaattagccaggcgtggtgacatgtgcctgtcatcccagctactcaggaggctgagtcagtagaatcacttgaacttgggaggtggaggttgcactgagctgagtttgcatcactacactccagccttggcaacagagcgagaatccatctcaaaacaacaacaacaacaacaaaagtatttttgtatatatgagatattcttaatgttttatccctttactctaatttattttaaattgtaagatgtgcttacttactagtggagcatctgtgtttgttgatataaatccatttttctaaattctaattaattaactaattaattaaagttttgtgattgatmagtcttgtgtttcctttttttcttgttctaggaatttctcctaggaatttcatcagtctgtgttcttacttttaatttttaattttgctagttacggttttaaatagttttatgtgacaatttaaaatagtatttttgaatctgtgtttctgaacaccaaattttgtaatgttttcttttcagagcatgatttgcaagaggaactgctacacattttacacttatttactccaacctttcctgctaattccaggtttattggtaagcactggggcctgttccaagatagctgcatatatatttttcacagcataacttttaattccacattcacaatatttacattttgttttttataaatgtataatgtaaaaaatttctaaatgttacctataaggtaaatcctcaagggtaacattattataaaatacgtagtatttagaaagttttaaaaacctatattgcatgtgtgtatattttataaggttataaaattgtttaaaaattattatatgttgtttgagttgatatactatatt

SEQ ID NO: 721665 - DNA, 1116 bp, Homo sapiens
taggtataaaaagtttctaccatatttacaatctctatatttttattttactaagaattttaaaactcaggaataaatttgattttattaaattactttttcttggctgggcacgatggctcatgcctataatcccagcactttgggaagccaaggtgggcagatcacttgaggtcagaagttgaagaccagcctggccaacatggtgaaatcccgcctctactaaaatacaaaaattagccaggcgtggtgacatgtgcctgtcatcccagctactcaggaggctgagtcagtagaatcacttgaacttgggaggtggaggttgcactgagctgagtttgcatcactacactccagccttggcaacagagcgagaatccatctcaaaacaacaacaacaacaacaaaagtatttttgtatatatgagatattcttaatgttttatccctttactctaatttattttaaattgtaagatgtgcttacttactagtggagcatctgtgtttgttgatataaatccatttttctaaattctaattaattaactaattaattaaagttttgtgattgataagtcttgtgtttcctttttttcttgttctaggaatttctcctaggaatttcatcagtctgtgttcttacttttaatttttaattttgctagttacggttttaaatagttttatgtgacaatttaaaatagtwtttttgaatctgtgtttctgaacaccaaattttgtaatgttttcttttcagagcatgatttgcaagaggaactgctacacattttacacttatttactccaacctttcctgctaattccaggtttattggtaagcactggggcctgttccaagatagctgcatatatatttttcacagcataacttttaattccacattcacaatatttacattttgttttttataaatgtataatgtaaaaaatttctaaatgttacctataaggtaaatcctcaagggtaacattattataaaatacgtagtatttagaaagttttaaaaacctatattgcatgtgtgtatattttataaggttataaaattgtttaaaaattattatatgttgtttgagttgatatactatatt

SEQ ID NO: 721666 - DNA, 1116 bp, Homo sapiens
taggtataaaaagtttctaccatatttacaatctctatatttttattttactaagaattttaaaactcaggaataaatttgattttattaaattactttttcttggctgggcacgatggctcatgcctataatcccagcactttgggaagccaaggtgggcagatcacttgaggtcagaagttgaagaccagcctggccaacatggtgaaatcccgcctctactaaaatacaaaaattagccaggcgtggtgacatgtgcctgtcatcccagctactcaggaggctgagtcagtagaatcacttgaacttgggaggtggaggttgcactgagctgagtttgcatcactacactccagccttggcaacagagcgagaatccatctcaaaacaacaacaacaacaacaaaagtatttttgtatatatgagatattcttaatgttttatccctttactctaatttattttaaattgtaagatgtgcttacttactagtggagcatctgtgtttgttgatataaatccatttttctaaattctaattaattaactaattaattaaagttttgtgattgataagtcttgtgtttcctttttttcttgttctaggaatttctcctaggaatttcatcagtctgtgttcttacttttaatttttaattttgctagttacggttttaaatagttttatgtgacaatttaaaatagtatttttgaatctgtgtttctgaacaccaaattttktaatgttttcttttcagagcatgatttgcaagaggaactgctacacattttacacttatttactccaacctttcctgctaattccaggtttattggtaagcactggggcctgttccaagatagctgcatatatatttttcacagcataacttttaattccacattcacaatatttacattttgttttttataaatgtataatgtaaaaaatttctaaatgttacctataaggtaaatcctcaagggtaacattattataaaatacgtagtatttagaaagttttaaaaacctatattgcatgtgtgtatattttataaggttataaaattgtttaaaaattattatatgttgtttgagttgatatactatatt

SEQ ID NO: 721667 - DNA, 649 bp, Homo sapiens
aaaaaaaaaaaaaaagaagaagaagaagaagaagtccaaatgttgttagcagggttgtgcttcctctgaagactctaggaaaaaaataatctttctttattcttcctagcttctagtagctcccaggaatccttgacattatttgtcttgtagctacaatattacagtctctgtctctgtctaatatggccttgaattttgtgtatctttgtgtctctgtgtgtcctttcctcttcttacagaggtaccagttattgaatttagggctcaccctaattcagtatgacctcatcttaactaattacatgtgcaaagattctatttccaaataaggtcatattttgtgtttataggtaggcataaagtttgggggatgctatggactgaatatttcatatttatgttgaaatatgaaatattctgatatttcatatgttgaagatataatccccaatctgattttatttggcattaaggtctttaggaaataattagagctgaatgagattaygggtatagagttcccatgatgagattattacccttttcaggggatgaaaaaaacagctctcctgcccggcgcagtggcttacacctgtaatcccagcactttgggagtctgaggcgggcggatcacctgaggtcggga

SEQ ID NO: 721668 - DNA, 1150 bp, Homo sapiens
ttacatacaactatgacagaagtggattggcacattgctaaccgagttccctgaggacttcttgttgtggttgctgtttaagacattattcatgcctcattcaacaataatttttctgactaacaatcatttttctcaccatgtctcagcaacaagtcctatgactttcctctagtaatttttgtttgttgcatgttttaaatagaattttatgtttccaatttatgcttgtaagtgtgagtctgtgtgygcatatatgtgtgtgaatgcatgcatatttcaaggaatccaaagtgagattatacgaaaatcaggaagattttcaaaaagcaattttggatgcagactccagggtagaaagatattttataagaacaaatgatctacaaagttgcaaaaatttgaggcgtgctatgcttttgatttatttgggtatctgggtgatttgttggctgcaggtctatgtgaatagatctttgttaaactctggagtaaaaatatgctgcccgtaggagccttgttgataataacgcttcaaatgcgttactcaccttgcaatcatcaaatgccacaagtgatagagaagccagatcaactgactcaacatttattccatccttaatatgttttctgtatggcagagactagaaagcttaaaaatacatttctcagacttcctttggagcagaagctccagatgtaatttaaatttaatcaatcagatgtactcaggagaggcttgaatgcagagcagggtgaagtggggaaagggagggtgtagtggggtcatgcattttcctggtgcatggcctgactcaggaaccagcagttccagcagcagcttcctgatccctggagcctaactgggttactgtcttgattccccattttcctaactgaagctgaggtagaagtttccttgttgagccagttttgccgtgatgacctgcgaactgttctttgaggtccagcccagagcaagtttctccaaaacatctaacaattttggaagtacctcattcttagtactaaatctctttggttcacaatagtcacattgttttctgtcatctgcagttgaacattgactaacacacacatacttgataatttttctcttcttgtgacttgttgcttcaccacaacattt

SEQ ID NO: 721669 - DNA, 1150 bp, Homo sapiens
ttacatacaactatgacagaagtggattggcacattgctaaccgagttccctgaggacttcttgttgtggttgctgtttaagacattattcatgcctcattcaacaataatttttctgactaacaatcatttttctcaccatgtctcagcaacaagtcctatgactttcctctagtaatttttgtttgttgcatgttttaaatagaattttatgtttccaatttatgcttgtaagtgtgagtctgtgtgcgcatatatgtgtgtgaatgcatgcatatttcaaggaatccaaagtgagattatacgaaaatcaggaagattttcaaaaagcaattttggatgcagactccagggtagaaagatattttataagaacaaatgatctacaaagttgcaaaaatttgaggcgtgctatgcttttgatttatttgggtatctgggtgatttgttggctgcaggtctatgtgaatagatctttgttaaactctggagtaaaaatatgctgcccgtaggagccttgttgataataacgcttcaaatgcgttactcaccttgcaatcatcaaatgccacaagtgatagagaagccagatcaactgactcaacatttattccatccttaatatgttttctgtatggcagagactagaaagcttaaaaatacatttctcagacttcctttggagcagaagctccagatgtaatttaaatttaatcaatcagatgtactcaggagaggcttgaatgcagagcagggtgaagtggggaaagggagggtgtrgtggggtcatgcattttcctggtgcatggcctgactcaggaaccagcagttccagcagcagcttcctgatccctggagcctaactgggttactgtcttgattccccattttcctaactgaagctgaggtagaagtttccttgttgagccagttttgccgtgatgacctgcgaactgttctttgaggtccagcccagagcaagtttctccaaaacatctaacaattttggaagtacctcattcttagtactaaatctctttggttcacaatagtcacattgttttctgtcatctgcagttgaacattgactaacacacacatacttgataatttttctcttcttgtgacttgttgcttcaccacaacattt

SEQ ID NO: 721670 - DNA, 1150 bp, Homo sapiens
ttacatacaactatgacagaagtggattggcacattgctaaccgagttccctgaggacttcttgttgtggttgctgtttaagacattattcatgcctcattcaacaataatttttctgactaacaatcatttttctcaccatgtctcagcaacaagtcctatgactttcctctagtaatttttgtttgttgcatgttttaaatagaattttatgtttccaatttatgcttgtaagtgtgagtctgtgtgcgcatatatgtgtgtgaatgcatgcatatttcaaggaatccaaagtgagattatacgaaaatcaggaagattttcaaaaagcaattttggatgcagactccagggtagaaagatattttataagaacaaatgatctacaaagttgcaaaaatttgaggcgtgctatgcttttgatttatttgggtatctgggtgatttgttggctgcaggtctatgtgaatagatctttgttaaactctggagtaaaaatatgctgcccgtaggagccttgttgataataacgcttcaaatgcgttactcaccttgcaatcatcaaatgccacaagtgatagagaagccagatcaactgactcaacatttattccatccttaatatgttttctgtatggcagagactagaaagcttaaaaatacatttctcagacttcctttggagcagaagctccagatgtaatttaaatttaatcaatcagatgtactcaggagaggcttgaatgcagagcagggtgaagtggggaaagggagggtgtagtggggtcatgcattttcctggtgcatggcctgactcaggaaccagcagttccagcagcagcttcctgatccctggagcctaacwgggttactgtcttgattccccattttcctaactgaagctgaggtagaagtttccttgttgagccagttttgccgtgatgacctgcgaactgttctttgaggtccagcccagagcaagtttctccaaaacatctaacaattttggaagtacctcattcttagtactaaatctctttggttcacaatagtcacattgttttctgtcatctgcagttgaacattgactaacacacacatacttgataatttttctcttcttgtgacttgttgcttcaccacaacattt

SEQ ID NO: 721671 - DNA, 1150 bp, Homo sapiens
ttacatacaactatgacagaagtggattggcacattgctaaccgagttccctgaggacttcttgttgtggttgctgtttaagacattattcatgcctcattcaacaataatttttctgactaacaatcatttttctcaccatgtctcagcaacaagtcctatgactttcctctagtaatttttgtttgttgcatgttttaaatagaattttatgtttccaatttatgcttgtaagtgtgagtctgtgtgcgcatatatgtgtgtgaatgcatgcatatttcaaggaatccaaagtgagattatacgaaaatcaggaagattttcaaaaagcaattttggatgcagactccagggtagaaagatattttataagaacaaatgatctacaaagttgcaaaaatttgaggcgtgctatgcttttgatttatttgggtatctgggtgatttgttggctgcaggtctatgtgaatagatctttgttaaactctggagtaaaaatatgctgcccgtaggagccttgttgataataacgcttcaaatgcgttactcaccttgcaatcatcaaatgccacaagtgatagagaagccagatcaactgactcaacatttattccatccttaatatgttttctgtatggcagagactagaaagcttaaaaatacatttctcagacttcctttggagcagaagctccagatgtaatttaaatttaatcaatcagatgtactcaggagaggcttgaatgcagagcagggtgaagtggggaaagggagggtgtagtggggtcatgcattttcctggtgcatggcctgactcaggaaccagcagttccagcagcagcttcctgatccctggagcctaactgggttactgtcttgattccccattttcctaactgaagctgaggtagaagtttccttgttgagccagttttgccgtgatgacctgcgaactgttctttgaggtccagcccagagcaagtttctccaaaacatctaacaattttggaagtacctcattcttagtactaaatctctttggttcacaatagtcacattgttttctgtyatctgcagttgaacattgactaacacacacatacttgataatttttctcttcttgtgacttgttgcttcaccacaacattt

SEQ ID NO: 721672 - DNA, 597 bp, Homo sapiens
gtggttgaattgggttagctagtattttgttgagtattttgttgtgtcgctattattcattttaaagaatttttaaatttccatatatatttccatgttcatcagaaatattgttttgttgttgttgatgttgttacatcccctcctagttttggtatcagggtgatactggcttcatataatgatttatggargatttcctctttttcagtcttttaaaataattccaatagggctggtattaattattctttgaatatctggtagaatttagctgtagctgtgaatccatctgggccttgggctttttattgctggcaattttaaaatttctgattgctatttgtctattcagggtttctatttcttgctgatttaatctaggagatttgtatgtttccaggaatttatttatttcctctagattttctagtttgtgtgcatgaagatttcatagtattctcaaaacatcttttgtatttctgtgatgttggttgtaatgtctctagtttcatttctgattgagcatgtttaaatcttctcttttttattggttaacctagctaatggcctatcaattttctttattttttcaaa

SEQ ID NO: 721673 - DNA, 678 bp, Homo sapiens
gagatgaaatgagataaaatgatgagatgaaatgatgagatgaaatgatggggtgaagtgatgcactgtcacgtgtgtgtctattctttttcccaagcaacaaaaattataattcattaattttaattttattatttaagaatattcttaagagttgaaggaaaaataatatctgtacattatgggttacaatctaagtataaataatacataaatatattaaaacttacaaagaatatgttttggaatcgaatataccatgcttctgtgatgacagttatttcatgctggttgtcacaattttacatgaaaaactaatgaaaaaatgtttttaactgtttctaaaaataacagtttccaaaacagttttacattcgaaatatgaaaaagwtgtctttgtgttccttaatctgatgagattttcacactctgcacatgataattgttagatttttattgtgttgataaattgtatatcaaataaaaaatgttattacctcttaaattaggatttttaggtgatataggcagaaaggacagcaagtttttataactttgtctaaatgaactttctaaatgcctgagtattaaaagatagcatgtctataaatcacaatgtatatattactgtatgacctaggaccaatcaaaaccgttacctctgataacattatattg

SEQ ID NO: 721674 - DNA, 678 bp, Homo sapiens
gagatgaaatgagataaaatgatgagatgaaatgatgagatgaaatgatggggtgaagtgatgcactgtcacgtgtgtgtctattctttttcccaagcaacaaaaattataattcattaattttaattttattatttaagaatattcttaagagttgaaggaaaaataatatctgtacattatgggttacaatctaagtataaataatacataaatatattaaaacttacaaagaatatgttttggaatcgaatataccatgcttctgtgatgacagttatttcatgctggttgtcacaattttacatgaaaaactaatgaaaaaatgtttttaactgtttctaaaaataacagtttccaaaacagttttacattcgaaatatgaaaaagttgtctttgtgttccttaatctgatgagattttcacactctgcacatgataattgttagatttttattgtgttgataaattgtatatcaaataaaaaatgttattacctcttaaattaggatttttaggtgatataggcagaaaggacrgcaagtttttataactttgtctaaatgaactttctaaatgcctgagtattaaaagatagcatgtctataaatcacaatgtatatattactgtatgacctaggaccaatcaaaaccgttacctctgataacattatattg

SEQ ID NO: 721675 - DNA, 1763 bp, Homo sapiens
ataacaaatggctaccccacagcctattattttttcatcattatcttcatcatttccttctacatcatccaagtctttttaggaccaaatctaaatgtgctaatggcttcatgatcttcctctgcttacctttcaggactcatctcttgccatttgtctccttgtatctaacactccaaacaaattgaatattttagttcttcagaaattccttgttctctttcaattccatgtctctgcacatgctatttcttctgcattgagcactcttggtccatgttcrgctatcacttctcagaaactttccctgctccctaaaccctgggttgagtgacattcctatgtgttcccatgaaccctctacttctcttgtcataatgtatgtcctgctatactgtgattgctcctttacttgtccatattccctttctaccataaactttgtgaatgcaaggactgtaaaaaaaatctgtgtaggtcagtttcacagctccacagtggcttatagtggatcctcaatgaatgaatgagtaaatgaatgcaagaatgaatttacaatataacaaagtaagagttattatttattgtgattcaatatagagaaaaatcttaactatatttctgctagttgaaaaagaaaaaaaaattggagagaaaaaaacattgaaataaaaagtaattctctttggcaatcagctgaccagaaggttcaaatatattgaactccccatgccatccttgagcatgtctgctaatcagcgtttattgtttttttttctctacatggatatgattgaacctctgttgttacccatcaatcctgagagattttaccactgaatttgaatctttgcatgcctttctcctgcctgtctaatacagctttctcagttttcacaagatggatggcatggtagaagcccttgatatagaatcaggggatttcacattgcatgagactttcaaaaatacttggaaaagtcgttctgcaccacagattcagagcttgaagggaaatctctgagctgagcactttatgtgcattttcacatttcatcataaccaatggctgccttcggtgaaagtctgatatcacactgataaacacctgctggtgtcttgttatgtgtctgtagcctctgttaaaatcatcagctagttggagacagcactaggtcttactcatttttgtatctccagacttcagtgtgatttttatttcctggagctaaattctcccataatcaaaataaagaagcaggactggagaacttctaagaaaaacatctagcttcagacattttatctcatttttaggtcaggcatgtgataactgccatattatcttttaggtaatattgggaatttatactaatggcaatcactatcgtggatattacaaaacaataacatcagtgagcctttctctttttttttattgctgtttcagcaacccctagaatattgtctagaatatagtaggcacctgaccagtatgtattgattgcaataatgaactattcatttctgagcatctttggtgtcatcctgtgtaagggttttacataagttatttcattttatgctcaaaaaaattctaaaagacagacattattctaaccactttagagatcacgaaactgagactaggcgaggtttagaaaactggccatgttttcccagctaataactaacagaaccaggaccagggtttggattcaatttggactaactctgaagcttgtgctttttccagagtgtca

SEQ ID NO: 721676 - DNA, 744 bp, Homo sapiens
tacccaggattaaagtttattgctgatgaatttttcttcagtcttaattcaacattatcaggtagggaagtttcttcttattaatccctttacttcaagcaaggcttgaaattgaaacctggagtattctgatacagtgaatttttttttttaataaccatgagaaacagagcttacgtgcttcagcagacctacctctccctttctcttcaacggtttaagcaattccattgcaaatgattagggtagacacttattctgttatcattgtaaatactgctcagtggatcttcagtgtttctcagtaatctctttttattctccaatcaaactactacttctagcctggtattcttaaaaagggcctaagccgattggaaaagcataagaggcgatttgcagaacagaaacgactcagcaaagtgcatcgtgctgtcaagttcagcattgaaggcaacaggatgcccctataggcctggccctacyagagtgtatacacgagaggtattcccaaggaagcatgtactgtgcatgggcttgaattgtcaacagtcagagtgaaaagtgtgtgtgtgtgtgctttcttaatcagaagaggccaggtctgcttttagtttcgaaataatgaccctaacaggcaccttgggatattcaaggcctcttgaatatttagaaattgacatggaagtcccttcctttatcagtatcctagagagtaatagataattacttccctaatatgca

SEQ ID NO: 721677 - DNA, 617 bp, Homo sapiens
attttatgagactcttgtgttggaaaataactagatagaaataagtatacaaaaggcaaaaagcatgaagaaagtaacacaaataataatctttaaaaatcagtgtggctggtatattcacaggaaaagataaattattacctaatggaagcatatttatgcagagaagcctcatcagattcactgtatatcacgattcctgaatattcatgctatccttttgagataaaggaccactaattgctctgctctggtttgctaggtttcctatctgggggaaggaaacttaacgatagaagacatgtcattaggttagcttctagccrtggatccaggtggacaaaggatcaacgtgtccttttcttagcagtgaaataggttggtagaagctcactgaaacctcagtctctcgtaggaagtcagaactacacagcggacaccgtaatctaaagtagtgcattctgaaacattttcccatttgcaaatgctaaaaatgtacatgtgttttctagtttattccattccctatgaaattgattaataaatccaataaatccccttatatgcaaagaatctgtgaagtagttgggtatactggttcccaattaatggtgaca

SEQ ID NO: 721678 - DNA, 1441 bp, Homo sapiens
taatcaattatagccaagttggccgccattttacttgctactcatccttgataaaaagtattcatttgggccgggtgcggtggctcacaactgtaatcccagcactttgggaggccgaggtgggtggatcaagaggtcaggagatcgagaccatcctggctaacacggtgaaaccccgcctctactaaaaatacaaaaaattagccgggcgccatggcaggtgcctgtagtcccagctactctggaggctgaggcaggagaatggcatgaacccgggaagcggagcttgcagtgagccgagattgcgcaactgcactctagtctgggtgacagagcgaaactctgtctcaaaaaaacaaaaaaaagtattcattcatttattcagtggttctccgttcattcattctttcattcagttattcattactataagtcaatgttgtgccaagctcttctttggctgttgaaaataggtacatataactagtcaatttcttttagaggctcatagtctctggggaacacagcagtgagcagatcactgcagttgtgggtggtaaatgctaatagagtttgtgggaatgcagtggaagcaaagaggagctaaatgtggtgggtgggcccctagaagaggtggcaaatccttcatccatcacatacttccctagtgtttgctttgtgacaartgccaggccagcccccagcagtcccatggtgaaccagacaaggcccctgctcacatggagcttactctgcaatgggaaagctctcatcagagccctaaagaaaaggtaggggtgtatccattagacaaggccaaagaagacatttcacaacgtaggacatggagaaggccaagactcacagtatgaaagagatggggattcctagaaactttcaagtggcctggcccacaaagcatgcattctgaggagtgagaagtgatttttaggctgaggtacccccacccactgtggaccactcatgaagagggcagggtgaatggaaagctctctaagttggggatggggtgtcctaatcagatgggcatttttggaaaaatcttccctgaagctgtatggagagtagtttgaaggaaaaggacgctggaagcaggagagatgcacagtaattcacagcagatggagggagaaagttgctacccaccctcgtcaagtctacacttccctcccctggctggaccttttcctcgcatatgcaatcacttggaagctctctctaaagaatctcacacagaatacatctgccaccacatcttccttctgatactcccaagattttacacataaacatggagggtagaacaatttggaaaccgaagagtaaagagattttgaatgatacaaactaaaatcaatctaagaacaacgcaaatcaagtttttccaggggtcttctctggaactttcagaaaatgctca

SEQ ID NO: 721679 - DNA, 1441 bp, Homo sapiens
taatcaattatagccaagttggccgccattttacttgctactcatccttgataaaaagtattcatttgggccgggtgcggtggctcacaactgtaatcccagcactttgggaggccgaggtgggtggatcaagaggtcaggagatcgagaccatcctggctaacacggtgaaaccccgcctctactaaaaatacaaaaaattagccgggcgccatggcaggtgcctgtagtcccagctactctggaggctgaggcaggagaatggcatgaacccgggaagcggagcttgcagtgagccgagattgcgcaactgcactctagtctgggtgacagagcgaaactctgtctcaaaaaaacaaaaaaaagtattcattcatttattcagtggttctccgttcattcattctttcattcagttattcattactataagtcaatgttgtgccaagctcttctttggctgttgaaaataggtacatataactagtcaatttcttttagaggctcatagtctctggggaacacagcagtgagcagatcactgcagttgtgggtggtaaatgctaatagagtttgtgggaatgcagtggaagcaaagaggagctaaatgtggtgggtgggcccctagaagaggtggcaaatccttcatccatcacatacttccctagtgtttgctttgtgacaaatgccaggccagcccccagcagtcccatggtgaaccagacaaggcccctgctcacatggagcttactctgcaatgggaaagctctcatcagagccctaaagaaaaggtaggggtgtatccattagacaaggccaaagaagacatttcacaacgtaggacatggagaaggccaagactcacagtatgaaagagatggrgattcctagaaactttcaagtggcctggcccacaaagcatgcattctgaggagtgagaagtgatttttaggctgaggtacccccacccactgtggaccactcatgaagagggcagggtgaatggaaagctctctaagttggggatggggtgtcctaatcagatgggcatttttggaaaaatcttccctgaagctgtatggagagtagtttgaaggaaaaggacgctggaagcaggagagatgcacagtaattcacagcagatggagggagaaagttgctacccaccctcgtcaagtctacacttccctcccctggctggaccttttcctcgcatatgcaatcacttggaagctctctctaaagaatctcacacagaatacatctgccaccacatcttccttctgatactcccaagattttacacataaacatggagggtagaacaatttggaaaccgaagagtaaagagattttgaatgatacaaactaaaatcaatctaagaacaacgcaaatcaagtttttccaggggtcttctctggaactttcagaaaatgctca

SEQ ID NO: 721680 - DNA, 604 bp, Homo sapiens
gtacaggaagaatggctgagggggcctcaggaaacttacaatcgtggtggaagccaaaaagaaaggaggcacgtcttacatggccagagcaggaggaagagagagtgaaggggcaagttctacacactttcaaacaatcagatytcatgagaactcacttattatcatgagaacagcaagagaaaaacctgcccccaagtccaatcacctccctccaggtttctaccccaacattggggattacaattcaacatgagatttgggtgggaacacagagccaaatcatatcaaggtcataaaaagataccttaaaaacagaacaaagtggatctgtgtcaggggaatcttcacgaattggattagatttgatttgtgaaatgatatcttctctctttttatttatttatttatttttgaggcggagtctcaactgttgccaggttggagtgcagtggcactatcctctgcctcctgggttcaagcgattctcctgcctcaacctcccgagtagctgggactacaggcacacaccaccacgcccagctaacttttttgtgtttttagtagagatggggattcaccatgttgggcagaatggtctcca

SEQ ID NO: 721681 - DNA, 604 bp, Homo sapiens
gtacaggaagaatggctgagggggcctcaggaaacttacaatcgtggtggaagccaaaaagaaaggaggcacgtcttacatggccagagcaggaggaagagagagtgaaggggcaagttctacacactttcaaacaatcagatctcatgagaactcacttattatcatgagaacagcaagagaaaaacctgcccccaagtccaatcacctccctccaggtttctaccccaacattggggattacaattcaacatgagatttgggtgggaacacagagccaaatcatatcaaggtcataaaaagataccttaaaaacagaacaaagtggatctgtgtcaggggaatcttcacgaattggattagatttgatttgtgaaatgatatcttctctctttttatttatttatttatttttgaggcggagtctcaactgttgccaggttggagtgcagtggcactatcctctgcctcctgggttcaagcgattctcctgcctcaacctcccgagtagctgggactacaggcacacaccaccaygcccagctaacttttttgtgtttttagtagagatggggattcaccatgttgggcagaatggtctcca

SEQ ID NO: 721682 - DNA, 918 bp, Homo sapiens
aaataaaaagaaagggagcacatttaaatttataaaaattacaaatggttaaatagatgaggcaagaatgtacataggtatataatttttctgttgctttacctgggaaaaatataaaagtatatcactattgaaatcctcggagggaaaaaaccttaaaatccgagtagacagaataattttgacattttttaagaaaaaaaaattgatttttcagagacttcaaggcatcctctgtatcaattgcaatcaacagggactgaaaaaaaaatctggggtaataaaagcagttagagaatgccctttgggcactccttcccctggagagcataattgcctttgacagagataactaatattccacatatttcccctaatcaggatgcctaaaatcattttagtcttgagaagagaaaacctgttgcattgatttcatttttaaatgtgtgtatttmttttaggactcacacagcctctgtcgatgactcccacaaaagataatccccaccaaattattaaattatatcttagtactctttggatatttagaacatcaagttacaaagaacatagctgataaagtagctagaagtttgatacatcagaatgattgagtacttagagtacttaatctctctttataatagcaaagtagaaatttgtgatcttacttataaattttatatttaaatccttgtcagacaacagtgaaatatattaaatgacctttactttttcccatcactagataatgagtttcatatatctacctcccttctccttattgtgaggtgacgatcttatttcatatttccttgagaaaatagaagcaattaaaagagaattttctcacccaaactccattacctctactagtctatttgaatctagaactaatcgctccatcttcctcttatt

SEQ ID NO: 721683 - DNA, 918 bp, Homo sapiens
aaataaaaagaaagggagcacatttaaatttataaaaattacaaatggttaaatagatgaggcaagaatgtacataggtatataatttttctgttgctttacctgggaaaaatataaaagtatatcactattgaaatcctcggagggaaaaaaccttaaaatccgagtagacagaataattttgacattttttaagaaaaaaaaattgatttttcagagacttcaaggcatcctctgtatcaattgcaatcaacagggactgaaaaaaaaatctggggtaataaaagcagttagagaatgccctttgggcactccttcccctggagagcataattgcctttgacagagataactaatattccacatatttcccctaatcaggatgcctaaaatcattttagtcttgagaagagaaaacctgttgcattgatttcatttttaaatgtgtgtatttcttttargactcacacagcctctgtcgatgactcccacaaaagataatccccaccaaattattaaattatatcttagtactctttggatatttagaacatcaagttacaaagaacatagctgataaagtagctagaagtttgatacatcagaatgattgagtacttagagtacttaatctctctttataatagcaaagtagaaatttgtgatcttacttataaattttatatttaaatccttgtcagacaacagtgaaatatattaaatgacctttactttttcccatcactagataatgagtttcatatatctacctcccttctccttattgtgaggtgacgatcttatttcatatttccttgagaaaatagaagcaattaaaagagaattttctcacccaaactccattacctctactagtctatttgaatctagaactaatcgctccatcttcctcttatt

SEQ ID NO: 721684 - DNA, 1053 bp, Homo sapiens
taaaatatttaaaaatagcgttaagttcggcttccctgtttctcttaatgtgagaagaacggaggaaaggaggaaggagaagaaagattttaataacatatcttaccacatgtcacaaggttatcgtgtacaacttcaacatgaatcagtgacggatcaacaattttcagtgctggaatcttaaaaataaatgaaacaaagataccggaaaataaaaaatgctcaagaacatactgaaaatcaggttcattaacataacaataggagcttcttatgaataatttctttttaaaacaactgtaattatttctaccctataaaataataaaggtatttagtgcctagaaaatcataaatgctttgtatagttatcatgctttgtcgagttatcttacaaagagttattgttgtctttacctcctcacagttgacttgaagagtttttgatgctgggtttccatttayaacggttgctgaaaaccactgagtagatgggtccaagctataaatttttacttctgaaccaactaagtttttgtcaccttaaaaaaaaaaaaaaaaaaaaatcttagagcaatttgcattatctcccaatagcaacatcatccaggacaatcttttcctaagtcttttttaaaaaaacgcaaaagtaaacattaaaagaatcactacaaacataagatgactgacatttcagaaaagctatgagaaaatttaaactttttattttgtatcggaccaaagtagtattagacaattcatcaagacctcactcactgtcctgtgtagttttagaggaatcaaattcaggaaccccaacaaaaatactatgtctgataatctaaaaaacacagaaaaaaaatgtatgattgtagaaactcagtaacacaaatgggaaggtaaggagtatcaaattaatgccttatccattttatatggctgatattccaaacatatcaaattccacatcaaaatatagctgagctttaaaaatatcttttttcttttcttttttttttttttttttttgagacagggtcttgctctcaccca

SEQ ID NO: 721685 - DNA, 1638 bp, Homo sapiens
gggagatccccagggtcctggagaccctttcaggaggtttgcaaggccaaactattctcagagtaccaagaagttatttgccttttccactcattctctcacgagtatccagtggaattttccagaagcaatatgacatgtgctgacattattgttctgacagctaatggaatatgttatgtgtattcttgtgttttctagaattttccaaggtaagttctatgggtcttcaataacttttaaaagtgtaaaggtgtcttcagaccaaaaaaactgagaactcttgtgcagagtgagagatacaagacagcttgcctacttaaaaacaaaaacaaaaaaagaagtaatggttcttcattttccttcatatttcctaccaaccaacccactctataactaaaattttctaacatatttgaagaaaagatgtgaaaggaactataaataggtaatagatttaattagctaaagtgctctagagaaatatcttgagacaaaagcacgtatttatgtattttgttgctgactggaaaatttcattccagaaaataggcaagaattctcaacttaacctttagtcaaattcatgttctgaaccactaatatgattccaattaaaatgataagagctccagttgaatcgcagaggaaaaaaattgatagtatctctctaaaacatcttttaaaagcctcctgtagggcaggtaaaattatataatgcagtgtttgaaacaggataattttttttccctttttatattgtactttaaataaatagaaaaaaaattttttaccctttttatactgtgcagtggctcacgtctgtaatcccagcactttggaaggctgaggtgggcggaccacttgagcctaggagtttaaacttaagaccagcctgggcaacatggagaaatcacatctccacaaaaaatacaggaaatcaaggcttcagtgagctgtgatcacgccgctgcattccagcctgggcgacagagggagaccctgtctcaaaaattaaaaataaataaataaataaataaataaataaatwaattaattaattaaaaagctccctatacttgtttttcagtaggtaagaatataatgctcataagccaaagttacataggttcaaagcctcagcctcccaagtagctgggattacaggcgtgtgccaccacgcctggctaattttttatatttttggtagagatggggtttcaccatgttggccaggctggtatcgaactcctgacctcaagtgatccgcccaccctggcctcccaaagtgctgggattacaggcgtgagccaccgcactgtaagtgagccaggatctcacttcttaacctttgccacttgtttcagagtctctcacccacctgccaagggggcctgggtgacatactaatgctgcatcagcacaaatttctctgttttactggaaaaacaactcaaagtacatgttttgtcatttcaaaggttgtgttcagccaaataattttacattggaggagttaaatatttaaggagtaatttctgtgaaaccaccagactcaggatacatcttttgatcaatagtcaatggccaaaaaataaaataaaataaaataaaataaataaattcaggcctaggtgg

SEQ ID NO: 721686 - DNA, 1828 bp, Homo sapiens
atattcaaatgagaaccagaggttttataatgtgacttcaaatgaaaggtcattttcctttgctctgtattatcagattattaactttgcatgataaaatacataaaattcattcattttccctgaagtctttcctatttttcctgaagttatctttgagagtagggtacagtggaaatacaaatttttcgaataatgtttttgctaacttttcggattcgtgggatttcaataaatgatgctcctcttttcttccatattgtgtaatgaataaaaagacagttaatagagtcaggtagctggagactcagctatcagctttttgccaggggcatcttgattggagaatgtgcattagaggggtgctcacagtgggctcacaggcacaacacactagtagcggagtggtgtccccacagacagtcacagccgctgatgggacatctttgtcctgcagagaggctggctggagaaacagtctcgggggccttttcacagacttaccgggcagatcatttcctgtcagctaattttctccaatttcaaactcatttcctgtctcagtgctaaaagcaatcatgtatcccatcagacattttaagttgatctctaaaaattattcaccataattttaaatacctacaaaatgtatcatttctggcatattggaactagtaatataataataaaattgatatgaaactctttttaatacatccaatgacctctaaatgtagcacatttatgttcactttaaggcatttaaaaatgcatgatcaggcsgggtgcggtggctcacacctgtaatcccagcactttgggaggctgaggcaggtggattacttgaggtcaggagttcgagaccagcctggccaacatggtgaaacctcgtcactactaaaaatacaaaaaattagctggcagtggtggcgggcgcctgtaatcccagctactcaggaggctgaggcaggagaatcgcttgaacctgggaggcagaggttgcagtcagccgagatcgcaccactgcactccagcctgggtgacagagcaaaactgtctcccaaaaaaaagcatgcttagtaatgtgttgaactatacagttaagtgttacatatacattcatacacatatatgtattcctgtatgtgcacatgtgtatatgaacatgttcctctttaacagtgagaaatcttaaatcatttcgtttccttgacctagtatttcaattctacttctcctcccaaatttcttactcagttaaaatatgcttgtgtgtgaaaataatgagttaccacatgatgaaagcacaccacacacatgctaccacatacagaaatttaaaaaattatttcctgtaaccataagatgctaagtaacaatacttatctttaaaacaaagttttattaaaattatcattaatacacaattaataaacagataaatacatataaataaattagtactttggcaagtatgtaacaaatgggaaaatttcattggaaaatgatcacttaatgagatgagctagactttttgtcaaaataatatcaggcttcagataaattctatccaatacttttaatttttatagatataagacaagtgctcttacaaacaagtagatggagtagtgaggggcttatgataataacgttactctcttctaagaattctgtttaattatgacatattgtgttatcaaaacttgtactatatgttgtaaatcagcaatcaactgcataagattatatactaagtttatgaaaacaaagaataccacctgactatgacttagtgaaaagacgtatcatccattaataaagttcc

SEQ ID NO: 721687 - DNA, 1828 bp, Homo sapiens
atattcaaatgagaaccagaggttttataatgtgacttcaaatgaaaggtcattttcctttgctctgtattatcagattattaactttgcatgataaaatacataaaattcattcattttccctgaagtctttcctatttttcctgaagttatctttgagagtagggtacagtggaaatacaaatttttcgaataatgtttttgctaacttttcggattcgtgggatttcaataaatgatgctcctcttttcttccatattgtgtaatgaataaaaagacagttaatagagtcaggtagctggagactcagctatcagctttttgccaggggcatcttgattggagaatgtgcattagaggggtgctcacagtgggctcacaggcacaacacactagtagcggagtggtgtccccacagacagtcacagccgctgatgggacatctttgtcctgcagagaggctggctggagaaacagtctcgggggccttttcacagacttaccgggcagatcatttcctgtcagctaattttctccaatttcaaactcatttcctgtctcagtgctaaaagcaatcatgtatcccatcagacattttaagttgatctctaaaaattattcaccataattttaaatacctacaaaatgtatcatttctggcatattggaactagtaatataataataaaattgatatgaaactctttttaatacatccaatgacctctaaatgtagcacatttatgttcactttaaggcatttaaaaatgcatgatcaggccgggtgcggtggctcacacctgtaatcccagcactttgggaggctgaggcaggtggattacttgaggtcaggagttcgagaccagcctggccaacatggtgaaacctcgtcactactaaaaatacaaaaaattagctggcagtggtggcgggcgcctgtaatcccagctactcaggaggctgaggcaggagaatcgcttgaacctgggaggcagaggttgcagtcagccgagatcgcaccactgcactccagcctgggtgacagagcaaaactgtctcccaaaaaaaagcatgcttagtaatgtgttgaactatacagttaagtgttacatatacattcatacacatatatgtattcctgtatgtgcacatgtgtatatgaacatgttcctctttaacagtgagaaatcttaaatcatttcgtttccttgacctagtatttcaattctacttctcctcccaaatttcttactcagttaaaatatgcttgtgtgtgaaaataatgagttaccacatgatgaaagcacaccacacacatgctaccacatacagaaatttaaaaaattatttcctgtaaccataagatgctaagtaacaatacttatctttaaaacaaagttttattaaaattatcattaatacacaattaataaacagataaatacatataaataaattagtactttggcaagtatgtaacaaatgggaaaatttcattggaaaaygatcacttaatgagatgagctagactttttgtcaaaataatatcaggcttcagataaattctatccaatacttttaatttttatagatataagacaagtgctcttacaaacaagtagatggagtagtgaggggcttatgataataacgttactctcttctaagaattctgtttaattatgacatattgtgttatcaaaacttgtactatatgttgtaaatcagcaatcaactgcataagattatatactaagtttatgaaaacaaagaataccacctgactatgacttagtgaaaagacgtatcatccattaataaagttcc

SEQ ID NO: 721688 - DNA, 1828 bp, Homo sapiens
atattcaaatgagaaccagaggttttataatgtgacttcaaatgaaaggtcattttcctttgctctgtattatcagattattaactttgcatgataaaatacataaaattcattcattttccctgaagtctttcctatttttcctgaagttatctttgagagtagggtacagtggaaatacaaatttttcgaataatgtttttgctaacttttcggattcgtgggatttcaataaatgatgctcctcttttcttccatattgtgtaatgaataaaaagacagttaatagagtcaggtagctggagactcagctatcagctttttgccaggggcatcttgattggagaatgtgcattagaggggtgctcacagtgggctcacaggcacaacacactagtagcggagtggtgtccccacagacagtcacagccgctgatgggacatctttgtcctgcagagaggctggctggagaaacagtctcgggggccttttcacagacttaccgggcagatcatttcctgtcagctaattttctccaatttcaaactcatttcctgtctcagtgctaaaagcaatcatgtatcccatcagacattttaagttgatctctaaaaattattcaccataattttaaatacctacaaaatgtatcatttctggcatattggaactagtaatataataataaaattgatatgaaactctttttaatacatccaatgacctctaaatgtagcacatttatgttcactttaaggcatttaaaaatgcatgatcaggccgggtgcggtggctcacacctgtaatcccagcactttgggaggctgaggcaggtggattacttgaggtcaggagttcgagaccagcctggccaacatggtgaaacctcgtcactactaaaaatacaaaaaattagctggcagtggtggcgggcgcctgtaatcccagctactcaggaggctgaggcaggagaatcgcttgaacctgggaggcagaggttgcagtcagccgagatcgcaccactgcactccagcctgggtgacagagcaaaactgtctcccaaaaaaaagcatgcttagtaatgtgttgaactatacagttaagtgttacatatacattcatacacatatatgtattcctgtatgtgcacatgtgtatatgaacatgttcctctttaacagtgagaaatcttaaatcatttcgtttccttgacctagtatttcaattctacttctcctcccaaatttcttactcagttaaaatatgcttgtgtgtgaaaataatgagttaccacatgatgaaagcacaccacacacatgctaccacatacagaaatttaaaaaattatttcctgtaaccataagatgctaagtaacaatacttatctttaaaacaaagttttattaaaattatcattaatacacaattaataaacagataaatacatataaataaattagtactttggcaagtatgtaacaaatgggaaaatttcattggaaaatgatcacttaatgagatgagctagactttttgtcaaaataatatcaggcttcagataaattctatycaatacttttaatttttatagatataagacaagtgctcttacaaacaagtagatggagtagtgaggggcttatgataataacgttactctcttctaagaattctgtttaattatgacatattgtgttatcaaaacttgtactatatgttgtaaatcagcaatcaactgcataagattatatactaagtttatgaaaacaaagaataccacctgactatgacttagtgaaaagacgtatcatccattaataaagttcc

SEQ ID NO: 721689 - DNA, 1828 bp, Homo sapiens
atattcaaatgagaaccagaggttttataatgtgacttcaaatgaaaggtcattttcctttgctctgtattatcagattattaactttgcatgataaaatacataaaattcattcattttccctgaagtctttcctatttttcctgaagttatctttgagagtagggtacagtggaaatacaaatttttcgaataatgtttttgctaacttttcggattcgtgggatttcaataaatgatgctcctcttttcttccatattgtgtaatgaataaaaagacagttaatagagtcaggtagctggagactcagctatcagctttttgccaggggcatcttgattggagaatgtgcattagaggggtgctcacagtgggctcacaggcacaacacactagtagcggagtggtgtccccacagacagtcacagccgctgatgggacatctttgtcctgcagagaggctggctggagaaacagtctcgggggccttttcacagacttaccgggcagatcatttcctgtcagctaattttctccaatttcaaactcatttcctgtctcagtgctaaaagcaatcatgtatcccatcagacattttaagttgatctctaaaaattattcaccataattttaaatacctacaaaatgtatcatttctggcatattggaactagtaatataataataaaattgatatgaaactctttttaatacatccaatgacctctaaatgtagcacatttatgttcactttaaggcatttaaaaatgcatgatcaggccgggtgcggtggctcacacctgtaatcccagcactttgggaggctgaggcaggtggattacttgaggtcaggagttcgagaccagcctggccaacatggtgaaacctcgtcactactaaaaatacaaaaaattagctggcagtggtggcgggcgcctgtaatcccagctactcaggaggctgaggcaggagaatcgcttgaacctgggaggcagaggttgcagtcagccgagatcgcaccactgcactccagcctgggtgacagagcaaaactgtctcccaaaaaaaagcatgcttagtaatgtgttgaactatacagttaagtgttacatatacattcatacacatatatgtattcctgtatgtgcacatgtgtatatgaacatgttcctctttaacagtgagaaatcttaaatcatttcgtttccttgacctagtatttcaattctacttctcctcccaaatttcttactcagttaaaatatgcttgtgtgtgaaaataatgagttaccacatgatgaaagcacaccacacacatgctaccacatacagaaatttaaaaaattatttcctgtaaccataagatgctaagtaacaatacttatctttaaaacaaagttttattaaaattatcattaatacacaattaataaacagataaatacatataaataaattagtactttggcaagtatgtaacaaatgggaaaatttcattggaaaatgatcacttaatgagatgagctagactttttgtcaaaataatatcaggcttcagataaattctatccaatacttttaatttttatagatataagacaagtgctcttacaaacaagtagatggagtagtgaggggcttatgataataacgttactctcttctaagaattctgtttaattatgacatattgtgttatcaaaacttgtactatatgttgtaaatcagcaatcaactgcataagattatatactaagtttatgaaaacaaagaataccacctgactatgacttartgaaaagacgtatcatccattaataaagttcc

SEQ ID NO: 721690 - DNA, 1740 bp, Homo sapiens
tgaggacacagagaatgcatgctgtctgtgaaccaggaagcagcccttgtcagacattcaatctcccagcaccttgatcttggacctccagcctccagatgtgtgagaactaagtgtttgctgtttaagacaagttgatgatatttttgttatagcagcccaaactaactaagatagtgccttgtaagatacagaattggtattaaaaattaaaactgggtcccaaattatatgaacaaaaaaaaagttacaaaagaatctattcagtaaaattctgtttttaattatgaaatgcatatttgtaggtatatgtgtgtgggtataaaaaatcattatctctagatggatayggttatagctttttatgttagctattatttttcatttttgtaaaatgaagatatgcaacatttgcaataggagaaaaaagtcagtaactagctacgtaggtataattggtcatactgattctggctttgtgaaacacttccgtgatagaaagtggcactgacttttttaagaaggattttctgaagtttatacaaggttgatgtttaattgggatgtggttaaatgaagagtttattaggcaaataggcaaggggcttaaaataatctaactgtgtcctatagctgtatgacgttgggaaaagcatttatcctagggagaaatgacaccttgtctcaatattttgcgtgtcttaatccatacatcctaattctaacatcacacatccattcaggacagtactcaaatttggtctgtacaggtgtcttgtgtttataaataagcagagtttctcaagttataaatgggcacacctttagactgtgcatactatgtagggttggaaaagctaccagatggcttcattctaatgggggcttggcttatgcaccaatggatacttaatgtgttaatgagaggggcaccagctctcctttttaagactgggttgatggttggtcatagaactgggctccatcatagcaaagaggatggcaggacttcagaacattaatggtcagttggcaacacttaataattacaggccttgcatgtacttttataataagtagcaaggtcagaatgacagcatggaagtcctgaggggcacagagttatgaagatggttaatagaacatggcattgttggagacaaaatagtgggtcagtgaagaagaactccaccgaagttctttaatgaagtgagatcaagggtggatgactaggaagataaaggcattcttctaaaacaaactcataatcctgtgtccagcttctggacctcagtggaatttcaggcccaacctctttcatctgagggagagacctgatccccaggagagaggaccctgtaagactaaatgctaacaacaagtatacatggcagttcttccccagagcctccccagagaaatctgtagccatgccctggggcagccatacattgtggagcgggagctacccagcatttggatgactgttgtgcacagaatggaatttaactttgacactctgacctgaagtgtcatcacgggtcacctttacaatgggtgcctaaggacctgggtaatgagtggagtcctgtccagttacagctcgcggtgtaacttgtccttgtccctgaatgtataatagcaatgggaatattgatggttgacacatgtgccacaggtctttggcttctggagtaagttatcagagtgaggtcagtaaagttgtagatactaaagctg

SEQ ID NO: 721691 - DNA, 604 bp, Homo sapiens
tataaagttggttgatttagtggataccctgcaggccggtttcagggtttgagacctgagctgacctaaggttccgtgcttagaaaagcctatacttgctttagtgctctggtgtcatcctcttggaattcttaataattttgaacaaaggatcccatatttttattttgcactgggctccacaaattaagtatgaaatcctgagagcattgattcctggagcctggaactccatctctataatgccacctttgaactgatacttcagctgtgctttcaataagctgttctgtcacactctcaaaacaatggcaatggggctgtggcacaaaatggagccagtagatcacatgctggtacccattttcacacttctttcactataaacatggatcctttggtctggatatttttatatgtaatcctaagccagttaatcaaatgttcaattagccttcagatcatagtcacaactacagccatagagggcagggaaacaaaccaagagaacatttgtctacttcaagtaaaattattgatggctctttcagggtagaaggcattcattrtagtccaaaaagtgattggttgatcctctcaagtc

SEQ ID NO: 721692 - DNA, 561 bp, Homo sapiens
tctcattagttcagagatattaaaaaatattcaattgtgttactaaaatgacaatttatactttaaatcccaaggcaaatttgaatattatgaaataatatacttttaagagcaaaaaatgtaagaagttacctcttctacatttgaaaaaaacaccaatctctcgctcacacatataccagtgcttcaactgtccctcaaagactgatgttcagataaaagctgtcacctgacctattcaatagagttcaataaggcactgaaataaatactgaatgtgcatacatgtcaacagacatttcatatctgggcctctgccccataatgattcaacaaggtatgtctacttcatggccttatgttcacattcagaaaaagctaaatttttactcttgcttagagrtttcattccagggaaaagtgaatgtaatttcgttcaatattcattaagtaggctcaacacttgtgcaagagactcttataatgactccatgattcttcaatggacaattaaatctacagaagctctggggtctagggcatttgctggctatccctcta

SEQ ID NO: 721693 - DNA, 661 bp, Homo sapiens
aagcagagagtagaatggtggtttccaggggcaggggaggaggagagaagggagatgggaacatgctggtcaaaggatacaaattttcagttagacaggatgaataaactttgagcatgtattatataatatggtgactacagttaataataacttattgtagacttgaaaatttctcagagaatagattttaaatgttctcatgacaaaaaaaaataagtatgtgaggtgatgaacatgttacttagttttatttcacaatgtatactacatatatcaaagcatgttgttgtacattgtaaatatatatgattttagtttgtcaattataccttaatctgggagaaacagaaaaaactctctctctctctctctctcwcacacacacacacacacacacacacacatactgcaacctgctaatctcaattttgcttttccacatactacacatatacatacaaagcatggctttcacaaatacaattacactacatgtattattctgagatttgcctgtttttcactcatcagtggccctctttccatttatagatctatctcattcttattaatggctgcatagtgtgatgtatcatatttatcatcctaatattgaggaactcttagtatgtttccaattgttattataagaaatgtt

SEQ ID NO: 721694 - DNA, 720 bp, Homo sapiens
taaaacagctttytctttcattgtctcagtctgtaactcctgagctttcttaaacagcacaccttttatgaggttcagttgaacatctacttcctgataatgagaattatagtgattaatggaattaaatatattgaaatgttgtatttatatgaacataataatttagaaactcaaataaatttgaaccctccactattttagccctttagaagataaagctcttcccacaattttaacaagtccccagcatttcttatggtttattctattctagtagactagggtagcttttacgcccgtgtcatacaccttgacctgtcgtcttaatttcatcccatgctaccctagcctagcagttggtcattctactgatttcctcaaaaaataaagtccactggaaatatgcagcctgtacatgcacagagtttcctaaagtcttgagggtgctatggggaagaaatcacaccacccaatctcccacctttcaagcactatacagtggtgagcaggtaaatgttaaatgtttaaccatcatctctctaggagatgagaggctagggggagaatctgatttccacggtataaatactcccattatggccaatttcctgctactaacatgattccactaaaggcagagttgggaagaaattcacagaaacagaccattttgtggtgtttccaacatacagataaaacagacataggtaaccttaa

SEQ ID NO: 721695 - DNA, 526 bp, Homo sapiens
ggctcactgcaacctccgcctcccaagttcaagcgattctcctgcctcagcctcccgagtagttgggattacaggtgcctgcaaccacgcctggctaatttttgtatttttagtagagatggggtttcgccatgttggccaggctggtctcgatctgcttgcctcagcctcccaaagtgctgggattacaggtgwgagccactgtgccggccagcctcctctctttttaagctactaattttgatgtctttgtatttattttttattttattttattttatttttttgagactaagtctcgctctatcccctaggctggagtgcagtgacatgatctcagctcactacaacctccacctcacaggttcaagtgattctcctgcctcagccttctgagtagctgggattacaggcgcgtgccaccacacctggctaatttttgtatttttagtagagatggggtttcaccatgttggccaggctggcctcaaactcctgacctcaagtgatctaccctcctccgctt

SEQ ID NO: 721696 - DNA, 606 bp, Homo sapiens
atatttttataaatataaaagagtgcccccctcagccattttcaaaagctccatgcctctctcctggggatagtggctgcctgtcaccaggcctgcccctcctgccccaggcctcagtttccccaactattcaacaaacgtctctaaggggctggcaaactttctgtgaaggactagaggataaatacatgaggctttgcagacgacagacagtctctctttcaataaccytttcaaaatataaaaaccattcttagcttacaacccaggccatacaagagcaggcctcgtagtttgccatcttggactactggggcctcctcagcctcttctggccctaagcagccatggaaagtggcccttcagagtccccctggcagctcatttgcaccttctcaggggcctgggctggggctttggcctctgtcctcttactggtgacctcagaggcctgggtcccttccacctgggtgtgagcaatctctgggctgtaggaaaatgcttctgcagcctcagctgcgcctccactttcctcctgggtagtgagaaaaataccacctgggtttaaggaaagaaagaagcccctgtggggaaggactgctgggg

SEQ ID NO: 721697 - DNA, 614 bp, Homo sapiens
acttttgctaatgttctagctagtgaactggactttgtaatccaattaaaatgtttgtttttttttaaaaaaaactccaaactttctgtgtctctggagtgctcagctatagtgtatgattagttaagaaaacatgcatatgatcacttagttggtttgcctttaagtctcagcttttcatttttgaaattatcttaaacagtatttagactttggagtcctgtactgtttttcaagtgttaatggaaaaaaaaaaaacaaaaaacaaaaaacttcaaagacctgggccctttagttaaaaaaaaaaataatctgaaagttctcacagttattggagatttatctggtttagcagaaattgtttgagttgtacggtcatcttattgattttttattttttttcaacaagattactcattggagactaggagttcttgrtatccaattttagtacctcatctttcctctacctgcaaaaaaggattttttaaaatgctgtttgagcattttaaaatttttggaaaatagttttctgaatatccagcattagtttttcacttctgtttctttgggcagaaatgaagattatgaagaaaactgccgaagaagagtta

SEQ ID NO: 721698 - DNA, 1077 bp, Homo sapiens
tatcacctaatttgctaattaaacatgctaattgcaagtagttacctcacataactacaagatgcagaagtataattatgtaataaagagcttttatgaaacttttgtggggaagcgctggctgaggaggcagctgcttcacaagaccaggagcagcactccctagggcccactgcatctgaattgcccctggataacaattataacctggttccatgctctagtttttctgttcttaagtctgagaaaagctccttctgcaaccaagggcatgatgacagaggctgttggaggaggaagaggaacctgtttataaaccaaaggggttctgctgacctccagcttgagactggagcaagccaagaccttccatgggggggcttccttacaggagtttgtttctaaaacccacccacctcagctccccatcattatccacccactgaaagcaagtcccaacgactctagtttcctgatcttttatgaacagaattgcaagcaagaagcagatccaagaggcaaatgggagattagtagaatgaacttgcctaataaagaactggaggccaggcgcagtgactcacgcctgtaatcccagcactttgggaggcccaggtgggtggatcatttgaggtcaggagcttgagaacagcctgaccaacatggtgaaaccccgtctctactaaaaatatgaaaattagctgggtgtggcagcatgtgcctgtaatcccagctgctcgggaggctgaggcaggagaatcacttgaacctgagaggtggaggttgcagtgagccgagatcatgctactgtactccagcctgggtgacaaagcaagactcagtctcaaaaaaaagggaataaaactagtggaagaaaagccattaagcttggacttaagagtttgatgatttggtattcagggaaatgtaggaaggaacttgggataaatgttgctgaacgatatggatggagttcctttaatgttttcaggaggcacaagtarggatggggatttcttttcaacacctctctatgctgaaattgtgcttcttagaatgtgactttgcatagactcc

SEQ ID NO: 721699 - DNA, 651 bp, Homo sapiens
tttttaataaaatatttttataaaagcttttgtcattaccgacaatgaaaaagctagtgtcatttgctataaacaagaagtatatggctgaactattttcaaaataatcttsttgctaagccaccctcaaactcagtgccttataacaaggtgtgcttattctcacatgcacaggtctgcagattggcttagtttggctgatccagctggacttagttggccaggctccaagttgtaggtctgcctcacatatcttattttggagctcagaattaaagaacagaggctgtctttggtttgaaactggcaccccatcatgtctactcatatttcattggccaaagcaagtcacacacctcccagcatcaatgaggtagggaaagataatttgctcacagagaaggcgatgaatatctgatgaacatttatctaccacatgtgaaaaagaaatagtcaacatgatgaaaacaaaacaataacttaaaactttagttagccaccactgcctgcagaaatggggtttccaaataaaatactagatactcagttaaagtttaacttcagataaacaacaatcatttttagaataagtacgatccatgcaatatttggacatacttctcttacaagttattcattgcattgtgcact

SEQ ID NO: 721700 - DNA, 651 bp, Homo sapiens
tttttaataaaatatttttataaaagcttttgtcattaccgacaatgaaaaagctagtgtcatttgctataaacaagaagtatatggctgaactattttcaaaataatcttgttgctaagccaccctcaaactcagtgccttataacaaggtgtgcttattctcacatgcacaggtctgcagattggcttagtttggctgatcyagctggacttagttggccaggctccaagttgtaggtctgcctcacatatcttattttggagctcagaattaaagaacagaggctgtctttggtttgaaactggcaccccatcatgtctactcatatttcattggccaaagcaagtcacacacctcccagcatcaatgaggtagggaaagataatttgctcacagagaaggcgatgaatatctgatgaacatttatctaccacatgtgaaaaagaaatagtcaacatgatgaaaacaaaacaataacttaaaactttagttagccaccactgcctgcagaaatggggtttccaaataaaatactagatactcagttaaagtttaacttcagataaacaacaatcatttttagaataagtacgatccatgcaatatttggacatacttctcttacaagttattcattgcattgtgcact

SEQ ID NO: 721701 - DNA, 655 bp, Homo sapiens
cccttactccttcttaaacaaagcttacctatggctttggtttgccatggcatccttataatttctgttccactactactttgcagatttgtttctgtttctctccaagagagaaaaacctagtgggtgaaaggcatgagttttgtagccacactgcccaggcttgaatcttggtttctatttaccaactgagcaagttttttaacttctctgtacttcatgagtctaaaggggataataacagtacctatctcctaaggttattgtgaaaattatgtgtgtgtgtgtgtgtgtgtgtgtgtgtgtataacatatatataacacatatataacacatataattttcacaacaatatataactatcatatatatatatatatatatatatatatatatatatatatatatgcaatcttatatatatgtacacaggcatacatakaaaatcattagaaaaatgcctggaatatggtaagcatgatgtaggtgttggctttcattagtatctgaatggctcactcaaaacatgccatgggcccctcttcaaccaaaaagagttttaggaatgctctcttgtcagctaccacccatagatctgatcagcatagtctaagttatagaacatggtagattgcattaaaggtcacaattctt

SEQ ID NO: 721702 - DNA, 2320 bp, Homo sapiens
  misc_feature 1277, 1278, 1279, 1280, 1281, 1282, 1283, 1284, 1285, 1286,1287, 1288, 1289, 1290, 1291, 1292, 1293, 1294, 1295, 1296,1297, 1298, 1299, 1300, 1301, 1302, 1303, 1304, 1305, 1306,1307, 1308, 1309, 1310, 1311, 1312, 1313, 1314, 1315: n = A,T,C or G
  misc_feature 1316, 1317, 1318, 1319, 1320, 1321, 1322, 1323, 1324, 1325,1326, 1327, 1328, 1329, 1330, 1331, 1332, 1333, 1334, 1335,1336, 1337, 1338, 1339, 1340, 1341, 1342, 1343, 1344, 1345,1346, 1347, 1348, 1349, 1350, 1351, 1352, 1353, 1354: n = A,T,C or G
  misc_feature 1355, 1356, 1357, 1358, 1359, 1360, 1361, 1362, 1363, 1364,1365, 1366, 1367, 1368, 1369, 1370, 1371, 1372, 1373, 1374,1375, 1376: n = A,T,C or G
caagatgggtagatacatggctcagtcacctggccagaggggcccccaaggcttctggatgagtgccatctgatgcatctggcctgctgtaggctctaaagctcgggcccactcttgcaaggtgcatggtgcgctcatgctagccagatggaagcrccgcagtacaaactcctcccccagctttaggggcatggctcgggacatttggccacttgcagagtttactcacctgcctctgttcctccacagctccggctcctgtatgaatgcaatcccgtggcctacatcattgagcaggcaggaggcttggcgaccacggggacccagcctgtactggacgtgaagcccgaggcaattcaccagcgagtccccctcattctggggtcaccagaggatgtgcaggaatatctcacctgtgtgcagaaaaatcaggcaggcagctagcgagtttgaccccacatgccctcttctgtttgtcttgcaccttgtctaaggaccctaaatgaacgataaacagagatggtagctatgagtatacaaaaggtaaatccacttaatcacatacagaagagcaacaacaaactgcttacgacaggtttggaagccacaggcgattctatggtcaatgtgaaggactagaaataaaaacccacatgtggaaagtgcgactttggcttgtcttctgtcagaaacagtggcaaatatggttataattccgtctgtcaacccacataattggcggctgcatgcttgtgggcaaagagtacatagattagttaagaatttgtcagctgggtgtggtggctcatgcctgtaatcccagcactttgggaggccgaggccagcggatcacggggtcaggagatcgagaccatcctggctaacacggtgaaaccccatctctactaaaaatacaaaaattagccgggcgtggtggcgggcgcctgtagtcccagctactcgggaggctgaggcaggagaatggcgtgaacccgggaggcagagcttgcagtgagccgagatcgcgccattgcactccagcttgggtgacagagtgagattccatctaaaaaaataaaaaataaaaattgtcttgattggcttgaaatttgaacctagtgtcttatcctgtagtgattacctccctcaaacacatgtaaatttccaacttaatatcttagaagagtatttgtgtcttattttggataaatttgagttagaaatctcatggcaattaaattctgaaatttctgattgagcctatcttaagagtctannnnnnnnnnnnnnnnnnnnnnnnnnnnnnnnnnnnnnnnnnnnnnnnnnnnnnnnnnnnnnnnnnnnnnnnnnnnnnnnnnnnnnnnnnnnnnnnnnnncattttttttttaacctacaaggttacatgtgacactggaggaaactaatggcctaggatggggacagaagggccaggaaacctttgtgtcttgattttacttcttttacaaacttttcttctccctggtctccctactgctatctttagacataagctcaatgaagttcgcaaggagatttcttttgttgctataaataccacattttctccactgacctttcattttttctttgtacctcttgaaggctcactttcacactgccctcgagctacagcttgctacccctcaacagagagagcatggtgtgcccccaactggaaaaacagacctgccttcctctttagacctttgtcctcctctcaataagagtcttaactatgtatcagtatgaagtgtgagtgagtaaagtgaggccccaactttgggatggtcattactgaaaaagaaaaacctcacatgatgacaaagtctttttaacactacatgaatgtgactaaatcagctactgaaccaaagttcacaggagcaaaatcaaaaagaacaaggagaatcaagcaagttaatctggtaaaaagtcacagacggctagggacagtggctcatgactgtaatcctagcactttgggaggccaaggcaggaggattgcttgggcccaggagttcaagaccagcatgggcaacatgagaccttgtctttacaaaaaaaaaaaaaaaaaaaatcagaatattagccaggcatggtgtaaaaaaaaaatcaaaatattagccaggcgtggtggtgcgtgtacatactcccagctactcaggaagctgagatgggaggatcgcttgaggctggcagcaaggctgtaatagtaagccatgattgtgccactgtactctggcctaggcaacacagccagaccctctctctctcaaaaaaaaaaaaaaaaaaaaaaaa

SEQ ID NO: 721703 - DNA, 669 bp, Homo sapiens
ttctgtttttccttcagcagtctcaggctatcagaaattaccttagattctctcatgtgggcatcaagagtggcaacaagaaagattagggaaataatccagacaactgagcaaaaaaagaacttactactgtccctactgtaaaggtggataaactgaggcaccatgcggtttaaaaattcatgttcacatagagtcaggctccacagctcactctcttaaccatcctgtaattttgccgactctatgcccagtcacggatgcacctgtatggtagctcrtggcccccttagagcttagaatctgggtttcattcctgctctacagctatataatttaacaattttcctctgaatttgttggattctaatcctacatatctcaaattttattattactgaatcttaaaggaggctgtgatgtccttagtctttagaaatattaaacctataaataaagggctatatgaggttaaacgtattcaaatttctatatggtttaaaacattgaggaaatgtattgacaaacaaacttaagaaactgcaaccaatctactctggacaaaaatttagatactatctcttcaaaataagctatctagtggtatttacacacattcttccatatatcaacagtatttcacatgctcataaccttaaaaataactga

SEQ ID NO: 721704 - DNA, 2371 bp, Homo sapiens
tccactccttcacaccagcctcaggaataggtaaggacttttcaactgctcaccaattctaaaggtagtatggaaagccagaatgattttaatctcattgatttagatttagtatcacattgccagacactgggtatttttttttttttggagatggggtctagctgtgttgcccaggctggagtgcagtggggcaatctctgctcactgcaagctccgcctcccaggttccgctattctcctgcctcagtctccccagtagctgggactacaggcgtccgccaccatgtstggctaatttttttgtatttttagtagagacggggtttcaccgtgttagccaggatggtcttgatctcctgaccttgtgatccgcccacccaaagtgctgggattataggcgtgagccaccacgcccagccgactctgggtattttaataggaatgtaacatcaagagctttacaatactccttccagaaatcctataattttttgaaattcttttgaatttcaattttccttttgcagattaatactttcagaatggacattggcttgagaataatcagaataactaaaatatggaggaaaatattagtgaagaatgaaaataatatatttcttttgtctagagaaacatgaagagtgacattaaatatatatttttaaaatatgaaagtatgtatatggcaatagcaagtatttgcatttatgaattttttttaagttggagaatgactatgagaattcttccatcttcatgaactctcccaacctcctccacagtctgaaatcctttcttggtcttctgtactttaatccacacatcagaaacataagcaatatttttaatcactgtggtttcagaaacaaagtcgattggagagaacccaaggtattattgctgtctgcaggttgtaggattattttagggttggcaaggaatcccttgggtgggccagtgatgataaggagatgaagctgaggccagtggcatggtgagcttatcaagctggctcatggggtgggtgttcatagcacagggaggagacacagacagtgggtcatcatgtctcctgttgaggtgtctagagaatttgtgagccaagcctgagtggctccacaggtgactctggatgaatcatagtcctgcttttaaattgagatatggcaattctgtatgaattaaatggcacacagttattaatttgatattatatgtaagtcaatgttaccatgctatgaagaattcctctacttaaaagccttaatgtatggttggagaagcaagaaaaaatattaagatactaattcaaggtacaggactatattagtccattctcacactgctttagaaaactatctgaaactgggtattttatgaagaaaaaaggtttaattgactcacagttccacagactgtatagaaagcatgctttgggaggcctcaggaagcttacagtcatggcagaagggtgaaggggaagcaagcaccttctttacatggtggagggaaaaagagagcgcgaagggggaagtgctgcacacttttaaacaactggatcttgggagaactcctctactatcacaagagcagcaagcgggaaatccgcctctatgatccaatcacctcccaccaggtccctcccccaacactgaaaattataatttgacatgagatttgggttgggacacagagccaaaccatttcaatgaccaataccatttgctctgtgaggggtagaattggagtgattaagagagacaagagaaagcttgagctatgtctgcgtggattggcaggacacactttgggcagagggaaaggtatgagcaaaggagaaaggcagaagtgtttatagcattgaggccaccattggtagatgaaagtgccagcgacagaggatttgaccagaatgttgtggtgctgagattggagatacaacactggaatctagagaagatggcctggaatggcaggcacatggtgcgcctgtgcctcaaatcatccagcagttttcacacattttgctcttagaatctattcatatttattgtgtaagagattaaaactgagaaatgttaaagtcatctattttaaaatgacagcaatatactcattatgtgtaaatacaacgttatttttaaaaaacactttctaaaacgaacacttttatgagaagagtggcattggttttattttaatttttgaaaatctctttaatgtctggtttaatacatggtatatagattctactttatgtatttaattaatttttttaagggacagcattttgctcatttgtcaggctataatgtagtgatgcaatcatagcttactgcagccttgaacacatgagttcaagccg

SEQ ID NO: 721705 - DNA, 2371 bp, Homo sapiens
tccactccttcacaccagcctcaggaataggtaaggacttttcaactgctcaccaattctaaaggtagtatggaaagccagaatgattttaatctcattgatttagatttagtatcacattgccagacactgggtatttttttttttttggagatggggtctagctgtgttgcccaggctggagtgcagtggggcaatctctgctcactgcaagctccgcctcccaggttccgctattctcctgcctcagtctccccagtagctgggactacaggcgtccgccaccatgtctggctaatttttttgtatttttagtagagacggggtttcaccgtgttagccaggatggtcttgatctcctgaccttgtgatccgcccacccaaagtgctgggattataggcgtgagccaccacgcccagccgactctgggtattttaataggaatgtaacatcaagagctttacaatactccttccagaaatcctataattttttgaaattcttttgaatttcaattttccttttgcagattaatactttcagaatggacattggcttgagaataatcagaataactaaaatatggaggaaaatattagtgaagaatgaaaataatatatttcttttgtctagagaaacatgaagagtgacattaaatatatatttttaaaatatgaaagtatgtatatggcaatagcaagtatttgcatttatgaattttttttaagttggagaatgactatgagaattcttccatcttcatgaactctcccaacctcctccacagtctgaaatcctttcttggtcttctgtactttaatccacacatcagaaacataagcaatatttttaatcactgtggtttcagaaacaaagtcgattggagagaacccaaggtattattgctgtctgcaggttgtaggattattttagggttggcaaggaatcccttgggtgggccagtgatgataaggagatgaagctgaggccagtggcatggtgagcttatcaagctggctcatggggtgggtgttcatagcacagggaggagacacagacagtgggtcatcatgtctcctgttgaggtgtctagagaatttgtgagccaagcctgagtggctccacaggtgactctggatgaatcatagtcctgcttttaaattgagatatggcaattctgtatgaattaaatggcacacagttattaatttgatattatatgtaagtcaatgttaccatgctatgaagaattcctctacttaaaagccttaatgtatggttggagaagcaagaaaaaatattaagatactaattcaaggtacaggactatattagtccattctcacactgctttagaaaactatctgaaactgggtattttatgaagaaaaaaggtttaattgactcacagttccacagactgtatagaaagcatgctttgggaggcctcaggaagcttacagtcatggcagaagggtgaaggggaagcaagcaccttctttacatggtggagggaaaaagagagcgcgaagggggaagtgctgcacacttttaaacaactggatcttgggagaactcctctactatcacaagagcagcaagcgggaaatccgcctctatgatccaatcacctcccaccaggtccctcccccaacactgaaaattataatttgacatgagatttgggttgggacacagagccaaaccatttcaatgaccaataccatttgctctgtgaggggtagaattggagtgattaagagagacaagagaaagcttgagctatgtctgcgtggattggcaggacacactttgggcagagggaaaggtatgagcaaaggagaaaggcagaagtgtttatagcattgaggccaccattggtagatgaaagtgccagcgacagaggatttgaccagaatgttgtggtgctgagattggagatacaacactggaatctagagaagatggcctggaatggcaggcacatggtgcgcctgtgcctcaaatcatccagcagttttcacacattttgctcttagaatctattcatatttattgtgtaagagattaaaactgagaaatkttaaagtcatctattttaaaatgacagcaatatactcattatgtgtaaatacaacgttatttttaaaaaacactttctaaaacgaacacttttatgagaagagtggcattggttttattttaatttttgaaaatctctttaatgtctggtttaatacatggtatatagattctactttatgtatttaattaatttttttaagggacagcattttgctcatttgtcaggctataatgtagtgatgcaatcatagcttactgcagccttgaacacatgagttcaagccg

SEQ ID NO: 721706 - DNA, 1833 bp, Homo sapiens
ggaatcaccatcaaaaagcatttattaagcacctaagactcataggggcttggccctgccctgagagagggtcatttatgaccattaaggccagagtaaggcaggctcccagaggcccataaaactcccagggaaggaagtggggattaaccacttcctctcacctctcaagaaggggtttcaagatgtaccaaattgcagaacagagggttcttgggtgggggtggggagatggggatcagaagagcctacacctggctaaggcctgtctgtataaggggacatgaataaccctggggtttctcaaatcactttgatttttacagaggagagctttgtagtcctcactgccccgacttctctgtgaggcacatgctggcaagactctgcacccgccccttggcacgggtctggactctatccaggaagggacagagcatacatggggattatatgcatatttgacaagtgctatgctggtacaatggcttaattcttttacctaactcagcagtctgatttcttggatcaaaacctgtctatcctggacaatttacaaccccatcatactcaatttttactgaaatttttttcaggaactctcacccaaatctaagaaaagcagcttacaaagaagacaaacacaggcaagcttgagtcatgaaaggagagcagcatgcgggatgggacttcctggattgagaccatggtttggctctgagcttcctgggagtcaaagcaaaatgaccaacaataaataattatgccattatcaaactaacagttttcaaaacggacaatgttttcccagcagtaaatctagacagtgatggaatctgcaaattcccctcctcagcatatgaggaccagcactgagagtttcctttctyttctcccttctctccctgctgagctgtggggaaatccctgctgaaattacaggggcaatctttatggtgctagagcaaagcaggtagagacaggtgctcagaagcgagtggagttgttcctaggtgtatggcgtgagttccaagaactgcaccctggctgagcactgtggcacatgcattttgggaggccggggatcacttgagtacagaagtttcagactagcctgggcaacatggcaagactcctgtcactacagaaatttttaaaatagaagtaaatattaaaataaattaaaaaggaagcttcctggtaagtcctgggggtccaagttaggtgaagtcccacaaacctcttgaaaaaggaaacaataaactttagaacgtttcatcagtagagaagccaccacgttaagccaaagaatgtacggcactaaacttattaaccaatccctgcctctggggctttttcttttggggggtgggggttggcggtgggcctcactcgtggcccacgctggagtgcagtgaagtacagtggcgtaatcttgcttcactgcacacgccaccacgcccagctaacttttgtattttttttgtagagacagggttttgccgtgttgcccaggctggtctcctgagctcaagtgatccaaccaccttggcctcccaaagtgctgggattagaggcgtgagccacctcactaggtaaagatacctagtattctttacgcagtttctcctaatggtaacatctcccaaaacaatagtataatatcacactcagggtactatcgatacaatcagggcacacatttcccctgtgcctggctccttgggtttgttttttgttttgttttttgagacagagtctcgctctgtcgcccaggctggagtgcagtggcgcgatctcagctcactgcaagctccgcctcccgggtttatg

SEQ ID NO: 721707 - DNA, 1833 bp, Homo sapiens
ggaatcaccatcaaaaagcatttattaagcacctaagactcataggggcttggccctgccctgagagagggtcatttatgaccattaaggccagagtaaggcaggctcccagaggcccataaaactcccagggaaggaagtggggattaaccacttcctctcacctctcaagaaggggtttcaagatgtaccaaattgcagaacagagggttcttgggtgggggtggggagatggggatcagaagagcctacacctggctaaggcctgtctgtataaggggacatgaataaccctggggtttctcaaatcactttgatttttacagaggagagctttgtagtcctcactgccccgacttctctgtgaggcacatgctggcaagactctgcacccgccccttggcacgggtctggactctatccaggaagggacagagcatacatggggattatatgcatatttgacaagtgctatgctggtacaatggcttaattcttttacctaactcagcagtctgatttcttggatcaaaacctgtctatcctggacaatttacaaccccatcatactcaatttttactgaaatttttttcaggaactctcacccaaatctaagaaaagcagcttacaaagaagacaaacacaggcaagcttgagtcatgaaaggagagcagcatgcgggatgggacttcctggattgagaccatggtttggctctgagcttcctgggagtcaaagcaaaatgaccaacaataaataattatgccattatcaaactaacagttttcaaaacggacaatgttttcccagcagtaaatctagacagtgatggaatctgcaaattcccctcctcagcatatgaggaccagcactgagagtttcctttctcttctcccttctctcyctgctgagctgtggggaaatccctgctgaaattacaggggcaatctttatggtgctagagcaaagcaggtagagacaggtgctcagaagcgagtggagttgttcctaggtgtatggcgtgagttccaagaactgcaccctggctgagcactgtggcacatgcattttgggaggccggggatcacttgagtacagaagtttcagactagcctgggcaacatggcaagactcctgtcactacagaaatttttaaaatagaagtaaatattaaaataaattaaaaaggaagcttcctggtaagtcctgggggtccaagttaggtgaagtcccacaaacctcttgaaaaaggaaacaataaactttagaacgtttcatcagtagagaagccaccacgttaagccaaagaatgtacggcactaaacttattaaccaatccctgcctctggggctttttcttttggggggtgggggttggcggtgggcctcactcgtggcccacgctggagtgcagtgaagtacagtggcgtaatcttgcttcactgcacacgccaccacgcccagctaacttttgtattttttttgtagagacagggttttgccgtgttgcccaggctggtctcctgagctcaagtgatccaaccaccttggcctcccaaagtgctgggattagaggcgtgagccacctcactaggtaaagatacctagtattctttacgcagtttctcctaatggtaacatctcccaaaacaatagtataatatcacactcagggtactatcgatacaatcagggcacacatttcccctgtgcctggctccttgggtttgttttttgttttgttttttgagacagagtctcgctctgtcgcccaggctggagtgcagtggcgcgatctcagctcactgcaagctccgcctcccgggtttatg

SEQ ID NO: 721708 - DNA, 1833 bp, Homo sapiens
ggaatcaccatcaaaaagcatttattaagcacctaagactcataggggcttggccctgccctgagagagggtcatttatgaccattaaggccagagtaaggcaggctcccagaggcccataaaactcccagggaaggaagtggggattaaccacttcctctcacctctcaagaaggggtttcaagatgtaccaaattgcagaacagagggttcttgggtgggggtggggagatggggatcagaagagcctacacctggctaaggcctgtctgtataaggggacatgaataaccctggggtttctcaaatcactttgatttttacagaggagagctttgtagtcctcactgccccgacttctctgtgaggcacatgctggcaagactctgcacccgccccttggcacgggtctggactctatccaggaagggacagagcatacatggggattatatgcatatttgacaagtgctatgctggtacaatggcttaattcttttacctaactcagcagtctgatttcttggatcaaaacctgtctatcctggacaatttacaaccccatcatactcaatttttactgaaatttttttcaggaactctcacccaaatctaagaaaagcagcttacaaagaagacaaacacaggcaagcttgagtcatgaaaggagagcagcatgcgggatgggacttcctggattgagaccatggtttggctctgagcttcctgggagtcaaagcaaaatgaccaacaataaataattatgccattatcaaactaacagttttcaaaacggacaatgttttcccagcagtaaatctagacagtgatggaatctgcaaattcccctcctcagcatatgaggaccagcactgagagtttcctttctcttctcccttctctccctgctgagctgtggggaaatccctgctgaaattacaggggcaatctttatggtgctagagcaaagcaggtagagacaggtgctcagaagcgagtggagttgttcctaggtgtatggcgtgagttccaagaactgcaccctggctgagcactgtggcacatgcattttgggaggccggggatcacttgagtacagaagtttcagactagcctgggcaacatggcaagactcctgtcactacagaaatttttaaaatagaagtaaatattaaaataaattaaaaaggaagcttcctggtaagtcctgggggtccaagttaggtgaagtcccacaaacctcttgaaaaaggaaacaataaactttagaacgtttcatcagtagagaagccaccacgttaagccaaagaatgtacggcactaaacttattaaccaatccctgcctctggggctttttcttttggggggtgggggttggcggtgggcctcactcgtggcccasgctggagtgcagtgaagtacagtggcgtaatcttgcttcactgcacacgccaccacgcccagctaacttttgtattttttttgtagagacagggttttgccgtgttgcccaggctggtctcctgagctcaagtgatccaaccaccttggcctcccaaagtgctgggattagaggcgtgagccacctcactaggtaaagatacctagtattctttacgcagtttctcctaatggtaacatctcccaaaacaatagtataatatcacactcagggtactatcgatacaatcagggcacacatttcccctgtgcctggctccttgggtttgttttttgttttgttttttgagacagagtctcgctctgtcgcccaggctggagtgcagtggcgcgatctcagctcactgcaagctccgcctcccgggtttatg

SEQ ID NO: 721709 - DNA, 892 bp, Homo sapiens
cgggaggctgaggcagaaggatcacttgagcctaggagttcgaggttacactgagctgtgatcacgccactgcactccagcctggctgacagagcgagaccttgtctcaaaaacaacaacaaaaagatccgtttgccattttcttccatggtgggggggagacagtcattttatattgttcccctagcctcccctcaacaaacacatatggtgggtcttgtttgaaaaagtatctcaatccctgttttccatctgcctggtgccatctggacattgaataaatgcccaatgattatgatacttggacacctggaaggtctggtcttcacagtggtctcttgttaggaccgtggtgaatttgggttaactttgtgtggggatctagttgcaggccactgatcattcattcktctgttcattcactctgcaggtgcttgttaaatgccttttatatgcgaggtactttttaggttcctggattacagcagcgaacaaaatggacacagtccctaagctgggagtcttatattttagtagggagagcagagaataggcaaatatgtatcagtggcaatgaatgctatgaagtaaagcaggaaagtgagggggtggaagtcgtgttttacagagggtggtcaaggaaggcaacttttgaatgaaaaccagaacggagatggtggggagggagccatccagagaggcagcagaggaagggcaagtcgagcacgaggcccccttggttgacatggagtgaggaggagagtgtgagataggtggaagcggaactgggctctgagagtaactgccctcttgacatctttacctcttcagtaaagtcttggagaaatcccatcgtgcgtgctgggaacattatagttttagagaatgttca

SEQ ID NO: 721710 - DNA, 889 bp, Homo sapiens
cacaaaaacagagaggtgacatattgggccccagatcactcagctaagacccggctggagcctgaaactcatctgactgacaccaggcacatagccactaggctctcccagctcccaccaccacaccggaggtagccacataagggacaccaaaggcatctttcaggttgctcccctctccttctccccgacccctagaggcagctccttaccacctggccaattccagatcctcctggtgcccatgcccccggatgcagcccctcagcccccaacagcccagctcagaggcaccccagcctgggctgccactgcaaagtgagaatttagcacccgttctggttctaggacgtcraagtatggtggaaagagctcgtctgaattccaggcacttacaagcggtgtgactttgggaagtgccttcactcctcagagcctccgtttcctcatctggaaagtcggagtagcaatgcctgggcagctcacagagcttcaaggactacatcaagcagcttccaccggagtctgagcggcacagattctccgtgactgttgggcccaggccaccttgcagttattacgatctataaggccaggcagagggtggatgtttcaaatacaatgtctgtattcatcttttaagtggcccaatgaggtagaaatggtcacttccactttacagaaaagcatgtgattctcaggcatgtaggaatttcctggatctcccaactggtgagtgaagagctgcgttttgaactcgtggcttagctgggctctttccagcatgaactgcttggggatctgaataagtgtctatagtttaaggtgaggaggtaggcagcccatcctcctgagctcgggatggagagttctgggctgatgatgccat

SEQ ID NO: 721711 - DNA, 920 bp, Homo sapiens
  misc_feature 635, 636, 637, 638, 639, 640, 641, 642, 643, 644, 645, 646,647, 648, 649, 650, 651, 652, 653, 654, 655, 656, 657, 658,659, 660, 661, 662, 663, 664, 665, 666, 667, 668, 669, 670,671, 672, 673, 674, 675, 676, 677, 678, 679, 680, 681: n = A,T,C or G
  misc_feature 682, 683, 684, 685, 686, 687, 688, 689, 690, 691, 692, 693,694, 695, 696, 697, 698, 699, 700, 701, 702, 703, 704, 705,706, 707, 708, 709, 710, 711, 712, 713, 714, 715, 716, 717,718, 719, 720, 721, 722, 723, 724, 725, 726, 727, 728: n = A,T,C or G
  misc_feature 729, 730, 731, 732, 733, 734: n = A,T,C or G
tgtgatctcagctcactgcaacctccacctcccgggttcaagctattctcctgcctcagccttctgagtacctgggactacaggcacacgccaccaagtccagctaatttttgtatttttagtagagatagggtttcaccatcatggccaggatggtcttgatctcttgacttcgtgatccacttgcctcggcctcccaaagtgctggcagtacaggcgtgagccaccacacccagcctaattttttattttttgtagaggtgggggtctcaccggccttgaactcctggcctcaagcaatcctcccacctcgctctcccaaagtgctgtgattacaggcatgagccaccacaactagctagaactttcttgatctgttgtcttcagcaaataaaaactatcaggatttcatatattgtaacgaactgtagaattgatccctgaaaagtataatcttggatttcayatattgtaaaaactccactcactccattaattttatctttctgcaccagggaattcaagaaatcttttctttccttttattttttatttatttattttttttgagatggagtcttgctatgtcgcccaagctgaagggtagtggcgccatctcggctcactgtctcagnnnnnnnnnnnnnnnnnnnnnnnnnnnnnnnnnnnnnnnnnnnnnnnnnnnnnnnnnnnnnnnnnnnnnnnnnnnnnnnnnnnnnnnnnnnnnnnnnnnnacagcttctccagtagctaggactacaggcgcgtgccaccatgcccagctattttatatttttgtagagacaaggtgtccctatgttgccaaggctgatctggaactcctgagctcaggcaatccgcctgccttagcgtcctgaagtgctgggattacgacgggcatgaggcaccacacccagcca

SEQ ID NO: 721712 - DNA, 539 bp, Homo sapiens
aaaagaattacttcccgcaaaagaaaaaaaaaattaaattctggggtaaatatgctagctacacagaatagagatacatctcctagccgtccttgcagttagttatggctaatcagacattatcagaaatactgtatggtgtggtagcttccagttattccttgacacaactaacagacagcctttgtcctattttcttcttcacctcttagtctactctgctacttagaacacaaaacacatggctccttttttatggaatgtgatttacaatattaataactattatcagtttataaatatattgtatttaggtgaaggaatgcttacttgagataaaacctccatacgtaatgactcaatctttgtgtaacgtaaacaaaatgcaaactcagagctttctttgactggcaaaaagataatctatgagaatttttttttttytttttttgagacaggatttcactctgtcacctaggctagagtacagtggaatgtcacagctcactggggtctcaacctcccacctcagtctcctg

SEQ ID NO: 721713 - DNA, 1340 bp, Homo sapiens
cacctgctttggcctcccacagtgttgggattacaggtgtgagccaccatgtccagccgttgtattgattttcagtgcccaggattggggagtgaggtggcagatgcaggagctgtgtcagaatctttgggagggatagtttaacaatgaaaattcagtgatgtaacataatttaaattgggaagatgaaaacaaaactattgttttcctaacacatactacttatagtttttctgaatcttctccactggtgaaaagacagaccatcatttttatagagatgcttgattgaaaacaggtcatgtctccctaggagaaaatagaagaaaaccaggacagagatatttgctgacctgtcatatttccttggtatcctttcttcaaatctttcaaaatatcttctctatattcatgtcatcttcaagacgtgaaacarggaaattgtctgtacagacaatttccagacccttgatcccaaacactctcaatgcttgtctgtgtttcctacaaaaagcagaaacctgagaaagataaggagtactttgcatgtagaatagagaagatccttacagttcagggtctgagattccatcttgacattcatttgatcgctaaatattgaagacttcttttaggtggagccgtgaccatacattggtaggaaaagtacagattgcttacgagatgattttggcacacttgttgactgtatggagaaaacaaaaaaaaaaacaacattgaaatcctgccatatagtgtcatatagtgtatgtaaaagtggactgcagatggaataatgatccaaatgagaaaaataagaccaaaaagcaaatttaaaaacattcacagcatttttaagaccctagaagaataagccataaaatgatggctttgacttcatcaaattaaggatttctgttgaactgaggatgccatcagcagttaatagatgggtgagaaattaaagcagtgtatcaaagactgacaaggcattaacatgtaaggtgctcttgtaattcaagcagaacaatatgtggaaaccagtagaaaaacaggcaaaaacatggataggcagttaacaggagggaaaagctaaatgcagggcaagaatttgaagagctacttaacttcattaataatcagagaagcataaaacagtaaaatagcacattatgtccatcagattgatgacaattacaaagtgggataattccaaatttcagcaaaaatacaggaaaatggctattaaacagctgttaaattaagtatgagactacatcttgtccccacaaccttcattcctgagtatatattcacacaggtcagtaaggggacataaa

SEQ ID NO: 721714 - DNA, 599 bp, Homo sapiens
ttttttatctccctacaccgaaggttactggtgggctcaaaagatactcctgaagagtcaagttatggggaagcatcccaggagaggagaggcaggacaagcaaactattcctgggaagctagacttactgataacagtggaactctccttggctccaactgatttctttgcctggggttattctctataggtagctctgataatctttccctatctcttgcagcatctagcacagggctcaaatgctcgttgtccgattaacacaggtgtgcacaatgagtggtctcaggtgagggaagagaaaaagcacacagcttgcaaaaggcagagatctgcagcttattcacartgcaagactgagctgataagcaagctagcagtaatgatgccgtgtatttttcagaggatcttgaggtaacatctgacttgcaattcccgtgcaagtcagcagtatgtcagggctgcacaaatggctttcccacattcccctgtggggagaatgcagagtatgcattaatgactgtatgttgcagagaagaaaacggatttaaggccctagcaaattagggcatatggcactaggaaacgagatgtttaa

SEQ ID NO: 721715 - DNA, 1026 bp, Homo sapiens
catcaaaaccgctccataagtcctgccactccacgtgcaatgccatgaacttgaagaaactgctggtaagagaaagcaaatgctgtgaccaggcaagtaagtgttgtcaaagtgttgtaaaactaccctgaacttttggatccagagtactttccttccttccccytccctcgtcctctcttttctttgagtataagtggccacagcaacacatttccaaagcttaaacttagaacttttatctgggaagtttgtttggacagtattcaaatataagtgataaaaatatacaaaggctggccaggtgcggtggctcacacctgtaatcccagcacttgggaggccgaggcaggcagatcatgaggtcaggagttcgagacgagcctggccaatatggtaaaaccccgtctctactaaaaatacaaaaaaattagcccggcatggtggcaggcacctgtaatcccagctactcgggaggctgaggcaggagcatcagtcaaacctaggaggcggaggttgcagtgagccgagattgcaacactgcactctagcctgggtgacagagcaagactgcatctcaaaaaaaaaagaaaaaaaaaaagaatatacaaagcctatttatgatttttaaaatttgaattcaaggaaagtattgttgcttctcttaaaagttttcgcttaagaacatgttttcatcttcattttccctcattcatcctgaggccttcagccctcccatagcaagagaatataaaagaggtgggacagaaagagtgaacagggcatcccaacaaagatgcgttttccattttcctctgtatcttgcagcctctgttactactgggagagagaggaagctaatcaaaagtggaatgaatttgtactgtttatagggcctcctctttcccacaccctttacatacctcaccttacttaattccatgacaatatagtgaagtctatatttttattccgatattacagacacgtatactaaagggctcagagagtaagtaacctgttcag

SEQ ID NO: 721716 - DNA, 1026 bp, Homo sapiens
catcaaaaccgctccataagtcctgccactccacgtgcaatgccatgaacttgaagaaactgctggtaagagaaagcaaatgctgtgaccaggcaagtaagtgttgtcaaagtgttgtaaaactaccctgaacttttggatccagagtactttccttccttccccttccctcgtcctctcttttctttgagtataagtggccacagcaacacatttccaaagcttaaacttagaacttttatctgggaagtttgtttggacagtattcaaatataagtgataaaaatatacaaaggctggccaggtgcggtggctcacacctgtaatcccagcacttgggaggccgaggcaggcagatcatgaggtcaggagttcgagaygagcctggccaatatggtaaaaccccgtctctactaaaaatacaaaaaaattagcccggcatggtggcaggcacctgtaatcccagctactcgggaggctgaggcaggagcatcagtcaaacctaggaggcggaggttgcagtgagccgagattgcaacactgcactctagcctgggtgacagagcaagactgcatctcaaaaaaaaaagaaaaaaaaaaagaatatacaaagcctatttatgatttttaaaatttgaattcaaggaaagtattgttgcttctcttaaaagttttcgcttaagaacatgttttcatcttcattttccctcattcatcctgaggccttcagccctcccatagcaagagaatataaaagaggtgggacagaaagagtgaacagggcatcccaacaaagatgcgttttccattttcctctgtatcttgcagcctctgttactactgggagagagaggaagctaatcaaaagtggaatgaatttgtactgtttatagggcctcctctttcccacaccctttacatacctcaccttacttaattccatgacaatatagtgaagtctatatttttattccgatattacagacacgtatactaaagggctcagagagtaagtaacctgttcag

SEQ ID NO: 721717 - DNA, 1026 bp, Homo sapiens
catcaaaaccgctccataagtcctgccactccacgtgcaatgccatgaacttgaagaaactgctggtaagagaaagcaaatgctgtgaccaggcaagtaagtgttgtcaaagtgttgtaaaactaccctgaacttttggatccagagtactttccttccttccccttccctcgtcctctcttttctttgagtataagtggccacagcaacacatttccaaagcttaaacttagaacttttatctgggaagtttgtttggacagtattcaaatataagtgataaaaatatacaaaggctggccaggtgcggtggctcacacctgtaatcccagcacttgggaggccgaggcaggcagatcatgaggtcaggagttcgagacgagcctggccaatatggtaaaaccccgtctctactaaaaatacaaaaaaattagcccggcatggtggcaggcacctgtaatcccagctactcgggaggctgaggcaggagcatcagtcaaacctaggaggcggaggttgcagtgagccgagattgcaacactgcactctagcctgggtgacagagcaagactgcatctcaaaaaaaaaagaaaaaaaaaaagaatatacaaagcctatttatgatttttaaaatttgaattcaaggaaagtattgttgcttctcttaaaagttttcgcttaagaacatgttttcatcttcattttccctcattcatcctgaggccttcagccctcccatagcaagagaatataaaagaggtgggacagaaagagtgaacagggcatccyaacaaagatgcgttttccattttcctctgtatcttgcagcctctgttactactgggagagagaggaagctaatcaaaagtggaatgaatttgtactgtttatagggcctcctctttcccacaccctttacatacctcaccttacttaattccatgacaatatagtgaagtctatatttttattccgatattacagacacgtatactaaagggctcagagagtaagtaacctgttcag

SEQ ID NO: 721718 - DNA, 628 bp, Homo sapiens
tgaaggagggaggagttagtttggaggcacagtctaagaggagagaagtggagggtgaagaggaggggacagcaactgatctctttatggcatcttatacagagttggcaccttggcaattaggatatcggggaccaaaagctgatgcaccactttaacgagatactttgtaaatgtagggcagggtggaggtcagaaacacaggcaggacttccaaaggctgtgggcactgtccctgtgaggctcaagtgacaasgtgggagacaggattgggtggaggccacagttcttccatgttgaagaactctctagcatcctgaagactgcctacctagagaccaacccagcgatgctggtgctttcttggtagactccttggagaggcagtcgtgaggagtctttgtggtcagtggacaactggggactggaacatggggaagttgggtggttacaactgtaattaatagaccaatctgtggcccacatgagatccacctgaaagaattcttgcccagctctgtgccttcttcctaagatgtggcacccagaatggcaccaaacatgcctagtgaggtttggatcacgataagctggcttctctgctatgttttcagtagccttcctgata

SEQ ID NO: 721719 - DNA, 585 bp, Homo sapiens
ctctccttcccagctgcaaggtgcgtctttaatgtgcgacactgacaaggcgtttcagccatgcagctaattaatatcatgccgaggctcaatgtgacaggtccttcagactcataaatcagaaaccactaacaaatgtcgttccttttctgatctctttctcttgctttttaatatgttgatttactttcagtatgcataaccaaaaaagaaacaaaccaataaaaatactgatgaaaatgccgggtgccatggcttgaatgcgttttagactttccaagccagcaagacaacagccaggaaaacagcaaagaaaaaaaaatcacccttgcctttcagggtatggacataggaggaaaacaaaacatcagatagtggtctatcctttagagactatgagtcactccccaggggctgtatcaaaacagacctagttacctggagaatacaaaaaatggcctggccaaagttcaaacactagactgaccaaacaaaaggattcccagggaagaggcgctaatcaaagctctgacagcacgcagccctgatgaaaaaygactgtggagaattcccattaaggatatt

SEQ ID NO: 721720 - DNA, 665 bp, Homo sapiens
tcctacacatttatgggcttttcctctaggaatcccaacaggttcttatggtgaagctctgagaaatggctctgsggggaggaaggcaagagtgatcattatgaactacacccagtgtcttcgttataacataagctaaagaagaaaaagtttccaggaccttatcccagccatgggaaacacattcttctcagtccagccacctaaagttttgtacccctcttggagcctggaatgaatatggtgaacaggggtcaaggcttcagggaaataaattaaaaactctgtttccaggaaaagcaggagggaacaagggggacaataatctatactaattcctaacaattttattatttatattgctagaaatatttatgatgttcacaaccctgaatcatggcccaactaaaaaacagagattcatttagaagatgatagaatgtttctttttgtggtgaggcctggcagctcacgcatgtaatcctagcactttgggaggctgaggagggtggatccagagagttcaagatcagcctggtcaacatggtgaaaccctgtctctactagctatacaaaaattagccgggtgtggtggtgggtacctgtaatcccagctacttgggaggctgaggcaggagaatcatttgaacctgggaagcagaggt

SEQ ID NO: 721721 - DNA, 511 bp, Homo sapiens
tttttttttttttgagacagagtttcgctcttgttgcccaggctggagtgcaatggcacgatcttggtcaccgcaacctctgcctcccgggttcaagcaattctcctgcctcagcctcccgagtagctggtacaggcgtgcaccaccacgcccagctaattttgtatttttagtagagatggggtttctccacgttggtcaggctggtctcgaactcctgacctcaggttattgcccgcctctrccttccaaagtgctgggattataggcatgagccaccgcgcctggccccttaaatactgtttttttaagcatgacaacaatgaatcaataaatagaacttctcagctgagtgcagtggctcatgcttgtaatcccagtgcttttgggaggcaagcggggtggatttcctgagcccaggaatttgagactccatctacaaaaattttaaaattatttgagcatggcagcatatgtctgtggtcccagctacttgggaggctgaggcagg

SEQ ID NO: 721722 - DNA, 641 bp, Homo sapiens
caccatgttgaccaggctggtctcgaacttctaacctcaagtgatccgcctgcctcggcctcccaaagtgatgggattacaggtgtgagccaccgctcccagcccacagtgatccttttacagcaaagctactcctttgctctcaacccttcgtcatattctgtcacttcccaataaaatccaaaccttaccagatgatacatgatctgccttgatttccatctaatttctctcatttgctgtgctccagccacactggtcttgccctttctccatgccaaacaaatccccatttcagggycactgcacttgctgcttctcttctaggatagtttccctctagaaatccatgttgctccttctctcattaaatgatcagatatttatgtgcctccttagctaagaggccttccttatctaccctaactaagagaatccccatatcactcttatccttttatcctgatttatttttccataaaacttgccacattactgggcattatctatcatttagtaatgtgtatattgcttattgacagtcttccctactataatatgagctccatgaggcagagactttgttttgttcactgctgaattcccagcacctacaacaagcctactcactaaacatttgt

SEQ ID NO: 721723 - DNA, 878 bp, Homo sapiens
ttttttgagacggagtctcgctctgtcgcccaggctggagtgcagtggcgcgatctcggctcactgcaagctccgcctcccgggttcacgccattctcctgcctcagcctcccgagtagctgggactacaggcgcccgctaccacgaccggctaatttttttgtatttttagtagagacggggtttcaccgtgttagccaggatggtctcgatctcctgacctcgtgatccgcccgcctcggcctcccaaagtgctgggattacaggcgtgagccaccgcgcccggccctgatcatcaatttctaaagcccttcaaaatgcctataaacccccttagaaatttccttaagtgtatccatatgtcacttaatcctttaaataaattttccgttaagcaccatgtttaaaaatagctcttttcttttattgaaatacagtcattttgaaaactcytcacgggcattctgttttgtttatgtaaatagacttaatcttgttcatccattcgttcatccatttccatccgacatttacatgtcaagtcctgtgctaggcaattgcagactctactagttgatgtaagaactatcttgggaggcagttattctaactccatttaacggtgaagaagttgcgacccagagtagagagtgacttgctcaaggtggcacgagcagtaaatgatagacttggctccgaatccaagagatccggacccaggtaagagactctctcctctgccctttctctaggagagacatttgagaatttgaaaatgcacaggctcccaaacagatgtgttccatgacaacagccaagatatatcagcaaatagaactcatgccctgcagcatgttggaaagggtgggactggagtg

SEQ ID NO: 721724 - DNA, 1651 bp, Homo sapiens
cccagaccctattctagggcccggggacagaaacagaattaaaaacatattccttatctttcttgggcttatattattgaggagagagaaataaacaatttcaaaataaacaatgtcatacagtgctaaatgctataaataaaatcaaacagaataacaaaagagggagtagctggattgaagggaaaagctgcttcaggatgagttgtcatcttggaggaaagtaagcccatgtaaaggccctggggcagagtgagcttatttgataaagaggtaaaagggtcaggatatctgtagcaatagtggccacgggagggagaggtatgagacagaggaggtgagccctgttgccatggtgagggcatgaggatttgttctaagttccagatacctggaattaatgtcctctgaactggacaataactacgagccttcatatctcaatgctacagtctttaagcccctgttataagaactcggaggcttcagggatgacaggaaacaccagaacgctatggtggagcatatctaggtgmcttctcccaactcagaccctttgactgtacaaagacacaggtttcaaggctgagatccacaaaactctagcaaatactgcacagacaccaaccaatgacagcaggtgctgcctgtcaccctggagcaccaggcagcatttcaaagcactcttgctgtgccggcctctgattgctggttatagggaggtctggggtagtcccaaaagctgggatgtccaaggtagctggggtcagtcaggaggctcagggcagtggcaggaaaatattttcctccctgttagagcaacagtggggtatccaggctgaatatcagtggcgagaaggatgatcgcacagcaccaagacctgcggaacaaactttgttggagctgaatccagaaaaacaatctttttttaagccactctcctgcccctcatttaattattgtgcttttgggtgtacttggactactctgaaacattcagaactctgtcaaaaaaaaaaaaaaagaaagaaagacttctttcctcagcacctctctgacttgggcatcagtcttggcttcctgtctacttgctttcacttgctgtttgtggcagagatggcccccagcagatcccttccctcgggttcccttgctgtcaagtggaggctagggagcgagattatggccaatagaatgtgagcggaagtgatgtgaaccacagatctgagccttaggaacatcccacaggaccctgagctcttcccccggctgctgcagtagccttggaagccacgtgtgttctagaagtgtagctacagatggagaaggcccatgtgctagctagtctccaaagatggtgtattaggccatccttgcattgctataaagaaatatctgagacaaggtaatttataaagaaaagagtttgaattgtctcatggttttgcgggctttacaagaagcatggtgctggcatctgcttggcttctaaggaggcctcaggaagcttacaatcatgagcaggcacatcacgtggccaaaacaggaacaagcaagagagagtcggtgggtgtggggagggacatgccacacacttttaaataaccagatctcacaagaactcactatctcgaagacagcaccaagcca

SEQ ID NO: 721725 - DNA, 995 bp, Homo sapiens
cccagctaatttttgtatttttactagagacgagctttcactatattggccaggctggtctccaactcctgagcttaagtgatccacctgcatcagcctccccaagtgctggggttccaggtgcgagccactgagcctgggcgtgtttatccttttgggatttattgatttcactgacgagaatgtcttcaaggttcatccatgctgcggcctgcgtcagaagtgcctgtttgtttttgtttttttttttttggtttggttttattttgttttgttttgcgttttcatggaccctcactctgtcgcacaggctggagtgcagtggcacaatgtgtgctcactgcaaacaccacctcctgggttcgagcgattcttgtgcctcagcctcctgagtagctgagattacaggtgcgtgccaccacaccagctartttttgtatttttagtagagatggggtttgccatgttggccaagctggtcttgaactcctgacctcaggtgatccacctgcctcaactttccaaagtggtaggattacagacgtgagccactgtgcccagcccaaggatgagtatattttctatagacttttgatgataatcctttgacagcaaatatattgtgaatatatatatatatatatatatatatatatatatatatatatggagagagagagagagagagagagagagagagcatgtgagagagagagaaagagagtctccctttgtcactcaggctggagtgcagtggcacaatcatagcatgccatggccttgaatttctgggctcaaacaatcctctcaactcagcctcctgagtagctgggactacaggcatgtactaccatgcccggctaactttttattatatttttttgtagagatgaggtctgactttgttgcccgggctggtcttaaactcctggctgaatgtgatcctcctgccttggcctccccaagtgctgggattacaggggtgagccattgca

SEQ ID NO: 721726 - DNA, 750 bp, Homo sapiens
taccttagcaaagctataaggatttgtttccaaaaattatgatatttcacttgcaacactaaaattaagtttgtgtcactctttccattatatagccgtaatgtcaggagtttgtcactggctgcagaaatgtgtttgctgttccctgaaagcaggcctttacaggccctcttcttaaatgtatttttctaaaaatcacctacagccattatttcatggggcaagcattacaagccatcacaatacttcacaaaggaaacctgaatttgatctcatcattccagacccttcaatggtttgaaatggaaacatcctcctaagaggacacgtcttatgctatggccaaacttgacgtttgcctttgagcttcctaagcamgactatctactgctctccttttttaaagtaacagagtcaattcctgtcatctagaatcagaggccagagttgcaaggaacttcagtgataatcctgaacaataatccttcttcaaatatatggaaaatgaaaaggcagaaaagtcatttgctgcaggacaggtagttgctagcagaacaaagactaggcaggcatagacatcctgagttcaagtctaggctactttctgtcaactaatctaatcatctttctgtcattgttctaatactatttcgtctccaagttggggctgcagactttacataagagtgagaagaacaacttctgctgagagtagatcagttatcatctccatgccttttttttcctggg

SEQ ID NO: 721727 - DNA, 639 bp, Homo sapiens
tgataaagaattttgagtgccattaaattttataaaacataattgcaagccacggccttsccttttttagaataatagaatatcaaggctaaaagagcttctggagatttaacagaatgaaaataggaaaccataagcttaaaacctagcattagaaattatatcacatataaatggactaagcatgacatattaaagaaagatagtaaaaagcgaatgaaaaccagatctcaattaggttgtttataacagataaactttaactataaaaacacaaaaaatattcaaagtaaacaagataagtggggttatatcatgtaaacactaactccaaaaaagctgatgtagatgtattaatatcagataattaatattctaagtcaagaagcatcaataaagaaaagtatcacataataataacaggaaaattccaacaatcctaaaattacataaaaccaataacataaaccaaagctgacaaagaaaaataagatatatccacatgattgagattttaacatagctgcctcaatagaataagagaaaaatcaacagagatatagaatatttaaataataagattaacttacattaactaattcacatatatcaaacattacactcaacaattacaaaata

SEQ ID NO: 721728 - DNA, 639 bp, Homo sapiens
tgataaagaattttgagtgccattaaattttataaaacataattgcaagccacggccttgcyttttttagaataatagaatatcaaggctaaaagagcttctggagatttaacagaatgaaaataggaaaccataagcttaaaacctagcattagaaattatatcacatataaatggactaagcatgacatattaaagaaagatagtaaaaagcgaatgaaaaccagatctcaattaggttgtttataacagataaactttaactataaaaacacaaaaaatattcaaagtaaacaagataagtggggttatatcatgtaaacactaactccaaaaaagctgatgtagatgtattaatatcagataattaatattctaagtcaagaagcatcaataaagaaaagtatcacataataataacaggaaaattccaacaatcctaaaattacataaaaccaataacataaaccaaagctgacaaagaaaaataagatatatccacatgattgagattttaacatagctgcctcaatagaataagagaaaaatcaacagagatatagaatatttaaataataagattaacttacattaactaattcacatatatcaaacattacactcaacaattacaaaata

SEQ ID NO: 721729 - DNA, 701 bp, Homo sapiens
ccgatttttcccattttagaagtgaaaaacttatactttcactactaattaactaaataacagaaaaatgcccatgtaaaaaatgagagtattaaaatatctaaattttacagcactattatgaattttaatttttatattaagcacatgttcaactcttatacgatgaaaatacacacaaagaaaacataaaccaatgaaaaattttcatttgcttctgaagattctaaggccatgttattaatatayacatagtgaagacataatgaattttattgtaaaggaagactagtagaatgtcctgtgtagcataaaaatcgtaaagcaaaaactttcccacattattttaagcagaaaactcaaccaaatttctgaaatctagataagacttccaattcaacaaaagccatggaacaaatggctgctgaataaattccacgaaaaaaagtatttttccccattcaacaagatagtattagaaaatctacagcctacaattattcaagagattttataattaagtttctagaaaattactagcaatgtggtttaaccaatttctcactaacattaaaaaataattccccaatcatatgagcaggaacacaaaagacaaccacctatctctccagaactgaactacacttgagttctaaaattttcaagcttatacctagtcagttctaactagaagtttccaa

SEQ ID NO: 721730 - DNA, 1669 bp, Homo sapiens
tctattttccttttgttatatttagggatgctattgaattttgctggttaattttgtaacttgcctctattgacttttaggtgtagtcatatttcaatagatatgttttctcttcctttttggtagttatatgtctctttgctacccactcccacccacccttcatacgttcattgccttgaatgccaagaataatattaagtaatagagaagtaatacagatatttcagtgtaatttttaatttatggaattgtttttaatatttcatattaaatattctattgacttgattaaaatatcctttttcatttaaagatattgttctagtctactaggagtttggtctattaaaataacttgcattttatttcatggaatatcttattaggttttgtttttcaaatttgtcattgaaataaaccctgattagtcgtggtatagtcttgtttaaatgtactgcatcattttatttgctcatattatagttgttatagttatttttacaactgtaattataaattgattagagttttccatgtttatattacttttgttaattttttagtagcagtgttcatagttgaattgaaaaacttttcctctttttcttggttatgtaaaatgttgaataaataacatgaactacttattccttgaaattctgaaaaatattctcataaaacatctaggcctagaattttctttggagatttctttttaacattttctacttttcttttaagtcagttttgccataaaatagttttcctaawtaatttttaaagagaagaaaactcttacagaattgtatatctcatgagattttcaaatctcattgacttcatatacatattttatttttagttcttccatttatttgctgttatagatcccatatttaattttgcatatttgttttctcttttttgttcttcaattttacttgctagtggtttttctatttattgctctacctcccccaataatccagtttttggatttgtcaattctgctgcttttcaatatgcctattaattcattttgcttttacccttattatctctcctttcctgttattcttatgccttttcttttgtttgttttttggtatcttttaacttgaatacttcacttaacaaatttttatttaatgataatggtacttttggctatgaatatatttctagaaatagctttattcatcccataagtttgtgcttttagaactctgtcattattttctaaatattcaacatttatattattttctagctgatctgtgtttatatatcattcttaactgcacatattctcttagagtcctagagtgtaatgaagctgggaaagggagagaactcagcctttatcactgccattggaaaattctatgtgatgggtaggtgctaggagagtcaagtgtgagcagtagaatggataagggcaatgattcttcaactcagggagcttaatatttttacatatttaagaaataatagattattattttcccttttagattttacttaaaaaaccagtggtttctcataaaattttatatctgattaacgtaaagcaatgtttctaaaactccttgataggagttggaagactgctaaaatctgagaaacactgaatcatagaaatttgtatgagtatgtacctgagtca

SEQ ID NO: 721731 - DNA, 1320 bp, Homo sapiens
tgcttataaatcatctctctgtctctagttgttctttgccctgttctttttcctgttgcgttgtaggtccttttcttattgaattgcaaaacttttaaaaatatattcagtaaattagctctgtctcctatacatatgagtttatgtgtgtgtacatgtgagakggtggagaaataaaaataaaatcctaagcccctcaaccaactgaatggatccctcttggccattgggacaccagagaaaccttgaaaaccgagttcccagccatgatggggtgggagatcagaacaactcattctactctctccctcgccaaccaccattaggcttcttccctaagtgttaaacagaaaccagcccttttgaaagactggctccgcaactgatatcaatcaactgcctgatgctgcctctccctttttgcggtctcaacacaactgaccagcattctctcctgataagataccactgaccaaggagtgattctggccagtctacaggggctgcacacaaagggccttcatgtcctctacttcacctgttgaagtcagagggccagaaaccccaccctcagatccatgaggaggcacgaagctcagttgcacatgtgcatgtttctcctttaataaatatttatgactcctctgatagcttattaattatgtatatccagccacctcactcagcataaattcctattcctgttacccctcccatgaagtgcctgttactggcttctgaccggaggctacgcttcccagcctgtcagaatggccacactgcaagctgcaaacctttaggagaaatgaagctctcctttccaaatttatgaaccttatcattctttagttgataatgtgtataaaatatattccttagatttttatttgtattttgtgccaggcatggtggctcacacctgtaatcccagcattgtgggaggccaaggtgggtggttcacctgaggtcaggagatggagaccagcttggccaacatggtgaaaccctgtctctactaaatatacaaaaattagcccagcatggtggcacacacctgtagtcccagctactagggaggctgaggcaggaggatcgcttgaacctgagaggtggaggttacagtgagccaagatcacgccactgcactgcagcctgggcaacagagtaagactctgtctcaaaaaaaaaaaattatttgtattttgaatatctctgtggtaattctttgctatgcagaaatctaaatattttacgtagttaaacttattggtcttttcttttgctgcttctaattttgtcatagatggactaagaaagtca

SEQ ID NO: 721732 - DNA, 955 bp, Homo sapiens
gctcagataaattaaaaagcctccctgtgattgtgttcatagtacttgctgytcgctgctgggatctgtaatttgggcccttcccaaaagtccgtactgtctggatttcctgttcaaaggttgaagctgtcactggccccactgcaaactgcacatagtctcttcttgggcccctgacagtacagaaaattatcttaaatcacaagcagatgggtacctggtatcagcaaatagcaaaaactactgtttcccattgtttttaatattgtcactaactgaatgcttttgggtatgtggatagaagtgatcttttagaatttgaatttagtaagtcaaataagaggaacttactttattacacataaggaagataaagaattggacataaaaatgctcaataaaagagttagcaccaatagcatatttatcctttctttctcaagtcagtacagagactcattgagaaattttatggacttgccattggcttctgcattcatttaagttttatcaaaaccagagagaacataaactttgcacggccgttcagagccttcattgaaaaggagaaagcattttcaaccccatcaactctttagccataattaaaaagttagtaaaaagaaagattttgctaccaccccaaggatatcacagtgatcccagtccagatatgaaaccttgttcccacacccctcacacaacgaattgcctctgggtggtgtgaggcagagggactcttaatgtcaggatcggatgattattatgctctgataactccagccagccctattccaattccatttctgtaggaatctatggagctcatctgaggaactaggccactgggtctgtgactccattaggcttttttgatgtttatcagcagactttggtgacttgatgattaaaatgtgcagctgcagaacacctgggctgtgcattcctcaaaagc

SEQ ID NO: 721733 - DNA, 955 bp, Homo sapiens
gctcagataaattaaaaagcctccctgtgattgtgttcatagtacttgctgctcgctgctgggatctgtaatttgggcccttcccaaaagtccgtactgtstggatttcctgttcaaaggttgaagctgtcactggccccactgcaaactgcacatagtctcttcttgggcccctgacagtacagaaaattatcttaaatcacaagcagatgggtacctggtatcagcaaatagcaaaaactactgtttcccattgtttttaatattgtcactaactgaatgcttttgggtatgtggatagaagtgatcttttagaatttgaatttagtaagtcaaataagaggaacttactttattacacataaggaagataaagaattggacataaaaatgctcaataaaagagttagcaccaatagcatatttatcctttctttctcaagtcagtacagagactcattgagaaattttatggacttgccattggcttctgcattcatttaagttttatcaaaaccagagagaacataaactttgcacggccgttcagagccttcattgaaaaggagaaagcattttcaaccccatcaactctttagccataattaaaaagttagtaaaaagaaagattttgctaccaccccaaggatatcacagtgatcccagtccagatatgaaaccttgttcccacacccctcacacaacgaattgcctctgggtggtgtgaggcagagggactcttaatgtcaggatcggatgattattatgctctgataactccagccagccctattccaattccatttctgtaggaatctatggagctcatctgaggaactaggccactgggtctgtgactccattaggcttttttgatgtttatcagcagactttggtgacttgatgattaaaatgtgcagctgcagaacacctgggctgtgcattcctcaaaagc

SEQ ID NO: 721734 - DNA, 955 bp, Homo sapiens
gctcagataaattaaaaagcctccctgtgattgtgttcatagtacttgctgctcgctgctgggatctgtaatttgggcccttcccaaaagtccgtactgtctggatttcctgttcaaaggttgaagctgtcactggccccactgcaaactgcacatagtctcttcttgggcccctgacagtacagaaaattatcttaaatcacaagcagatgggtacctggtatcascaaatagcaaaaactactgtttcccattgtttttaatattgtcactaactgaatgcttttgggtatgtggatagaagtgatcttttagaatttgaatttagtaagtcaaataagaggaacttactttattacacataaggaagataaagaattggacataaaaatgctcaataaaagagttagcaccaatagcatatttatcctttctttctcaagtcagtacagagactcattgagaaattttatggacttgccattggcttctgcattcatttaagttttatcaaaaccagagagaacataaactttgcacggccgttcagagccttcattgaaaaggagaaagcattttcaaccccatcaactctttagccataattaaaaagttagtaaaaagaaagattttgctaccaccccaaggatatcacagtgatcccagtccagatatgaaaccttgttcccacacccctcacacaacgaattgcctctgggtggtgtgaggcagagggactcttaatgtcaggatcggatgattattatgctctgataactccagccagccctattccaattccatttctgtaggaatctatggagctcatctgaggaactaggccactgggtctgtgactccattaggcttttttgatgtttatcagcagactttggtgacttgatgattaaaatgtgcagctgcagaacacctgggctgtgcattcctcaaaagc

SEQ ID NO: 721735 - DNA, 2294 bp, Homo sapiens
gggttcccttgagaaaaaaatcagcataaatggggaatacgtttggcacaatgagccagatacagcaaaacatcttagtggggaaaactggtggttgaagacacagcctgaagaagtgtttgaagccataagactcagccctctggactgaggagagctgcctatggtctttgagaaagagaagactgtgtaataacctgaaacaacactattgcttctacccaaagttaatgaattttaaaatttaaagagctacatcaaaccaattcttctgaggagtaataactgtccctctacttccacacagaacaaaaaaagcaagattgagatggaggaaacgtttctgtcagataaaagagattaccttggatctgagacaggtagaatggtgatgaggtccaagcacaggtaatagagaaaaaacggccatggaccagttgtggcctaagaagagaacactgtagatggtgcaagaagtgtaaaagtgaggagcaaagtgatggatgccaacagcacaagtagatggcaggtacaaaagtaaaggtgcagggatacagagtggattttaaaatgtacattaatacatgcttatgttaataggtgctgtgtaccccatcctttctccccaaaagaagccctgtggttaaacaggattgtgaaacatgcacccataactccccttcaagattcacaacacatatttgagtccgaaaagttccacacagagaaacccaacatgaccacatttattttcccctggggcactcttatttgcagcatgctcactgtcacactgaggaacagattacatggcataccaggttaggaagtctttttcaaaaaaaaaatttctttttttttttttttgagacagagtcttgctgtgttgcccagctggagtgcaatggcatgatctcagctcactgcaacctccacctcctggactcaagtgattctcatgcttcagcctccccagtagctgggattacaggaccaagctkccacaccctgctaatttttgtatttttagtagagacagggtttcaccaagttggtcaggctggtctctaattcctgacctcaagtgatccacgcatctcagcatcccaaagtgctgggattacaggcatgggccactgcactcagcctaaagtttttcaagttttaaaactaccacaatatagcaagcaactcaatgtattaaacaatgataggttcttaagaaatgtttcatgaatattcaaaagctttaaagtcaatacatgttctaatttttctagaaataaaattgttactaattcacatggaaatactttatacccaaaatagtttaagctacacattttaaaaacatagttcttactactagctctaaaatattcataaaaagggaaggtaagtattcaagccacaaaacgttatagtttctttgataatagcaatgtgcttttttcagtgtcacaaattagtagttttcatttgttagatacagctgcatatttcataatttatatttgtgcaacaaagtctggcatttcagagaagtttcccttatctacagttatttctatgttttaaaaaattggagaagaaacagatgttgaataatgaaatttattttaaactattttagaagtatttggcagcaactactagagtattagtaagagaacagtgcttgtaaaaatggcaagtttattttgcatgtactttcttggaagaaaaataatttaaaatgaaacaaagaagtattatcaaatgtgtatcatagaaacatttattaataaggaaaacaactttcagtaaacactgtatttcatcatcatgagtttgagtccataaaactctgtgcatccattcatagatacaatatattgaagaaaaaactacaaattctttctgctttttgtaatatgtggcttttaaaaataagcctggtgattttatccttttttccctacctttgaatttatactacagctttcaaattaaccctacttcagaaaatagactaattcatgacccaatattcttctgcaatgatttctgaaagattttgtggtttgaataataattcaagtttctggaactatctggccattttgcatatgttcatttcattcttggtcaacgtatgtttctacatcattaatataattttaaagtatccacaaggctatttttgtggctatcttaagagataattccaataaataggaggtggttatatttcaaatgatttgggataaattaatagttggcttaacccaaaattgtacaattttttaaaatta

SEQ ID NO: 721736 - DNA, 609 bp, Homo sapiens
ttcttgattttttgtactggctaggacatagcatcatgaagtaatgagggaagacaccctaccttgttcccagttttagggtgacagccttcagcgttttactattatataggatgtgagttyttaaaaataaatgccttttattatatttaaacaattcctatctattcctaatttgctaagaattttgaattatgactgggtgtttaatattgttaaatatagtttaaaaaatctattgagattactgtattatatcttaatttttatgctgagatacattgtatcagtatatcaattaaatatattgagatgactgcattatatcttttttttttttgcagtcttcctttcattaccagtagtatgctgtatcagtttctaggaaagccataacaaagtcctacagactgagtggcttaaacaatggaaatttatattcttttaattctggagtctagaagtctgacatcagtgtgtcagcatgattagtttcttttgaggcttctcttcttgactgatagattggtgagttctctttcttattacatgtattccctctgtgtatatctgtgattttatctttttataagaacatcagtcatatta

SEQ ID NO: 721737 - DNA, 809 bp, Homo sapiens
attttaataaaaaaggatttatgtcaggaaagagtcatttacaaaccttgaagtgtttttgcctggatcagagtaagaatgtcttaagaagaggtttgtaaggtcttcataacaaagtggtgtttgttatttacaaaaaaaaaaaaaaaaaaaaaattaacaggttgtctgtatactattaaaaattttggaccaaaattgctacctatcatctatctttttgattgcagggaatccctgccaaggtaacytgacagtcggcctaattctgttgacagaaaatgaagccttgacggttctaattatccaaaagtgggttttcatcaggacgtacagtcagagtgtgagtgcattctaatgaaaacttcagccctcattcaattgcatataaaagccctcaaagagaacatacagtacagcagttttgtaaaaggcaacaatacgatttgtacagaccccgacactccaatcctatagatcaccacgttgctcctctgtccccagcaccccttatttcttaagcagcaccaccagtccccagaggacaagagcagctatatctcatccacctatgcatttctgcaccagcgatgcaaaaaacaccctgggtgggccacagagaaaaccgtaactatggatacccaaggggcagagcagccagctggacctgctctgtaattcacttacttacttaccagagggtggttcaagtcaaacaaacaaaaccaaagacagttgcaacccatggtggatccaaaggtacagtatcaaaatcatggaactcttgcccaaagaaaagactgcaaata

SEQ ID NO: 721738 - DNA, 2123 bp, Homo sapiens
ggcctcaggtagcttttactcatggcaggaggtaaagcaggagcaggcatcttcacatagtaagagagggagcaggatagggaggagccacactcttaaacaatcataacttgtgtgaactaccagaaggagactcagttactaccaaagggatggcgcttagccacttacgagggatccactcccatgatccaaaccccgcctccactccttgcccccaggcctcacctccaacactgcggattacagttcaacataagatttggaggggacaaacattcaaatcatatcagtactttattggtatagtttattttctttttcattgtagttagacaaggcagattgtttttattatttgaaattcattgaggtttttcatgcatatatagtatktaagaatgtaatggaacaatcaataaaatgaaaatgaattagttatagatgccaataaatttgagaattgagtatgagacaaaggtatgagacaaatagttcaagcccatctgaaaaacaatcattgctcaatataaggtgctggcaccactgactctctatccagaagaaaataaaactggatccttcccttcctgatagaatagtcactgtgggccaaggagaacaaggagacagctgtataaatggaggacaaggataacaacgtatttgacagaataacggatgggagagacagaaacacacagtcatgaagaggagaggtactgggccacattcgtctatctgctagaggaaaaaatgtctgtttagggaccagactgtaagtatcaaaaagggaagaaattgctgtagatcgggtggccacacataccagtttcctgggtcaatcctcacgtgtacctgctgtgtcagtattcagtggagttggtgccctgtttgactttccaaagtgtcttggtgaagacaacaaattgtgctgtcacccttcctatgaaacatcttcctggagagtgtggtccaaactccaggtgaaggcaatgaccttaaacagtaagaggggcatcttgtcttccaatatatgaaagaaaaaaaatggcagaagtgatgctgaagtcttcagtataggatgcccaagactccacagtcagctttagctccttgttcagtgggaagagaacaggctgaggcatgccctacctgtaacattcttcaaaacatgtcaggagcttccacagtgtaaaacttccaccctttcccatcggggttttggggaggcaactgaagaaagaatgctattgtgctctgtgagcacctatcttgatatagaacaaggatcaaagttaattttctgaaatagtaaatgttagtcattacgccaggtagattaattccaaatcaagagacatatgacttgataagaaggaggcaaaaggaagaattaaagataacagggacagacatggcttataatttatcccaggactcaagaggtgggataccaaatctattcctttttttagcaactcctttaatgagaatgccctagatcctgaccctctagcaatattacagactagttaatgcatacaaataaaatgtttcaaaaatcagtgaggggatatagctggtgttgtaaggggtagaactggaaaaaaactggctctatggtaatggaaatagaagccgcatgtaaagtttgaggatagtatgtaaggaagtgaagattgcgagggtacacaactctttcaagaccaacaggaaagaatgtgatagaaagtgaatggacaggagggtgcagtcagaaaagaaattttttttttttttttttgagatggagtctcattctattgcccaggttggagtgcagtggcgtgatttcagctcaccacaacctccgcctcctgggttcaagcgattctcctgcctcagccttctgagtagctgggattacaggcatgtgccaccatgcccagctaatttttgtatttttagtagagacatggtttcactatgttggccaggctggtctcgaactcctaacctcatgttcctcctgcctcagcctcctaaagtgctgggattacaggcgtgaggcaccgcacccagcgagagaaatttcttttacattagaaataactaagtgcatttaaatgtgaattgataag

SEQ ID NO: 721739 - DNA, 2123 bp, Homo sapiens
ggcctcaggtagcttttactcatggcaggaggtaaagcaggagcaggcatcttcacatagtaagagagggagcaggatagggaggagccacactcttaaacaatcataacttgtgtgaactaccagaaggagactcagttactaccaaagggatggcgcttagccacttacgagggatccactcccatgatccaaaccccgcctccactccttgcccccaggcctcacctccaacactgcggattacagttcaacataagatttggaggggacaaacattcaaatcatatcagtactttattggtatagtttattttctttttcattgtagttagacaaggcagattgtttttattatttgaaattcattgaggtttttcatgcatatatagtatttaagaaygtaatggaacaatcaataaaatgaaaatgaattagttatagatgccaataaatttgagaattgagtatgagacaaaggtatgagacaaatagttcaagcccatctgaaaaacaatcattgctcaatataaggtgctggcaccactgactctctatccagaagaaaataaaactggatccttcccttcctgatagaatagtcactgtgggccaaggagaacaaggagacagctgtataaatggaggacaaggataacaacgtatttgacagaataacggatgggagagacagaaacacacagtcatgaagaggagaggtactgggccacattcgtctatctgctagaggaaaaaatgtctgtttagggaccagactgtaagtatcaaaaagggaagaaattgctgtagatcgggtggccacacataccagtttcctgggtcaatcctcacgtgtacctgctgtgtcagtattcagtggagttggtgccctgtttgactttccaaagtgtcttggtgaagacaacaaattgtgctgtcacccttcctatgaaacatcttcctggagagtgtggtccaaactccaggtgaaggcaatgaccttaaacagtaagaggggcatcttgtcttccaatatatgaaagaaaaaaaatggcagaagtgatgctgaagtcttcagtataggatgcccaagactccacagtcagctttagctccttgttcagtgggaagagaacaggctgaggcatgccctacctgtaacattcttcaaaacatgtcaggagcttccacagtgtaaaacttccaccctttcccatcggggttttggggaggcaactgaagaaagaatgctattgtgctctgtgagcacctatcttgatatagaacaaggatcaaagttaattttctgaaatagtaaatgttagtcattacgccaggtagattaattccaaatcaagagacatatgacttgataagaaggaggcaaaaggaagaattaaagataacagggacagacatggcttataatttatcccaggactcaagaggtgggataccaaatctattcctttttttagcaactcctttaatgagaatgccctagatcctgaccctctagcaatattacagactagttaatgcatacaaataaaatgtttcaaaaatcagtgaggggatatagctggtgttgtaaggggtagaactggaaaaaaactggctctatggtaatggaaatagaagccgcatgtaaagtttgaggatagtatgtaaggaagtgaagattgcgagggtacacaactctttcaagaccaacaggaaagaatgtgatagaaagtgaatggacaggagggtgcagtcagaaaagaaattttttttttttttttttgagatggagtctcattctattgcccaggttggagtgcagtggcgtgatttcagctcaccacaacctccgcctcctgggttcaagcgattctcctgcctcagccttctgagtagctgggattacaggcatgtgccaccatgcccagctaatttttgtatttttagtagagacatggtttcactatgttggccaggctggtctcgaactcctaacctcatgttcctcctgcctcagcctcctaaagtgctgggattacaggcgtgaggcaccgcacccagcgagagaaatttcttttacattagaaataactaagtgcatttaaatgtgaattgataag

SEQ ID NO: 721740 - DNA, 764 bp, Homo sapiens
ttcatgctcaagagacatctattggatctcagggaagtatggtaggaaaagtgcagggcagtgcactgcaggccatccagcctgttgatgagatggagaaaggcctggagcccagctctcctgatgtccrgtgtaaagcttttctcatttcactatgctgcttgcccagatgacaaagctcaaatgaaatgtaggaacaggacacagtgcaacaggtcagagggggccaagagattcctccatgagccaacaacctatgtagggagccaacgagcacctgcttgagccctgaccccagccctttttgaggaactctcccttatgcaagtcgcatcccctccctaaacctcagtttctccatctgtacaatgtgtgtataggaccagaggatctcagagatttctgtctgctctaattgtttccaatacagtgactgactagaaaaaagcaattataatcaacaggacaacctctcattagcccctgtagataatccaaaatgcttggtgcaagcggttggctgggtaagatactagagggaacctccttagcaaagagaagagagaaatgtgtcactagttggcactgcctgatgccatgtcatttttgtctcaaatggaaaagaaaagggaaaaaagttgcattcagttacaggatagactgcccatctatccattcctgggaggtttgctgcagaggagttcacaccagcacagcagaccaggaccttggtggtaatacaaattcagggattaattctgatc

SEQ ID NO: 721741 - DNA, 637 bp, Homo sapiens
atacatatacaatcagttgactttcaacacaggtgcctcggcaatctagtggtggaaagatagtattttcaacaaataatgttggaaaaatgggctattcatatccaaagaattaataccttttgtccatacttaataaaataaaaattaggttaaaattgattaaagatcaaaatataaaacccaaaactataaaacttctagaagaaagcatatcagaaaatctttktgaccctgagttaggcaaaaagatctttgatatgacaccaaaaccattatccatataagaaaatatggataaattggacttcataaaaattaagaacttttgctctttgaaaggcattgttaaaggaatctaaaaatgcacagagttagagagaatattttcacaacacatatttgatatagtacttttatccagaatacgtaaagaactattaaagcttgataacaagcaaacaaagagcctgattaaagaatgggcacatgctcaaaactgatgctacaactatctcaaaataagatgcttagttttgagaaagggcgaaaaagtttgaatagatgcttgaacaaagacaatatacagacggcaaataagcaatgaagagatgctcaacatcattagccattaaga

SEQ ID NO: 721742 - DNA, 637 bp, Homo sapiens
atacatatacaatcagttgactttcaacacaggtgcctcggcaatctagtggtggaaagatagtattttcaacaaataatgttggaaaaatgggctattcatatccaaagaattaataccttttgtccatacttaataaaataaaaattaggttaaaattgattaaagatcaaaatataaaacccaaaactataaaacttctagaagaaagcatatcagaaaatctttgtgaccctgagttaggcaaaaagatctttgatatgacaccaaaaccattatccatataagaaaatatggataaattggacttcataaaaattaagaacttttgctctttgaaaggcattgttaaaggaatctaaaaatgcacagagttagagagaatattttcacaacacatatttgatatagtacttttatccagaatacgtaaagaactattaaagcttgataacaagcaaacaaagagcctgattaaagaatgggcacatgctcaaaactgatgctacaactatctcaaaataagatgcttagttttgagaaagggckaaaaagtttgaatagatgcttgaacaaagacaatatacagacggcaaataagcaatgaagagatgctcaacatcattagccattaaga

SEQ ID NO: 721743 - DNA, 652 bp, Homo sapiens
gtgcaaatacttccagcataagagtttaagctatcaatgttacatcattaagctagaatagggaagaaatggacagtatgctattgcacagtatttccataagacagataaaatagaggtagagcacaggtgatatgctcaagagcagaggtaatagtaaaatgtaataagatatttaggaaatgatgggttttgagtatttaattatttcatttttagtatgatctctttaattataagtttayataatttaaaatttaataatgtctgtatttaaaaactggctagcagaattccggaaaacttaataatcagctttcatgaattggtacaaggtgactccagcatgacattggttttatcttatgaataaaagatttatataacattgaaaattgaacaatataatatattaacagaattagaaaaaccacatagcaatcttattaaatgactaaataatctgatacaactcattattcatttataatagaaactctcagaaatccaacattaaaaggcagccttctcgatttgacaaagagtgtctataaaaatcctatagctagtatcacagttaattgtggaaaatgatgatgagatactgttagggcatgaataaatttgcaataatgttaacagatcaggccaa

SEQ ID NO: 721744 - DNA, 1570 bp, Homo sapiens
gtccatctccaaatatagtcatattgtgggggggcaggaattcaactcaggaattttggggagcacaatttagttcttaacacctctgtagtcagacaaatctggattcaaattcctactagctaagtgacttcaggcaagttattaaattccatcagttgtagttttctaatctacaaaatagaaacaacgaaactgaacttttagaggtccttgtaacaattaaataagataaattatagcaccccaaaatttagctagaaatatattgaatatctcaaaattataatgacttccttcagtctttttcagtcaatataacaaaaattcctttcccatttcttgaaaaagatgcttgtctaataggttcatgttttctttcattgattcaacagttgttagttgcttccttactatatgccaggcactatgctaggtacagtctatacagtgctatgtgaaaaatttctgcgctcatgcagcttacagattaaatgggggaattgacatgcaactaatgaacaagccgatcacatgcaatttgttgccggataggagcaattttagaaaaggttggtttattatgtctgaaaggacattaatatatgaggaatggaggagagggaaagcctcatttttaattgcccttatttttcctccctagactttcttagattctttgtaattcatccaggttttagaaaataaaatccataccaaaggttaaaatacttcaggtatcagttataataagtaaaatgaaaaattctaaagtcccaggatttttataactcatacatctgaactaaagaaggagagctcttgttgcccactgagtaatcgactcacagacagaccagattttcaaacagattattattcaatggtttaaatcaaagaacactaagcctaaaataggtacttacttgaagaatcttctcatgtcagagaaaagactacaatggcctaataatacaaataatatgatggccaagagtacaaatatttaaaccataatacgtaattttaatttcaaaaattctgtgtgcattgcagaagtatccatctctaagtaagtgatacatamaacgtttgtttaagaatatctgttaaagtccatacaaacacaagaattccttattttattgtgctttgatttatgaagttttagatatgttttttacaaaggtttgtgacaaccctggatcaagcaagtctgttggtaccattgtccaacagcatgtgctcactttctgtctctgtcacattttgataagtctcgcaatattttaaatcttttcattattattataacttttatggtaatctgtgatcagtaatctttgatgttactattgtaattgtattggggtaccacaaacaatcatacatataagatggcaaacttgattgatcaatgttatgggtgccctgactgctcctttaaccggccattaccccatctctctccctctctttgggcctccctattccctgagacacaacattattgaaattaggccagggaatgtgcctacaaaggcctctaagtattcaagtgaaaagaaga

SEQ ID NO: 721745 - DNA, 1570 bp, Homo sapiens
gtccatctccaaatatagtcatattgtgggggggcaggaattcaactcaggaattttggggagcacaatttagttcttaacacctctgtagtcagacaaatctggattcaaattcctactagctaagtgacttcaggcaagttattaaattccatcagttgtagttttctaatctacaaaatagaaacaacgaaactgaacttttagaggtccttgtaacaattaaataagataaattatagcaccccaaaatttagctagaaatatattgaatatctcaaaattataatgacttccttcagtctttttcagtcaatataacaaaaattcctttcccatttcttgaaaaagatgcttgtctaataggttcatgttttctttcattgattcaacagttgttagttgcttccttactatatgccaggcactatgctaggtacagtctatacagtgctatgtgaaaaatttctgcgctcatgcagcttacagattaaatgggggaattgacatgcaactaatgaacaagccgatcacatgcaatttgttgccggataggagcaattttagaaaaggttggtttattatgtctgaaaggacattaatatatgaggaatggaggagagggaaagcctcatttttaattgcccttatttttcctccctagactttcttagattctttgtaattcatccaggttttagaaaataaaatccataccaaaggttaaaatacttcaggtatcagttataataagtaaaatgaaaaattctaaagtcccaggatttttataactcatacatctgaactaaagaaggagagctcttgttgcccactgagtaatcgactcacagacagaccagattttcaaacagattattattcaatggtttaaatcaaagaacactaagcctaaaataggtacttacttgaagaatcttctcatgtcagagaaaagactacaatggcctaataatacaaataatatgatggccaagagtacaaatatttaaaccataatacgtaattttaatttcaaaaattctgtgtgcattgcagaagtatccatctctaagtaagtgatacataaaacgtttgtttaagaatatctkttaaagtccatacaaacacaagaattccttattttattgtgctttgatttatgaagttttagatatgttttttacaaaggtttgtgacaaccctggatcaagcaagtctgttggtaccattgtccaacagcatgtgctcactttctgtctctgtcacattttgataagtctcgcaatattttaaatcttttcattattattataacttttatggtaatctgtgatcagtaatctttgatgttactattgtaattgtattggggtaccacaaacaatcatacatataagatggcaaacttgattgatcaatgttatgggtgccctgactgctcctttaaccggccattaccccatctctctccctctctttgggcctccctattccctgagacacaacattattgaaattaggccagggaatgtgcctacaaaggcctctaagtattcaagtgaaaagaaga

SEQ ID NO: 721746 - DNA, 1570 bp, Homo sapiens
gtccatctccaaatatagtcatattgtgggggggcaggaattcaactcaggaattttggggagcacaatttagttcttaacacctctgtagtcagacaaatctggattcaaattcctactagctaagtgacttcaggcaagttattaaattccatcagttgtagttttctaatctacaaaatagaaacaacgaaactgaacttttagaggtccttgtaacaattaaataagataaattatagcaccccaaaatttagctagaaatatattgaatatctcaaaattataatgacttccttcagtctttttcagtcaatataacaaaaattcctttcccatttcttgaaaaagatgcttgtctaataggttcatgttttctttcattgattcaacagttgttagttgcttccttactatatgccaggcactatgctaggtacagtctatacagtgctatgtgaaaaatttctgcgctcatgcagcttacagattaaatgggggaattgacatgcaactaatgaacaagccgatcacatgcaatttgttgccggataggagcaattttagaaaaggttggtttattatgtctgaaaggacattaatatatgaggaatggaggagagggaaagcctcatttttaattgcccttatttttcctccctagactttcttagattctttgtaattcatccaggttttagaaaataaaatccataccaaaggttaaaatacttcaggtatcagttataataagtaaaatgaaaaattctaaagtcccaggatttttataactcatacatctgaactaaagaaggagagctcttgttgcccactgagtaatcgactcacagacagaccagattttcaaacagattattattcaatggtttaaatcaaagaacactaagcctaaaataggtacttacttgaagaatcttctcatgtcagagaaaagactacaatggcctaataatacaaataatatgatggccaagagtacaaatatttaaaccataatacgtaattttaatttcaaaaattctgtgtgcattgcagaagtatccatctctaagtaagtgatacataaaacgtttgtttaagaatatctgttaaagtccatacaaacacaagaattccttattttattgtgctttgatttatgaagttttagatatgttttttacaaaggtttgtgacaaccctggatcaagcaagtctgttggyaccattgtccaacagcatgtgctcactttctgtctctgtcacattttgataagtctcgcaatattttaaatcttttcattattattataacttttatggtaatctgtgatcagtaatctttgatgttactattgtaattgtattggggtaccacaaacaatcatacatataagatggcaaacttgattgatcaatgttatgggtgccctgactgctcctttaaccggccattaccccatctctctccctctctttgggcctccctattccctgagacacaacattattgaaattaggccagggaatgtgcctacaaaggcctctaagtattcaagtgaaaagaaga

SEQ ID NO: 721747 - DNA, 819 bp, Homo sapiens
cagccttcatttaatcacctctgtgaaaactttataaggtaactcactggtttccagagattacgaccttctgtcttttgagggccatcactcaactcaacacagggtaaacctaggattaaacaggcagtctgtgtctcgggcctctgacatttaccgcaataatatacctcatctgcaatatgtaacttttgtctagctacaaagaaaacactatggataaaaatgttaacaaaatgctagactatgataaaatgcagrttagactaaaataaaaatacatatatatgtatatgtatacatatatattttgtgtgtgtgtgtgtgtgtgtgtgtgtatgctggacattttaaggaagggagagagaaaatgaaactggtatttttggagggttagttgtcctgtggtttggagtctggtgtaaatagacacctgagattggagtctaggacggcgagtaggaaactattacagtagtttattcacaaaatggtaagggcctgagccagggtaatggtgagaggagaggaaagcttgggcaggagaaatgaaagaaatgccaaaacctgtgactgagtgggtcagaaggacaacagagacagaaaaatgttcaccccttcaacaacatttataagcaccatctggatgccatccattgtttggatccaaatatggagagttaaatcacatttcttaacttcaaaaagtacatagtgtaatgaaaaatgagagcaaataaacaaatgcttaaaatagggtgtgatgagaactccatgcaggaacacagtataaaagcactgcatggaatgggtgtgtac

SEQ ID NO: 721748 - DNA, 854 bp, Homo sapiens
acagatgacacgggccactggtggggaacggtggctttgtcctagagtcagataatgccaggcaaaggaaagaatttggtgggtgaaccatgcacaggaagagcagaggagagttgtacatatgatgtgtgccacacagtatcagcttccagctctggaggagaccagaagcctctgatggtggtcctgcttgttactttctaggaagttatccattcatcagccaatagctttcccaaagacctatgcctggtagtgtccttgaaggcaataatgtcaaggtcaaagattacatataaggatgcgtccagctaaacctagggtaggattcaacagaaaagggaaggtaaaagactaaattrtaaacaggtaccactgcccttttcgcggagagagttttcagggggctcatgctctgttgtatccagggtttgtgatcttgacctggcaccatatggagaggatgcatcataaatagccatccaagctgctgttcaacacttcttaacccaggtcctaagtatgataactgccatgtgcattctgtcagaagtgtacgttttgctcacttttacaaacacctgcatccacatacccagaagtctttgattggtagaacaggatttaaaagtagatctcaaagctttacctggttgtgctgatagctttctgccaccacgggatgcccctcttcaacaattatcatatggaacctctttgtttgcaaataatagagaatcaaacactagaaaccctgaacaagcttaagcaaaaaggaacacttattataaacatactggggtatctcatcaaactgaacgacaggactgtattagcgacttgggtggaaataa

SEQ ID NO: 721749 - DNA, 854 bp, Homo sapiens
acagatgacacgggccactggtggggaacggtggctttgtcctagagtcagataatgccaggcaaaggaaagaatttggtgggtgaaccatgcacaggaagagcagaggagagttgtacatatgatgtgtgccacacagtatcagcttccagctctggaggagaccagaagcctctgatggtggtcctgcttgttactttctaggaagttatccattcatcagccaatagctttcccaaagacctatgcctggtagtgtccttgaaggcaataatgtcaaggtcaaagattacatataaggatgcgtccagctaaacctagggtaggattcaacagaaaagggaaggtaaaagactaaattataaacaggtaccactgcccttttcgcggagagagttttcagggggctcatgctctgttgtatccagggtttgtgatcttgacctggcaccatatggagaggatgcatcataaatagccatccargctgctgttcaacacttcttaacccaggtcctaagtatgataactgccatgtgcattctgtcagaagtgtacgttttgctcacttttacaaacacctgcatccacatacccagaagtctttgattggtagaacaggatttaaaagtagatctcaaagctttacctggttgtgctgatagctttctgccaccacgggatgcccctcttcaacaattatcatatggaacctctttgtttgcaaataatagagaatcaaacactagaaaccctgaacaagcttaagcaaaaaggaacacttattataaacatactggggtatctcatcaaactgaacgacaggactgtattagcgacttgggtggaaataa

SEQ ID NO: 721750 - DNA, 599 bp, Homo sapiens
taggaagtatcctttctccactccatttttttttcaccagcacctgcaacctgaatagcccttccttgggctcccagactgcctaaaaagaccagcgtttcctctcagctttctccatctggttttgctgcatttcaagcggcatacctaatgctctgtgctttcaagtcagattcattcagaaagacttatgcctggagcacttggcatagcacgtgactaatctggatgatgcccactgtgaagatggacaaattaaggcctttcagggtgaaagagtctgggaagatacagcagcagcagcagcagcagccactgctgcctccccagcagaactgatatccaaggcagggtcttaccaataacagcatggcagactgaygccaggttcccaggagtgtagggtcataatgcttatctgagagaatcaaagcatttccaagatgattctgtttgaaatgtgttctgttcactgcctatgcacacatttacgaacccagttggactcaatgccgtcatccaattagcacatgccagcatctagctccccagggctaagatgaaacaggcagaatgagatcaaactctagccccgttac

SEQ ID NO: 721751 - DNA, 915 bp, Homo sapiens
gtttaatgtttcaactgtgataatcactccatatgcatatttaaattcctatttgataaaggatagaaaatacagaaagaattcttgtgataatagagaacacagaactgttgaaaggtgttgaagctgagctggagagagtcaccaaggctggcgccaaagctggcaaggtcggagggtttcctgcctgggtggcacagcttgagctcgccctgcatcacgagtggtggaaactgcagacccagctgggcccggaggcctctgcctcagcctcccgcccactaggagctgcgctgaggtcccagataggcgaccctggcrgggtgcccctgagcgaaggggggacagcagcaggagaccagggtccagggacccacctcccaccgagggaacctcgagcctcccctggcacccctagcttggtccgcctggcctccggagcccggtgtgcatcctggtcatggggacacccaccaggtgcccgggagtccccctccgccacagcctgcggctccgccggccctcaagcctggtgcggggactccagccgcatcgcctctgctcctgccaggccgggacctgtcctcctcctgggcgcccggcagtaggggcgatgcacactgcctgctgccctgcacagcctttcgccgcacatcacctctggcccctccgccccgggccaggaccttcctggccacacagaaccccccttccttcccgctgcagagctgctgcgcttcccccacccacagggaaaaacggccgatctccaaccaaacagaaatctgtgtgtgactcctctggttggatactgccagtccccacattttcttccgggagttttcttggcagaaggtgcccaatgtttgatgtttcgccagccatgaggctgaaaagtgacagcaatagagaaac

SEQ ID NO: 721752 - DNA, 915 bp, Homo sapiens
gtttaatgtttcaactgtgataatcactccatatgcatatttaaattcctatttgataaaggatagaaaatacagaaagaattcttgtgataatagagaacacagaactgttgaaaggtgttgaagctgagctggagagagtcaccaaggctggcgccaaagctggcaaggtcggagggtttcctgcctgggtggcacagcttgagctcgccctgcatcacgagtggtggaaactgcagacccagctgggcccggaggcctctgcctcagcctcccgcccactaggagctgcgctgaggtcccagataggcgaccctggcggggygcccctgagcgaaggggggacagcagcaggagaccagggtccagggacccacctcccaccgagggaacctcgagcctcccctggcacccctagcttggtccgcctggcctccggagcccggtgtgcatcctggtcatggggacacccaccaggtgcccgggagtccccctccgccacagcctgcggctccgccggccctcaagcctggtgcggggactccagccgcatcgcctctgctcctgccaggccgggacctgtcctcctcctgggcgcccggcagtaggggcgatgcacactgcctgctgccctgcacagcctttcgccgcacatcacctctggcccctccgccccgggccaggaccttcctggccacacagaaccccccttccttcccgctgcagagctgctgcgcttcccccacccacagggaaaaacggccgatctccaaccaaacagaaatctgtgtgtgactcctctggttggatactgccagtccccacattttcttccgggagttttcttggcagaaggtgcccaatgtttgatgtttcgccagccatgaggctgaaaagtgacagcaatagagaaac

SEQ ID NO: 721753 - DNA, 915 bp, Homo sapiens
gtttaatgtttcaactgtgataatcactccatatgcatatttaaattcctatttgataaaggatagaaaatacagaaagaattcttgtgataatagagaacacagaactgttgaaaggtgttgaagctgagctggagagagtcaccaaggctggcgccaaagctggcaaggtcggagggtttcctgcctgggtggcacagcttgagctcgccctgcatcacgagtggtggaaactgcagacccagctgggcccggaggcctctgcctcagcctcccgcccactaggagctgcgctgaggtcccagataggcgaccctggcggggtgcccctgagcgaaggggggacagcagcaggagaccagggtccagggacccacctcccaccgagggaacctcgagcctcccctggcacccctagcttggtccgcctggcctccggagcccggtgtgcatcctggtcatggggacacccaccaggtgcccgggagtccccctccgccacagcctgcggctccgccggccctcaagcctggtgcggggactccagccscatcgcctctgctcctgccaggccgggacctgtcctcctcctgggcgcccggcagtaggggcgatgcacactgcctgctgccctgcacagcctttcgccgcacatcacctctggcccctccgccccgggccaggaccttcctggccacacagaaccccccttccttcccgctgcagagctgctgcgcttcccccacccacagggaaaaacggccgatctccaaccaaacagaaatctgtgtgtgactcctctggttggatactgccagtccccacattttcttccgggagttttcttggcagaaggtgcccaatgtttgatgtttcgccagccatgaggctgaaaagtgacagcaatagagaaac

SEQ ID NO: 721754 - DNA, 915 bp, Homo sapiens
gtttaatgtttcaactgtgataatcactccatatgcatatttaaattcctatttgataaaggatagaaaatacagaaagaattcttgtgataatagagaacacagaactgttgaaaggtgttgaagctgagctggagagagtcaccaaggctggcgccaaagctggcaaggtcggagggtttcctgcctgggtggcacagcttgagctcgccctgcatcacgagtggtggaaactgcagacccagctgggcccggaggcctctgcctcagcctcccgcccactaggagctgcgctgaggtcccagataggcgaccctggcggggtgcccctgagcgaaggggggacagcagcaggagaccagggtccagggacccacctcccaccgagggaacctcgagcctcccctggcacccctagcttggtccgcctggcctccggagcccggtgtgcatcctggtcatggggacacccaccaggtgcccgggagtccccctccgccacagcctgcggctccgccggccctcaagcctggtgcggggactccagccgcrtcgcctctgctcctgccaggccgggacctgtcctcctcctgggcgcccggcagtaggggcgatgcacactgcctgctgccctgcacagcctttcgccgcacatcacctctggcccctccgccccgggccaggaccttcctggccacacagaaccccccttccttcccgctgcagagctgctgcgcttcccccacccacagggaaaaacggccgatctccaaccaaacagaaatctgtgtgtgactcctctggttggatactgccagtccccacattttcttccgggagttttcttggcagaaggtgcccaatgtttgatgtttcgccagccatgaggctgaaaagtgacagcaatagagaaac

SEQ ID NO: 721755 - DNA, 915 bp, Homo sapiens
gtttaatgtttcaactgtgataatcactccatatgcatatttaaattcctatttgataaaggatagaaaatacagaaagaattcttgtgataatagagaacacagaactgttgaaaggtgttgaagctgagctggagagagtcaccaaggctggcgccaaagctggcaaggtcggagggtttcctgcctgggtggcacagcttgagctcgccctgcatcacgagtggtggaaactgcagacccagctgggcccggaggcctctgcctcagcctcccgcccactaggagctgcgctgaggtcccagataggcgaccctggcggggtgcccctgagcgaaggggggacagcagcaggagaccagggtccagggacccacctcccaccgagggaacctcgagcctcccctggcacccctagcttggtccgcctggcctccggagcccggtgtgcatcctggtcatggggacacccaccaggtgcccgggagtccccctccgccacagcctgcggctccgccggccctcaagcctggtgcggggactccagccgcatcgcctctgctcctgccaggccgggacctgtcctcctcctgggcgcccggcagtaggggcgatgcacactgccygctgccctgcacagcctttcgccgcacatcacctctggcccctccgccccgggccaggaccttcctggccacacagaaccccccttccttcccgctgcagagctgctgcgcttcccccacccacagggaaaaacggccgatctccaaccaaacagaaatctgtgtgtgactcctctggttggatactgccagtccccacattttcttccgggagttttcttggcagaaggtgcccaatgtttgatgtttcgccagccatgaggctgaaaagtgacagcaatagagaaac

SEQ ID NO: 721756 - DNA, 585 bp, Homo sapiens
taagataaaaatctttatatttagtatacatggatttacctgttaggttttgtgttattttttaattatgcggtcaaaatttttattttgtagtaatagaaacattattttgtgctctttttccctactcttaatatatatgactatttaaagtagtttttctcatctatacatagtataaacaataaaaattagatgggtttacattttcctattttgtgtcatttatgttgttttatgacctcttttgctttagtcacagctgtgctwttatgagtgctgaatttctgattatgatctcacaagagtttagttgtatcatgtgatttcctttaaaattagtgagatttcatgaataagcgtttttttattttttattttttatttatttatttatttttttgagacagagtctcgctgtcgcctgggctggagtgcagtggcgcgatctcggctcactgcatgcaacctccgccttccgggttcacgccattctcctgcctcagcctcccgagtagctgggactacaggcgcctgccaccacgcccagctaatttttttgtgtttttagtagaaacagggttt

SEQ ID NO: 721757 - DNA, 585 bp, Homo sapiens
taagataaaaatctttatatttagtatacatggatttacctgttaggttttgtgttattttttaattatgcggtcaaaatttttattttgtagtaatagaaacattattttgtgctctttttccctactcttaatatatatgactatttaaagtagtttttctcatctatacatagtataaacaataaaaattagatgggtttacattttcctattttgtgtcatttatgttgttttatgacctcttttgctttagtcacagctgtgcttttatgagtgctgaatttctgattatgatctcacaagagtttagttgtatcatgtgatttcctttaaaattagtgagatttcatgaataagcgtttttttattttttattttttawttatttatttatttttttgagacagagtctcgctgtcgcctgggctggagtgcagtggcgcgatctcggctcactgcatgcaacctccgccttccgggttcacgccattctcctgcctcagcctcccgagtagctgggactacaggcgcctgccaccacgcccagctaatttttttgtgtttttagtagaaacagggttt

SEQ ID NO: 721758 - DNA, 585 bp, Homo sapiens
taagataaaaatctttatatttagtatacatggatttacctgttaggttttgtgttattttttaattatgcggtcaaaatttttattttgtagtaatagaaacattattttgtgctctttttccctactcttaatatatatgactatttaaagtagtttttctcatctatacatagtataaacaataaaaattagatgggtttacattttcctattttgtgtcatttatgttgttttatgacctcttttgctttagtcacagctgtgcttttatgagtgctgaatttctgattatgatctcacaagagtttagttgtatcatgtgatttcctttaaaattagtgagatttcatgaataagcgtttttttattttttattttttatttatttatttatttttttgagacagagtctcgctgtcgcctgggctggagkgcagtggcgcgatctcggctcactgcatgcaacctccgccttccgggttcacgccattctcctgcctcagcctcccgagtagctgggactacaggcgcctgccaccacgcccagctaatttttttgtgtttttagtagaaacagggttt

SEQ ID NO: 721759 - DNA, 632 bp, Homo sapiens
agaacttaaggctctttggtttattttttaaaataagagaatactctttttctgtatctagagtattaagaattgtttagaagatgtatgataagctacatttaacatgaatttkataacatatgaaatgcctttgtaagattactgtgtgtgacaggatttctgtgaggacttacccctttaaatgtgctttcatttgtttacttgagaatgtatcagaaaatcctaaattaaacattcttttacttaaaacttagcttataattagaaatatttgtaaaagccttcaaataaaaatgtatgttaatatttcatattataatgtcaatttagtggatgcaaaatattatttcattgtggttttaatttgcacttttcctagattttgaataagattagacattttcatatataattatggaaaatgaatattttatcttctttgttattcatttcctttaccaattttccctatatctcttcatgattcccacccctagtcaatccataattcactttttggctttatgaattgcttattctaaatatttcatgtaagtgggatcatacaatatttgtctttttgtatttggtccattttgcttagcataatgttttcagtgtgcatccat

SEQ ID NO: 721760 - DNA, 632 bp, Homo sapiens
agaacttaaggctctttggtttattttttaaaataagagaatactctttttctgtatctagagtattaagaattgtttagaagatgtatgataagctacatttaacatgaattttataacatatgaaatgcctttgtaagattactgtgtgtgacaggatttctgtgaggacttacccctttaaatgtgctttcatttgtttacttgagaatgtatcagaaaatcctaaattaaacattcttttacttaaaacttagcttataattagaaatatttgtaaaagccttcaaataaaaatgtatgttaatatttcatattataatgtcaatttagtggaygcaaaatattatttcattgtggttttaatttgcacttttcctagattttgaataagattagacattttcatatataattatggaaaatgaatattttatcttctttgttattcatttcctttaccaattttccctatatctcttcatgattcccacccctagtcaatccataattcactttttggctttatgaattgcttattctaaatatttcatgtaagtgggatcatacaatatttgtctttttgtatttggtccattttgcttagcataatgttttcagtgtgcatccat

SEQ ID NO: 721761 - DNA, 632 bp, Homo sapiens
agaacttaaggctctttggtttattttttaaaataagagaatactctttttctgtatctagagtattaagaattgtttagaagatgtatgataagctacatttaacatgaattttataacatatgaaatgcctttgtaagattactgtgtgtgacaggatttctgtgaggacttacccctttaaatgtgctttcatttgtttacttgagaatgtatcagaaaatcctaaattaaacattcttttacttaaaacttagcttataattagaaatatttgtaaaagccttcaaataaaaatgtatgttaatatttcatattataatgtcaatttagtggatgcaaaatattatttcattgtggttttaatttgcacttttcctagattttgaataagattagacattttcatatataattatggaaaatgaatattttatcttctttgttattcatttcctttaccaattttccctatatctcttcatgattcccacccctagtcaatccataattcactttttggctttatgaattgcttatyctaaatatttcatgtaagtgggatcatacaatatttgtctttttgtatttggtccattttgcttagcataatgttttcagtgtgcatccat

SEQ ID NO: 721762 - DNA, 1210 bp, Homo sapiens
aaagtcctttttctacaaaggaacttccatcagtatacaagttgaggtsgggatcagtcaagggaacctctaaaaggtccacaattgggaattattaatcttttttttttttttttttctagacagagtctcactctgtcacccaggctggagtgcagaggcatgatctcagctcactgcaacctccgcctcccgggttcaagtgattcttctgcctcagcctcccgagtagctgggattatacacttgttaccacacccagctaatttttgtatttttagtagagacggggtttcaccatgttggccaggttggtgttgaactgctgacctcaggtgatctacccacctcggcctaccaaagtgctggtatttacaggcgtgagccaccgcgtccggccaatctttttttttttttttttgtacagatgggatcttgttttgatgctcatgctagtcttgaactcctggactcaaacaatcctcctgcctctgcctcccaagttgttaggattataggcgtgagccaccgcgcccaggcttattttctgaattaaaataattgatctgggtacaagctatttaatactgagttgatctgtagttttgaaattttaaaataggatttttgagatgacagaagaaatattgtttcatttagtttgggtttttattgttgtgggctcttattttggtttttaaaaaatatttttaaatttttatgggcagcacttcattccataaaagagaatgaatgttgctgttttggtctttattaattagtttctttttctttcttttttttttttaaattatacttttaagttctgggatacatgtgcagaacatgcaggtttgttatgtaggtaaacacgtgtcatgatggtttgctgttaattagtttcttagttagctattggcagtatctaatcctaactggtaaggccctacatttagaaaaattatacttacttgaggtgattatagattttaaatttggtgatagattcattttcttctcatatcagtgtcagcacattagagccaaaagtagtcattttggggtgacattttaaaatgcataatttaagaaaaaactcatgaggacaagtaaagtttttttttttttaattaaaaattacctatctggagtttgttttaaaagtatacacatacgtaaaattcataggccaggcacagtggcttacacc

SEQ ID NO: 721763 - DNA, 611 bp, Homo sapiens
aatttttacaaatgaaaggagatggggaaagagatggcagcaagaaggaactacactaagcatgtgcattgagatctcacaacatacatgagacaagacagttctaagatatgagtcttctctmtctctctttctgaaccaaacatttctgcttatttcaataaaatatgagtaagtaccaattagggatcacggaacttccttatttttccttggatactgcttcacttgcagtatacatttgaaatacattctgaaagccttctggtatggctgcaatacaattatccctccattgtgtcccaggtctctataatgaaccatgcaaaccaaatttattaaacaaattccatgattcaaggcaaaaatctttgtgtgggtgaggaaaaggtcttggtggcatcagccaatattctggataggttctaaatacaaaacccagccaaacagtctgcaaccttccagtagttctaaatgaggaaccataaaaataatgttgttaatgctcagtaatattaagagcataatggtataatggaatggtaacaacacaaatctgaattatgtaccatgtttcattagagacatttacactctgactaatcagtgtc

SEQ ID NO: 721764 - DNA, 935 bp, Homo sapiens
caaaaaaggtataatctagccmagaaaacttcagtaggtagaatttcagaaagctagattgagctttatttttaaaaagcactaaattctgtggtatggcccttaaaggaaatagaataatgacaacaaacagagagatcaatatagctaggagcctttatgtagtagatgggaaattacatgttttgtatttagcatatatttattgattgccagctagatgttaggctagctgtgtactggaaatgcaaggtggagatggaaaaagaaaaccaataactctggtctctagtaatttaggtgaagagaaaacatttaaacaaataaaagtacgtgcacgtgatttggatgtaataggtgttattctggttacttgggctttcagtatgagaacaatttgacacaataaaaagggaaataagggtaattactattcggaaaataaaccaagccaaagcatggttgcagacatcagtgtgatgtgactttgaacaatgaggaatctctcaggcaaaagtagagaaaaggagacatcacatttactctagaaaaaataaataaataaagacaatttttaagggcatcaaatatcaggatgagaatcttaggcttcattctataaacatagaggacataaaatgtttttgaacaatattggatttagaaactgaaacactgtcttatcaatttaatcaatggcaagttttagtgaaaatattttaaataatagattatttttaattgtccaaatactgtttaaatctgcttttgattatgtgtcttcatagacacagaaataaatctcttttcaaaaaatgaataggtaaaaaaatataaagaaaggtaggttgatatagtgaaaggttattggtttatatatactttcattgtgtgttcatccggcagttgaagccagcatgtttgtgagccttaga

SEQ ID NO: 721765 - DNA, 935 bp, Homo sapiens
caaaaaaggtataatctagccaagaaaacttcagtaggtagaatttcagaaagctagattgagctttatttttaaaaagcactaaattctgtggtatggcccttaaaggaaatagaataatgacaacaaacagagagatcaatatagctaggagcctttatgtagtagatgggaaattacatgttttgtatttagcatatatttattgattgccagctagatgttaggctagctgtgtactggaaatgcaaggtggagatggaaaaagaaaaccaataactctggtctctagtaatttaggtgaagagaaaacatttaaacaaataaaagtacgtgcacgtgatttggatgtaataggtgttrttctggttacttgggctttcagtatgagaacaatttgacacaataaaaagggaaataagggtaattactattcggaaaataaaccaagccaaagcatggttgcagacatcagtgtgatgtgactttgaacaatgaggaatctctcaggcaaaagtagagaaaaggagacatcacatttactctagaaaaaataaataaataaagacaatttttaagggcatcaaatatcaggatgagaatcttaggcttcattctataaacatagaggacataaaatgtttttgaacaatattggatttagaaactgaaacactgtcttatcaatttaatcaatggcaagttttagtgaaaatattttaaataatagattatttttaattgtccaaatactgtttaaatctgcttttgattatgtgtcttcatagacacagaaataaatctcttttcaaaaaatgaataggtaaaaaaatataaagaaaggtaggttgatatagtgaaaggttattggtttatatatactttcattgtgtgttcatccggcagttgaagccagcatgtttgtgagccttaga

SEQ ID NO: 721766 - DNA, 657 bp, Homo sapiens
ggcaaaaggatgtacattttaacgattttacccaaaacaacattaaggttggattatatctcatttaattgagtgtggttcctgatacttttgttagtggttgacaacacagaaagaagctggctcacttaataccacttgtgacctgataagaagagtcaattctgaaatgtgcatgtttttcaaaatatgaaattatttctgtcctggggcaacatattcagaaggaaagtgaatttatgtcacattttcaatgatcaagaggaattgttctaattaacaagatcacacaaggagtggaaaaaatcagtaatgtagtctgtcattaatcaactaatttcaatacaagaggcagagtcattgattcttgttgcacattgtgcatgtttccaacactgatgaactgtagtgaactaaatttctaatttatagcacctactctacaatttatgactttcagctttattggaggaaatctacttgcccaattttaggttctawttttagttagtaaaatatattaatgttgttgccattattttataatacctaaatgatatacatcaatttagtatacaattactctcagaagaaaaacattgtattttttctttcttctttgttaacaacatatatattaaaatcatctaataagaa

SEQ ID NO: 721767 - DNA, 659 bp, Homo sapiens
ataagtatgccaaagagatatctttgtttattgcagcactattcacagtagccaagacatgaaattaaactgtgtccatcaacaaatgaatggataaaaaaaatgagacatacatacacaagggaatattattcacccaccaaaaagaattaaacgatgtcatctgtagcaacatggatgaccttggagttcattatgttaagtgaaatgagccaggcacaaaaatgtttgtttacattctctgtagatttatactgggaacttaaaaagttgatgtcatagaagtaaagagtagaatagtaattaccagaggctaaggaatggagggaataaaaggaatagggattaattggtacaaaattacagttagacaggaggaataagttttagtgttctgtaacacagtttgtaactagagttgtattataatagtttattttctttctactgarccatgctctctgtaaagatctgaatcttttcatcactgtatctcaagaccttgctattttgcctgatgtttggtagctgatcgctaaacatttgttgatggaataaatagtcttgctatgaggcagggacacatgccctaccaacactatacattataaatataaagtggggattattgggaaagtgttacaaacacagacatagaa

SEQ ID NO: 721768 - DNA, 671 bp, Homo sapiens
  misc_feature 502: n = A,T,C or G
tgttatacgtcacagtatttactatatattrtgttttattattacatctgttatggtgatctatgattagtgatctttgatgttactattgaaattgttttggggtgccacaaaccacactcaaataaggtggaaaacttaattgataaatgtgtgttttctgatacaaaacacaacaaacctggctaggcacagtggttcatgcctgttatcccagcactttgggagtctgagggaggtgggtcacttgagcccaggagtttgagaccagcctgggcaacattgtgaaatctacaaaacaaaacaaaacaaaacaaaacaaaaacaaaaacaaaaataaacgaaaacaaaaattaggccagtggcacgtgcttgtagtcccggctactcaggaggctgaggtgggagaatctcttcagcctgagaggttaaggctgcagtgagacgaggtcacacaattgcactccagcctgggcacaggagcgagactccgtctcaaaanaaaaaaaaaaaaaaaaaaaaaaaaaagaaagcaagcctgggtgacagagtgacattctgtctcaaaaaacaaaacaaaaaaacaacaaaccggacaaaaacagtagcctgtatgacaaaagactaatttttttaatattcaaaaacttcttatgaataaaaatatatac

SEQ ID NO: 721769 - DNA, 671 bp, Homo sapiens
  misc_feature 502: n = A,T,C or G
tgttatacgtcacagtatttactatatattatgttttattattacatctgttatggtgatctatgattagtgatctttgatgttactattgaaattgttttggggtgccacaaaccacactcaaataaggtggaaaacttaattgataaatgtgtgttttctgatacaaaacacaacaaacctggctaggcacagtggttcatgcctgttatcccagcactttgggagtctgagggaggtgggtcacttgagcccaggagtttgagaccagcctgggcaacattgtgaaatctacaaaacaaaacaaaacaaaacaaaacaaaaacaaaaacaaaaataaacgaaaacaaaaattaggccagtggcacgtgcttgtagtcccggctactcaggaggctgaggtgggagaatctcttcagcctgagaggttaaggctgcagtgagacgaggtcacacaattgcactccagyctgggcacaggagcgagactccgtctcaaaanaaaaaaaaaaaaaaaaaaaaaaaaaagaaagcaagcctgggtgacagagtgacattctgtctcaaaaaacaaaacaaaaaaacaacaaaccggacaaaaacagtagcctgtatgacaaaagactaatttttttaatattcaaaaacttcttatgaataaaaatatatac

SEQ ID NO: 721770 - DNA, 540 bp, Homo sapiens
ttccaacatctgttatcttttgacactttaataatcgccattctgactggtgtaagatggtatatcattgcrgttttaattttcagttttctgatgattagtgatgttgagcattttttttttcatatacttggtcatttttgtgttttcctttgaaaaatgtctgttcatgacctttgctcactttttgatgggattattgttttttggttgagtggtttgagttcctgagacaagtagtttaaatgcaaattatttacatgttgaatccaggaagcagcctaggaagatggggaagagcaggaagccaatcaaatgtgtggtgttaagtgctcaccactgtgggcagcagaggctcagtccaactagggagctttgggagacagtaaacgaggtagtttagtgcataggtctgaactgctttgatgttgaagaaagggtgagacaatgcatttcagagtaatgccaggagaatatggatcaaaactggaatatgaagagaatgtttgaggttcacaacagattcagatttgaatgacg

SEQ ID NO: 721771 - DNA, 540 bp, Homo sapiens
ttccaacatctgttatcttttgacactttaataatcgccattctgactggtgtaagatggtatatcattgcggttttaattttcagttttctgatgattagtgatgttgagcattttttttttcatatacttggtcatttttgtgttttcctttgaaaaatgtctgttcatgacctttgctcactttttgwtgggattattgttttttggttgagtggtttgagttcctgagacaagtagtttaaatgcaaattatttacatgttgaatccaggaagcagcctaggaagatggggaagagcaggaagccaatcaaatgtgtggtgttaagtgctcaccactgtgggcagcagaggctcagtccaactagggagctttgggagacagtaaacgaggtagtttagtgcataggtctgaactgctttgatgttgaagaaagggtgagacaatgcatttcagagtaatgccaggagaatatggatcaaaactggaatatgaagagaatgtttgaggttcacaacagattcagatttgaatgacg

SEQ ID NO: 721772 - DNA, 643 bp, Homo sapiens
taataagcacctgagaatatgaaagcacaaatccaatttaaatgtgaaaggtctacaacttgggattttaaakggagtacagaaaagccactgtttcttaaacaattttgttgagggggaaaacagtgaaagctaaatgttctattcaagagttgtttcttttgaaaataatgcttcatttaaaagctaaggacagaagacgtagctttgttatgaaggctcatctttttattaaacaaccactactttgtctccaagttgcaaagggaagatttgtcaatctgattgaatcttccctttagtttttcccaacagctgtgtccagataattcatgactcctgtgtttcctgagccctggataatttcacacacatgtctggtttggggctccacattttcagaaaaatatagaaatcttggaggaggtccagggtagaccaagggaaatgattaatgggttgaaagttggagtttatgaagaaaggttgtgagatctgatcttttgctacgagaaaagtctgagtggtgacttaataacataaggaggttagtaagcagctgttctccatcttcactaaggttgaatgaaatgaaataagatataaattgcaacaggaacaaaaatgcattacaagtgaggac

SEQ ID NO: 721773 - DNA, 601 bp, Homo sapiens
caaccatgcactattaaggatttcattctcaccatgcctgtgctatctggaggtagaaagagggccagttgcacatcctgctcaagtccttggtcaaaaagaccactaaagagtgctttgtagattcatgtatcagaatcacatgaaagtaggccaaattcttagtgtgtgtttttaaaataagactttaggaagttcacttatttttttctaaattatttttgcatattcttctttttcatttttttcatgaagaatttaaaatttggctgtagaaaatctctcactccaaacatcacacagcctaaataggtgagtctcaaaaataagctaaygttcatctttcatctgattcaatgtcctgaaaccctttggtttaaatttgttaattcttctcatggcttttctcctagcaaaaccaactaataccacagctatttattactgtcagctctaacttatgcccacaatctcacatcccttttgaccacgcttatagaactattacaacaagtaaaccaaatttattcttcattattaatttttaaatgttctcagcacaaatctggtaacttggagggctacaagttgatatttctca

SEQ ID NO: 721774 - DNA, 670 bp, Homo sapiens
tgattggaccatgaaggcagtatccctcatgctgttctcgggatagtgagggagctctcacaagatctgatagtttaaaagtggcagtttctcctgcattgtctctattgcccccttgcgaagagggtgcctgcttcccctttgccttytgccatgattgtaagtttcctgaggcctccccagccacgtagaaatgtgagtcagttaaacctctttgatttataaactacccagccacaggtaggatcctttttttttttttttttttttttttgagacggagtcttgctctgttcccctggctgaggctgaagtgcagtggcgctcaggtagtacctttgtagaagtgtgaaaatggactaatacagataattggcagatgggggtactgctacaaagataatttgaaaatgtggaagtgacttttgaactgggtaataggcagacgttggaacagtttggaggctcagaagaagacaggcagatgtgaaaaagtttggaacttcctagagacttgttgtataattttgaccaaaatgctgatagtgatatggacaatgaagtccaagctgagatgatcttcgatggagatgaagaacttgttgggaactggagtaaaggtcactttagacactggtggcatttttccccggacctaaagatctgtgca

SEQ ID NO: 721775 - DNA, 670 bp, Homo sapiens
tgattggaccatgaaggcagtatccctcatgctgttctcgggatagtgagggagctctcacaagatctgatagtttaaaagtggcagtttctcctgcattgtctctattgcccccttgcgaagagggtgcctgcttcccctttgccttttgccatgattgtaagtttcctgaggcctccccagccacgtagaaatgtgagtcagttaaacctctttgatttataaactacccagccacaggtaggatcytttttttttttttttttttttttttgagacggagtcttgctctgttcccctggctgaggctgaagtgcagtggcgctcaggtagtacctttgtagaagtgtgaaaatggactaatacagataattggcagatgggggtactgctacaaagataatttgaaaatgtggaagtgacttttgaactgggtaataggcagacgttggaacagtttggaggctcagaagaagacaggcagatgtgaaaaagtttggaacttcctagagacttgttgtataattttgaccaaaatgctgatagtgatatggacaatgaagtccaagctgagatgatcttcgatggagatgaagaacttgttgggaactggagtaaaggtcactttagacactggtggcatttttccccggacctaaagatctgtgca

SEQ ID NO: 721776 - DNA, 1117 bp, Homo sapiens
attgctattactaaaaatgtctcaaatattatcactcaatactcaaaatttccccctgcttcttttttaacccctcaatggtagcaatacctaatctgtgtgtatcaataagacactggccaggtgcagtggctcatgcctgtaatctcagcacttcgggaggccgaggtgggcaaatcacaaggtcaggagttcgagaccagcctgaccaacatggtgaaactccgtctctactaaaaatacaaaaattagctgggcatggtggcatgtgcctgtaatcacagctactcaggaggctgaggcagcagaattgcttgaacccaaggggcaaaggttkcagtgagccaagatcacgccattgcattccagcctgggcaaacaagcaagactccgtctccaaaaaaaaaaaaagacaccaggaaacttgttcttgagtttggggaattcttaataaaaattccaaaaaacaggccggggacagtggctcacgcctgtaatcccagcactttgggaggccgaggcaggtggatcacaaggtcaggagatcgagaccatggtgaaaccccgtctctactaaaaatacaaaaaaaattagccaggcgcggtggcaggcgcctgtagtcccagctactcaggaggctgaggcaggagaatggcttgaacccgggaggcggagcttgcagtgagccgagatcgcaccactgcactccagcctgggcaacacagcaagactctgtctcaaaaaaaaaaaaaaaattccaagaaacaataatttctaggaagtttatgaagttaaggggtaagtttcagtttataaataatgactgtcaaagagcatgatttccgtgttttttctttgaatttatatttattttattttctcatactaaaaatgatggaaaaataaactgcctttttcctcttggagttcttataaaatgtttcaatttccttaaagtcctttacttattctactgtttatcttgatctagtatacatgctacagaattctatctgagagtgttaattagaaattataactgaaagtgaaaatgaaatgtatatattcactttaccagtaagaagccagatgcttggatttatttctgtggcttta

SEQ ID NO: 721777 - DNA, 419 bp, Homo sapiens
ttcgcagaatctgtcgcagtctgtaccttctacctcatgcctgttcccactttgtcccgtacttgaagtcacctagtaaattaataaataagttatatgtcattttctcatcaataatgtcatacacagaatggtagacattcttagaatgacctgcataatgcccagtttccttgagaaatttatgttaggaattaccctgactactcttcccactagcttttggggcagtgcatcwgcacctcacaggagtgagactctccatgttcaagaattctttgctccatctcatatcccatattcacactttcttctttctgaagaccccataaatatcaagaatagggtgtcaggcatgaaaaaatggtcatcatcactggccatcagagaaatgcaaatcaaaaccacaatgagatact

SEQ ID NO: 721778 - DNA, 419 bp, Homo sapiens
ttcgcagaatctgtcgcagtctgtaccttctacctcatgcctgttcccactttgtcccgtacttgaagtcacctagtaaattaataaataagttatatgtcattttctcatcaataatgtcatacacagaatggtagacattcttagaatgacctgcataatgcccagtttccttgagaaatttatgttaggaattaccctgactactcttcccactagcttttggggcagtgcatctgcacctcacaggagtgagactctccatgttcaagaattctttgmtccatctcatatcccatattcacactttcttctttctgaagaccccataaatatcaagaatagggtgtcaggcatgaaaaaatggtcatcatcactggccatcagagaaatgcaaatcaaaaccacaatgagatact

SEQ ID NO: 721779 - DNA, 1978 bp, Homo sapiens
acacccttagaacctaatcaaagtatagaacttagttgtattgcttaatatgacataatcagtcccacttaacttagtcagaatatactgatagtgaattagttatttatgcccagtttttacttaacaaatggttttatgaaaaaaaaaaaaagaaacaaaagctcaactcttaatgcacaccacagtactcaggcctgttcagaaagggacagataatgaaaaacagaacattaaacagaaccatagtgttttttctttaccacttcatttggtgagagagaatgtacttgcttaatgcaatttgctggaggacagaagatacaatacacttccttagaatgtttttgccttccctcttgctgcctttctgccttttgtttgcttgcttaccagctcctgtggctggctgctagacaaccaaatgagagcatcaggcagggaatggttgtgttggcattaaatcacctgaaaaaatgtggtagatcatgtgatatgaaatgtatacatatatatattgaacttggaaaaacattatttttactctgattttatttcttgaaatctgattttgaaatcaatttctgggccattactttaaaatgaattttccaaatacaaaaggcagattgtttcattcaaaagtaggcaatgcaagaaagtgttaaagaataatttcttacgaccatggctaaatgaagttttaaacaagacttatgcaattcttaaacttcagccggctcccctacgtattattcttgtttcatcttgctccctcacacatctctctctatagggtttgtttatggctaaatagctattccacagtctcaagctccttagacatttctgctattgctttgtaaaatcaccctttgctccaaaggaaccatgcatttgttatggggaccctaaagagtctacagttggcaagtggcagcagatcccagctgctgacacttccaaactataattgtcatcatagcattacttcagcttctcacatctaaatgcatttctaattccctctctttgtctctcatcccacctccctttctcccaaaggattgccttcctctaatagcagtcttggaattatcatctgctattctctcgtgacatgcacagaatacacaaaatttataatttatgaatggaaacatctccaaagactgaatggaacaccaagggtaatccaggtttcacatctgtaaagcgggttaraaaatctcatccccttctgttcctctggttggtgtgagtgcagcagccagccctgccactctaccaagtgacaactgactttactgatcatttgagtttactgccaaggcaggaaaatccagtcaaagctttcaaaaggtctgagcatccacgaaggatttttggaggagcaagggtatttattatatgacctcacctgtctttaaagtgattgacagtccataaaattgagttgtctccacaagctcattcataatccatgccacatcttttggtaccgtcagataaagttgtcagcacatagtaattcacaagtggctgtctcaaattctttgttggagaatatataaagcaccttccccccaaatatctcaaggaattgcttagaggatctgaagtatatcctaccattagtatttaagtcaaatgttacctcttcatttgcaggaggacataatatacactggtggaaattttaagctcatttaacagccatgattcacattattaatgatgcaaattgatcatattacaaaccataaatacaaaattcccttccatgctattcttagacaatctctaggtgcagattttttttaaaaaagtaaactgagacaagcaagattttttttttaccagtcccagttcataaaaattagtaatgaaattagaaagataattgtgaggttgggattcagctaataattaggaattcttaaggactgactcattcttcgaaagttaaatggtttaa

SEQ ID NO: 721780 - DNA, 1978 bp, Homo sapiens
acacccttagaacctaatcaaagtatagaacttagttgtattgcttaatatgacataatcagtcccacttaacttagtcagaatatactgatagtgaattagttatttatgcccagtttttacttaacaaatggttttatgaaaaaaaaaaaaagaaacaaaagctcaactcttaatgcacaccacagtactcaggcctgttcagaaagggacagataatgaaaaacagaacattaaacagaaccatagtgttttttctttaccacttcatttggtgagagagaatgtacttgcttaatgcaatttgctggaggacagaagatacaatacacttccttagaatgtttttgccttccctcttgctgcctttctgccttttgtttgcttgcttaccagctcctgtggctggctgctagacaaccaaatgagagcatcaggcagggaatggttgtgttggcattaaatcacctgaaaaaatgtggtagatcatgtgatatgaaatgtatacatatatatattgaacttggaaaaacattatttttactctgattttatttcttgaaatctgattttgaaatcaatttctgggccattactttaaaatgaattttccaaatacaaaaggcagattgtttcattcaaaagtaggcaatgcaagaaagtgttaaagaataatttcttacgaccatggctaaatgaagttttaaacaagacttatgcaattcttaaacttcagccggctcccctacgtattattcttgtttcatcttgctccctcacacatctctctctatagggtttgtttatggctaaatagctattccacagtctcaagctccttagacatttctgctattgctttgtaaaatcaccctttgctccaaaggaaccatgcatttgttatggggaccctaaagagtctacagttggcaagtggcagcagatcccagctgctgacacttccaaactataattgtcatcatagcattacttcagcttctcacatctaaatgcatttctaattccctctctttgtctctcatcccacctccctttctcccaaaggattgccttcctctaatagcagtcttggaattatcatctgctattctctcgtgacatgcacagaatacacaaaatttataatttatgaatggaaacatctccaaagactgaatggaacaccaagggtaatccaggtttcacatctgtaaagcgggttaaaaaatctcatccccttctgttcctctggttggtgtgagtgcagcagccagccctgccactctaccragtgacaactgactttactgatcatttgagtttactgccaaggcaggaaaatccagtcaaagctttcaaaaggtctgagcatccacgaaggatttttggaggagcaagggtatttattatatgacctcacctgtctttaaagtgattgacagtccataaaattgagttgtctccacaagctcattcataatccatgccacatcttttggtaccgtcagataaagttgtcagcacatagtaattcacaagtggctgtctcaaattctttgttggagaatatataaagcaccttccccccaaatatctcaaggaattgcttagaggatctgaagtatatcctaccattagtatttaagtcaaatgttacctcttcatttgcaggaggacataatatacactggtggaaattttaagctcatttaacagccatgattcacattattaatgatgcaaattgatcatattacaaaccataaatacaaaattcccttccatgctattcttagacaatctctaggtgcagattttttttaaaaaagtaaactgagacaagcaagattttttttttaccagtcccagttcataaaaattagtaatgaaattagaaagataattgtgaggttgggattcagctaataattaggaattcttaaggactgactcattcttcgaaagttaaatggtttaa

SEQ ID NO: 721781 - DNA, 1978 bp, Homo sapiens
acacccttagaacctaatcaaagtatagaacttagttgtattgcttaatatgacataatcagtcccacttaacttagtcagaatatactgatagtgaattagttatttatgcccagtttttacttaacaaatggttttatgaaaaaaaaaaaaagaaacaaaagctcaactcttaatgcacaccacagtactcaggcctgttcagaaagggacagataatgaaaaacagaacattaaacagaaccatagtgttttttctttaccacttcatttggtgagagagaatgtacttgcttaatgcaatttgctggaggacagaagatacaatacacttccttagaatgtttttgccttccctcttgctgcctttctgccttttgtttgcttgcttaccagctcctgtggctggctgctagacaaccaaatgagagcatcaggcagggaatggttgtgttggcattaaatcacctgaaaaaatgtggtagatcatgtgatatgaaatgtatacatatatatattgaacttggaaaaacattatttttactctgattttatttcttgaaatctgattttgaaatcaatttctgggccattactttaaaatgaattttccaaatacaaaaggcagattgtttcattcaaaagtaggcaatgcaagaaagtgttaaagaataatttcttacgaccatggctaaatgaagttttaaacaagacttatgcaattcttaaacttcagccggctcccctacgtattattcttgtttcatcttgctccctcacacatctctctctatagggtttgtttatggctaaatagctattccacagtctcaagctccttagacatttctgctattgctttgtaaaatcaccctttgctccaaaggaaccatgcatttgttatggggaccctaaagagtctacagttggcaagtggcagcagatcccagctgctgacacttccaaactataattgtcatcatagcattacttcagcttctcacatctaaatgcatttctaattccctctctttgtctctcatcccacctccctttctcccaaaggattgccttcctctaatagcagtcttggaattatcatctgctattctctcgtgacatgcacagaatacacaaaatttataatttatgaatggaaacatctccaaagactgaatggaacaccaagggtaatccaggtttcacatctgtaaagcgggttaaaaaatctcatccccttctgttcctctggttggtgtgagtgcagcagccagccctgccactctaccaagtgacaactgactttactgatcatttgagtttactgccaaggcaggaaaatccagtcaaagctttcaaaaggtctgagcatccacgaaggatttttggaggagcaagggtatttattatatgacctcacctgtctttaaagtgattgacagtccataaaattgagttgtctccacaagctcattcataatccatgccacatcttttggtaccgtcagataaagttgtcagcacatagtaattcacaagtggctgtctcaaattctttgttggagaatatataaagcaccttccycccaaatatctcaaggaattgcttagaggatctgaagtatatcctaccattagtatttaagtcaaatgttacctcttcatttgcaggaggacataatatacactggtggaaattttaagctcatttaacagccatgattcacattattaatgatgcaaattgatcatattacaaaccataaatacaaaattcccttccatgctattcttagacaatctctaggtgcagattttttttaaaaaagtaaactgagacaagcaagattttttttttaccagtcccagttcataaaaattagtaatgaaattagaaagataattgtgaggttgggattcagctaataattaggaattcttaaggactgactcattcttcgaaagttaaatggtttaa

SEQ ID NO: 721782 - DNA, 1978 bp, Homo sapiens
acacccttagaacctaatcaaagtatagaacttagttgtattgcttaatatgacataatcagtcccacttaacttagtcagaatatactgatagtgaattagttatttatgcccagtttttacttaacaaatggttttatgaaaaaaaaaaaaagaaacaaaagctcaactcttaatgcacaccacagtactcaggcctgttcagaaagggacagataatgaaaaacagaacattaaacagaaccatagtgttttttctttaccacttcatttggtgagagagaatgtacttgcttaatgcaatttgctggaggacagaagatacaatacacttccttagaatgtttttgccttccctcttgctgcctttctgccttttgtttgcttgcttaccagctcctgtggctggctgctagacaaccaaatgagagcatcaggcagggaatggttgtgttggcattaaatcacctgaaaaaatgtggtagatcatgtgatatgaaatgtatacatatatatattgaacttggaaaaacattatttttactctgattttatttcttgaaatctgattttgaaatcaatttctgggccattactttaaaatgaattttccaaatacaaaaggcagattgtttcattcaaaagtaggcaatgcaagaaagtgttaaagaataatttcttacgaccatggctaaatgaagttttaaacaagacttatgcaattcttaaacttcagccggctcccctacgtattattcttgtttcatcttgctccctcacacatctctctctatagggtttgtttatggctaaatagctattccacagtctcaagctccttagacatttctgctattgctttgtaaaatcaccctttgctccaaaggaaccatgcatttgttatggggaccctaaagagtctacagttggcaagtggcagcagatcccagctgctgacacttccaaactataattgtcatcatagcattacttcagcttctcacatctaaatgcatttctaattccctctctttgtctctcatcccacctccctttctcccaaaggattgccttcctctaatagcagtcttggaattatcatctgctattctctcgtgacatgcacagaatacacaaaatttataatttatgaatggaaacatctccaaagactgaatggaacaccaagggtaatccaggtttcacatctgtaaagcgggttaaaaaatctcatccccttctgttcctctggttggtgtgagtgcagcagccagccctgccactctaccaagtgacaactgactttactgatcatttgagtttactgccaaggcaggaaaatccagtcaaagctttcaaaaggtctgagcatccacgaaggatttttggaggagcaagggtatttattatatgacctcacctgtctttaaagtgattgacagtccataaaattgagttgtctccacaagctcattcataatccatgccacatcttttggtaccgtcagataaagttgtcagcacatagtaattcacaagtggctgtctcaaattctttgttggagaatatataaagcaccttccccccaaatatctcaaggaattgcttagaggatctgaagtatatcctaccattagtatttaagtcaaatgttacctcttcatttgcaggaggacataatatacactggtggaaattttaagctcatttaacagccatgattcacattattaatgatgcaaattgatcatattacaaaccataaatacaaaattcccttccatgctattcttagacaatctctaggtgcagatttttttwaaaaaagtaaactgagacaagcaagattttttttttaccagtcccagttcataaaaattagtaatgaaattagaaagataattgtgaggttgggattcagctaataattaggaattcttaaggactgactcattcttcgaaagttaaatggtttaa

SEQ ID NO: 721783 - DNA, 1978 bp, Homo sapiens
acacccttagaacctaatcaaagtatagaacttagttgtattgcttaatatgacataatcagtcccacttaacttagtcagaatatactgatagtgaattagttatttatgcccagtttttacttaacaaatggttttatgaaaaaaaaaaaaagaaacaaaagctcaactcttaatgcacaccacagtactcaggcctgttcagaaagggacagataatgaaaaacagaacattaaacagaaccatagtgttttttctttaccacttcatttggtgagagagaatgtacttgcttaatgcaatttgctggaggacagaagatacaatacacttccttagaatgtttttgccttccctcttgctgcctttctgccttttgtttgcttgcttaccagctcctgtggctggctgctagacaaccaaatgagagcatcaggcagggaatggttgtgttggcattaaatcacctgaaaaaatgtggtagatcatgtgatatgaaatgtatacatatatatattgaacttggaaaaacattatttttactctgattttatttcttgaaatctgattttgaaatcaatttctgggccattactttaaaatgaattttccaaatacaaaaggcagattgtttcattcaaaagtaggcaatgcaagaaagtgttaaagaataatttcttacgaccatggctaaatgaagttttaaacaagacttatgcaattcttaaacttcagccggctcccctacgtattattcttgtttcatcttgctccctcacacatctctctctatagggtttgtttatggctaaatagctattccacagtctcaagctccttagacatttctgctattgctttgtaaaatcaccctttgctccaaaggaaccatgcatttgttatggggaccctaaagagtctacagttggcaagtggcagcagatcccagctgctgacacttccaaactataattgtcatcatagcattacttcagcttctcacatctaaatgcatttctaattccctctctttgtctctcatcccacctccctttctcccaaaggattgccttcctctaatagcagtcttggaattatcatctgctattctctcgtgacatgcacagaatacacaaaatttataatttatgaatggaaacatctccaaagactgaatggaacaccaagggtaatccaggtttcacatctgtaaagcgggttaaaaaatctcatccccttctgttcctctggttggtgtgagtgcagcagccagccctgccactctaccaagtgacaactgactttactgatcatttgagtttactgccaaggcaggaaaatccagtcaaagctttcaaaaggtctgagcatccacgaaggatttttggaggagcaagggtatttattatatgacctcacctgtctttaaagtgattgacagtccataaaattgagttgtctccacaagctcattcataatccatgccacatcttttggtaccgtcagataaagttgtcagcacatagtaattcacaagtggctgtctcaaattctttgttggagaatatataaagcaccttccccccaaatatctcaaggaattgcttagaggatctgaagtatatcctaccattagtatttaagtcaaatgttacctcttcatttgcaggaggacataatatacactggtggaaattttaagctcatttaacagccatgattcacattattaatgatgcaaattgatcatattacaaaccataaatacaaaattcccttccatgctattcttagacaatctctaggtgcagattttttttaaaaaagtaaactgagacaagcaagattttttttttaccagtcccagttcrtaaaaattagtaatgaaattagaaagataattgtgaggttgggattcagctaataattaggaattcttaaggactgactcattcttcgaaagttaaatggtttaa

SEQ ID NO: 721784 - DNA, 1934 bp, Homo sapiens
gagaatatgccgtgtttggttttttgttcttgcaatagtttactgagaatgatgatttccaatttcatccatgtccctgcaaaggacatgaactcatcattttttatggctgcatagtattccatggtgtatatgtgccacattttcttaatccaatctatcattgttggacatttgggttggttccaagtctttgctattgtgaatgatgctgcaataaacatacgtgtgcatgtgtctttatagcagcatgatttatagtcctttgggtatatacccagtaatgggatggctgggtcaaatggtatttctagttctagatccctgaggaatcgctttaaagctaggcatgatcactccctccacttagctcctagggcacttactcaattcaattaagcactgrgatattttaggaatcatgagttcacatccttatataggccaggcaggtatcatgaaaatgttaagaaagctgtagcttctttcatattggtgtcttattttgcattttttctgacagacccatattaaaagatgtaggaatatgcttctatgcacaaagaaacattttctccagaggttatattcaaaatatttaacaactggccttcagcctgggctccacagttggatgcctcctggctgtagtgctggagccaggtgctgctggactgagggaagggagaagatagactgaagtaagtgctcagggcagcagggctgtgcacagggacttgggcaatggtcatttccaaaccaatatggaaatattttttaccagaataagctgactataagccttagttctctctcattcaaaaaaaaaaaaagtcttcttggcctatcctttgttttcctgtttttttttttttgttgtttgtttgtttgagacagagtctcactttgttgccccagctggagtacagtggcatggatctcggctcactgcagcccctgcctcccgggctcaagcaccaccttactggctaatttttgtatttttagtagagacagggtttcaccacgttgcccaggctggtcttgaactcctgacctcaagtgattcacccgcttcggcttccaaagtgctgggattacaggcatcggctactgcgcccagcctgttttcttgtttttgatagagacatgagtacaaagaaatgatagtcttctataagctcacgcccccattgatagcaggcagccttcattcagctccagccaaatgtcatctagtgccaattagaacttccagttttcttaagagaagccagaaatgcaaatttttattgaatttttaatgtcagtacaatgatttttaaatcactatgcaggccaaacatggtggcctctggcctactgagtatatactatattctatcaaacactgcaaaaattcaaagatgtgaattctgccctgaagggacttgatcatctgatagacatgcaaacaaacaaataaaacttaattttatggttggatggtccatgtgatgaactactctgtataactagtaactttacttcgagtttatgtcttatcattggaccatattaaactctttaaagagtaaagattctatgctgtccatacttgtcctcagcaccgactgccttgcccataatgttttgattgattcgtcgtcctgacgatctcttgcttagcatgtatacaattaaatggacatatgacaaccttgatggtgcagccatttcaattaagtcatctccctgtataatcaatcttacaataagtaccttgcagacagtaggcaaggaaaaaagcctcctgtaattgaaccaacctgatcttgttatgttgattaaagacacaggctacatgcaagaacagtgcagaaggaaatgtaaaaatgcaggcacttccttctgagacccatatgggaaatgaaatttgagagacagctatgact

SEQ ID NO: 721785 - DNA, 1934 bp, Homo sapiens
gagaatatgccgtgtttggttttttgttcttgcaatagtttactgagaatgatgatttccaatttcatccatgtccctgcaaaggacatgaactcatcattttttatggctgcatagtattccatggtgtatatgtgccacattttcttaatccaatctatcattgttggacatttgggttggttccaagtctttgctattgtgaatgatgctgcaataaacatacgtgtgcatgtgtctttatagcagcatgatttatagtcctttgggtatatacccagtaatgggatggctgggtcaaatggtatttctagttctagatccctgaggaatcgctttaaagctaggcatgatcactccctccacttagctcctagggcacttactcaattcaattaagcactgagatattttaggaatcatgagttcacatccttatataggccaggcaggtatcatgaaaatgttaagaaagctgtagcttctttcatattggtgtcttattttgcattttttctgacagacccatattaaaagatgtaggaatatgcttctatgcacaaagaaacattttctccagaggttatattcaaaatatttaacaactggccttcagcctgggctccacagttggatgcctcctggctgtagtgctggagccaggtgctgctggactgagggaagggagaagatagactgaagtaagtgctcagggcagcagggctgtgcacagggacttgggcaatggtcatttccaaaccaatatggaaatattttttaccagaataagctgactataagccttagttctctctcattcaaaaaaaaaaaaagtcttcttggcctatcctttgttttcctgtttttttttttttgttgtttgtttgtttgagacagagtctcactytgttgccccagctggagtacagtggcatggatctcggctcactgcagcccctgcctcccgggctcaagcaccaccttactggctaatttttgtatttttagtagagacagggtttcaccacgttgcccaggctggtcttgaactcctgacctcaagtgattcacccgcttcggcttccaaagtgctgggattacaggcatcggctactgcgcccagcctgttttcttgtttttgatagagacatgagtacaaagaaatgatagtcttctataagctcacgcccccattgatagcaggcagccttcattcagctccagccaaatgtcatctagtgccaattagaacttccagttttcttaagagaagccagaaatgcaaatttttattgaatttttaatgtcagtacaatgatttttaaatcactatgcaggccaaacatggtggcctctggcctactgagtatatactatattctatcaaacactgcaaaaattcaaagatgtgaattctgccctgaagggacttgatcatctgatagacatgcaaacaaacaaataaaacttaattttatggttggatggtccatgtgatgaactactctgtataactagtaactttacttcgagtttatgtcttatcattggaccatattaaactctttaaagagtaaagattctatgctgtccatacttgtcctcagcaccgactgccttgcccataatgttttgattgattcgtcgtcctgacgatctcttgcttagcatgtatacaattaaatggacatatgacaaccttgatggtgcagccatttcaattaagtcatctccctgtataatcaatcttacaataagtaccttgcagacagtaggcaaggaaaaaagcctcctgtaattgaaccaacctgatcttgttatgttgattaaagacacaggctacatgcaagaacagtgcagaaggaaatgtaaaaatgcaggcacttccttctgagacccatatgggaaatgaaatttgagagacagctatgact

SEQ ID NO: 721786 - DNA, 1934 bp, Homo sapiens
gagaatatgccgtgtttggttttttgttcttgcaatagtttactgagaatgatgatttccaatttcatccatgtccctgcaaaggacatgaactcatcattttttatggctgcatagtattccatggtgtatatgtgccacattttcttaatccaatctatcattgttggacatttgggttggttccaagtctttgctattgtgaatgatgctgcaataaacatacgtgtgcatgtgtctttatagcagcatgatttatagtcctttgggtatatacccagtaatgggatggctgggtcaaatggtatttctagttctagatccctgaggaatcgctttaaagctaggcatgatcactccctccacttagctcctagggcacttactcaattcaattaagcactgagatattttaggaatcatgagttcacatccttatataggccaggcaggtatcatgaaaatgttaagaaagctgtagcttctttcatattggtgtcttattttgcattttttctgacagacccatattaaaagatgtaggaatatgcttctatgcacaaagaaacattttctccagaggttatattcaaaatatttaacaactggccttcagcctgggctccacagttggatgcctcctggctgtagtgctggagccaggtgctgctggactgagggaagggagaagatagactgaagtaagtgctcagggcagcagggctgtgcacagggacttgggcaatggtcatttccaaaccaatatggaaatattttttaccagaataagctgactataagccttagttctctctcattcaaaaaaaaaaaaagtcttcttggcctatcctttgttttcctgtttttttttttttgttgtttgtttgtttgagacagagtctcactttgttgccccagctggagtacagtggcatggatctcggctcactgcarcccctgcctcccgggctcaagcaccaccttactggctaatttttgtatttttagtagagacagggtttcaccacgttgcccaggctggtcttgaactcctgacctcaagtgattcacccgcttcggcttccaaagtgctgggattacaggcatcggctactgcgcccagcctgttttcttgtttttgatagagacatgagtacaaagaaatgatagtcttctataagctcacgcccccattgatagcaggcagccttcattcagctccagccaaatgtcatctagtgccaattagaacttccagttttcttaagagaagccagaaatgcaaatttttattgaatttttaatgtcagtacaatgatttttaaatcactatgcaggccaaacatggtggcctctggcctactgagtatatactatattctatcaaacactgcaaaaattcaaagatgtgaattctgccctgaagggacttgatcatctgatagacatgcaaacaaacaaataaaacttaattttatggttggatggtccatgtgatgaactactctgtataactagtaactttacttcgagtttatgtcttatcattggaccatattaaactctttaaagagtaaagattctatgctgtccatacttgtcctcagcaccgactgccttgcccataatgttttgattgattcgtcgtcctgacgatctcttgcttagcatgtatacaattaaatggacatatgacaaccttgatggtgcagccatttcaattaagtcatctccctgtataatcaatcttacaataagtaccttgcagacagtaggcaaggaaaaaagcctcctgtaattgaaccaacctgatcttgttatgttgattaaagacacaggctacatgcaagaacagtgcagaaggaaatgtaaaaatgcaggcacttccttctgagacccatatgggaaatgaaatttgagagacagctatgact

SEQ ID NO: 721787 - DNA, 1256 bp, Homo sapiens
tgaaatgggaaactgtcagtggtggttagtgctctccctgggctctggcgtgtccttctctgtctccctgcaggtcgccacccgcccagtgagttcttctgcctgtctcctgctcttccttcctcactccctccccagaagaggagcyactggcttgacaccttcacactgttttgggtggacctgctcctacacatgggaggaagtgatggggcagggcaaaggaggggaccttgccatgctgtcggcatgtgtccatctgcccagattcgtggacgtctgttttctgcctcatgtgttctgtaaagacacttgtgccatgtgaaggtggcactccttcaaactctgtgagctccaccctcccatcctggcaggaaccatctggggtgagagtcggcgttgctagggagactgggggctgggacatggttttaccaaagtgccatggtcggaggccttcctaaagcaaaaatgatcagaaagccaggctggacactggaaatgcgcttgagggaagatggctgcaagctgggattctccagggatgctcctctctatgggttctcagcatgcaggcacagaaggctggaggattctccctttcttgagaggagacactgttggaagggcaggtgcagccaggagcaggagtcggtggtgaaggagtggggttcccctcagcccagcagcagcggacactgagctcggaggaatctggctggaaggcccaagtttacaaagcctggaccagaggcatctccttgaggagtcagacctgttctcctcttagagtgcagcactgaacctactgggagcgggtggttgagatttttatagagatcactgcagcttttccaatgatatctccactgggacagacatggggatgcaatccaggtctccccatctcacgtgtgctgggtgggtcttaggagcaaaccacagctgtatctgcaagaatcaagcacagaaaagaaagtttcttgtctaagacaatatgtggtcttgctggaccatgattatcccatgcctctgtgtgtgtgtgtgtgtgtgtgtgtgtgtgtatgcacacgcttcccatttggactgtgattatcttgtgcatgtgtgtgtgtgagcttcccatttggactgcgatttatttcatgcatgtgtggtgggtgtgtgtgcacatgtgtgtgcttcccgtttggactgcgatttttcctgtgtgtgtttgcatgtatgtatgtgtgtgtgtgcttcccatttgggca

SEQ ID NO: 721788 - DNA, 1560 bp, Homo sapiens
caggctctattctgcccccttgtttcacagcaccttgaatatcacttccttttcctgcccaaagcaggaggtaaccctgtattaaaagcatagtagcctgtgtgtgtgtacaatacacacatacagcacacatgtctctatttagagattccatgatatgtgttctatatacactttacagtcccttttcttaatgtcaaaaatataatttccagcgtctaaagagtgttttcaaagacttttgccctattttttaaaatagtgtctaaatatgattaagtgtcttcccagagaaaagtcaaagaggctcctagtgttaatttccctattgcttaagacttaagcttttaatttattttatcaaggttgagggagtatagtaattgttgggacaacgcccttccaaaagaaatcgcctgcacttgtttttaagttcaatttgttttctcacacagatttttgatacactcttaaataaactagaaatcacaattattttaatgtggcagagttgtaaccaggaaattgcatatattttcataaactaggctgttatagatttattaatatttattaataacattattttaagaaatttttttaacgtctttcaaccctgaaagggcctgcttgaaacatacacggcagcaaaatcactggagtccagggtttttgtcacacacacacacagcacagatttttttgattatgtagatttcttttcctactgcagtttcatatgcaaagcatgcatcagccacatccatgctatctcctaaagcagtcattctgaaacccaatctggggacagtgcagactaaataaaatttcattttgatttggcctcccgctgcgaatgggactgctttgtctcagccgacagaaccagcaagccagaaaggtatgtcctgttttgcatggctgatggtgtgtcttgcggctcacaatcaggccgccttgctcccggctcctccacttcctgcttctctttctctttccccttccatttgctcccgtgctgcctgccttctacctgcagggcacagccgtggcaaacccgcaccgattgtttactttggcatatgcttaatggcgcgcgtggctgtttgctttttttttttttttcactgtctttgttggtggtggcttttcttttttctgttttggtttttgttttgcttagctttcctcgcccacattggctttccctgtttctcaaggtgtggaatactaaaatactgactgaaaggaaaattgtataggcgctgctgtgacgctccagagattttactggaagatwtgtcatgctgattttattgtaaatttgaagatgcatttaacagctttgaaggaccttagcttctgtggccctttgagccgctttggcagaaaagcaatcgcccattttagagaagggggggaaatagagaataaagactctcctccaatgggactgaactgttttgccatcttagtatgttttataaaatgcattgtggtgttttcctgaagagctgctaaatatggctctgctttaaacaatgaccttcattgggagtc

SEQ ID NO: 721789 - DNA, 623 bp, Homo sapiens
atttacttcctagaaaaccaaggaaggaaattaaaattttgtgaattgataagaattttttagtttgtgactagctataaaataaatagacagaaataagtagttttctatactcagatatttagaagaaaatagagagtgcacagtacaaaaaaaataaaatttctaaaaatcaacttataaatgtgtattttaaaaatcctcaagactttactgacttaaaataagacccaaaaaagcagtgagacataccatgattttgattaaaagattatttrcaaataatttaatactaccaaaatataataatacatttattaggatttcaatgacatttttaacaagacaaaaattattctacagtaagaaatgggtaagaatggccaggattatttagaaatagtaaaataatgaaagaggacttgatctacctagcacttaagtaccttaaaaagttgtaataccttgtagctttatgctgtaaacagtgtgaagttgggcctagaaaagccaggctgattaaaggtatgcgataaaacttcagaattaattgtaaaacatagaagtagttagtatacaataaaaagttttttttcacatcagtgggcagagcagaccattta

SEQ ID NO: 721790 - DNA, 858 bp, Homo sapiens
tgttttttattttccatcaacacataactctcaggaatatgctatcctcagtcaaatgaataagtcgggattttactaatacattgaaagaggccaggaaaaatgagccagagtcatggccaaatgaactgaaatgagcatgtttcaatggttaacaatatgtttattcatatgcattcctagctcaatgagaataaaagtctagctgcttactggaaggatgatattctttcacggcgttctactctgttaatttgtactggaaatcacgaatgctgtaggaggcaaactgtatttaattaatcaacaaacacttgttgagtcccgagtgttctctgggtgccatgtgtgatcctgtgactacagactataagaaacacgagcacagagctcttgtgtcattgtccattgctgtatcacttgccatttgggaagcaaaaccagtctcctctaaccccagataatgcrtagtagctactggcctagctaacctgggagattaggaaacatacacttggccaggaactgatatgcttggtcttaatcccaaatctttcaataagcaattgtgtgattctgtatttggcatctgatttttctgtgcttgcatttctttcacttacagttttggaagtaagaacttgcctttcttttctcagaatggatgtaagaatgaaatttgacattttacaactgaatagcccaatagagctggtttttctcttttagctttagacatcaggaaagtaaactatagaaattgtgaatgcttggcatccttcatataagatttgtttttttctcctttcttttacttagcattttatttcattcatatttttcctagtcttggcttca

SEQ ID NO: 721791 - DNA, 1233 bp, Homo sapiens
aaaaattagctgggcgtggtggcgggtgcctgtagtcccagctactcgggaggctgaggcaggagaatggcgtgaacttgggaggcggagcttgcagtgagccaagattgcaccactacactccagcctgggctacagagggagactcagtctcaaaaaaaaaaagaatgtatatatttattctgagataaatataagaaaaaaacaagaatgtacatatttaacctacctcagtagactgctttccactataagacattttcttgatggccaccacttcattggtacgcacatctcgtgcctaaagaagaaagaaagaaagaagcactgtaaaaattaacaggtgaaatctaggcaactatttctttgcgaatataaaagcatttgtaaactaccatgtcaaaaaggacatcaaaaccacttttaaagaaaattttaaaaataacactatacagcaatacttataaaattatcctggagctagtgctttaaaaagaaaataaagcaaagtaaaaaaataagaaaataaacctttgagtaatctgagaagaaaaatacagaaatttgagtagtactataaacaaagagacaatgcaatacaagtgtataaaagtctatgctaataaagtttgaaatctcaatgaaacagacaactttttaagaaagaataaattactaaaactgacctaaagacaataacatgagtaaaacaatgatggcagattgaaaagaataccaatgaatgatctttaacatagtcttcagtgaaaaacagttttaccaaaggaactttccagaatatataagagaaaaatagaagagctatcccattaattttacaaaggcagtttaaccctataactgaaacctcataaagagtacaaaattgaaagttaggtaccaaytgcatttgtgaatatagatgggaaaactctaaaattagcaaaccaaattttacagggcattaaaagatttttcctttggataaaatatactattacaggctgggcgtggtggctcacacctgtaatcgcagcactttgggagggtgaagcgggtggatcacctcaggtcagcagttcgagatcagcctggccaacatggtgaaaatctatctctactaaaaatataaaaatcagccaggtgtagtggtgcacgcctgtaatcccagctacttgggaggctgagacaggagaatcgcttgaaactgggagtcggagactgcagtgagcc

SEQ ID NO: 721792 - DNA, 2194 bp, Homo sapiens
tgagtaatacatggattcgatgaaaatctttaggacggtacatgaaaaattcacagtacagaaaacacggacttagaagggaaagtatgattttgtagtgtgtccttgactttgaatcacagctccagatccaacatcagcaatcatcaaatcttatttattagttgttattctgcagttactctttcagrtattttttcctctgctatttgtttttcttctctaagtttctacagaaaacaactacgtacctcactccagcttatttttccattcttatcttccaccaaataatccagttagagaagagatgtgcttttgactatgttctctgtttctccacacctaggtattggttactagcacttgtctggcatcctgggttgcccattgtcacctcagtgtcactgacatcacttcagccttaatgcagaagtgaagccaccaaatatatatcccagaattctcttccctgcatggatctaatttagagtttgccaagaagaagtacaaatacaagatttggaaggcttaagagaaagcaaagttattactcttcaagcatggttgtagccaaacatgtgaatggcatacttgagaattctcctcacctccatctaatgccagtggcttctttattctttgattccaggtcttccattggctgcaaaagcctgtgtttcctatattagacatttcacacttgatatatagaaagcggcttttgtttttttagctgacagctaactgactcatctgggatgtcttttctcttacaactctatctctctaagaattacccactattcaagtcacacccactattcactcttccccttcctgcttttccaacttattttccttcccttctttcctcattccttccttcatcttttctttctttccctttctttctctttctttctttctttctttctttctttctttctttctttctttcttttccttccttccttcctttctctctctttctctcttctctttctctctttctttcttccttccttcctttctttctctctttctctcttctctttctctctctttctttctttctctgtctttttctcttctctttctctctctttctttcttccttccttcctttctttctttctctctttttctcttctctttctctctctttctctttctttctttcttgtctgtctttcttcttttttttctttgtctctgtttctgtcactctatcctctctgcctctgaatttgtatctcttgctctttctcatgttttgtcttccttctcttctttctctctctcctccctccctacctttgttcttcttttcatcccttccattgtttctaactttcttcctcaaatacttatcaagggtctaccttttttttttttctggttgtctattactgtgtaccaaaccacctcaaagtcagcaatgcaaaacagtatctattgcacgcatggattttgtgagtcaggaatttggacagggcatagatgtctcatcacaaatactggagcctcaactgggaagattcaaatgtctgagcattctggagacttccttaatcaaatgtctggtctcagcttggacactgtccatgtgtttaaatatcctgacacatggctgtagagttatgagagggagcatcctaagaatgaaagttaagaggctgagttttccaagagaactaacaggtagctgatgaccctttatgacttagcctcagcatgtacatagtatcacttctgccatatcttattggttaaatcaggcactagtctgtttagattcaaggtgtggagataatgaccctatttcttgatgaaaataggtcaaagaactctagaattatgttttaaaactgccacatatataccaattcccagtgagagaccatgtttaaaaaatatgaataatagactttccttcctcaaggtctttttcttgctaccatgaaacaacaacaccttcattaacattttaaacaggttcagttattactgaaattggtaatttctttacttaaatggggtgaatggctgtagtgcagagtaatgtcatcactggacattgtgaaaacaaggttgaagaattgacagctatccctcagatgcaggataaggtgcagggttgactctttctgcatgttataatcaggaaaatatggccacttctagctgcttg

SEQ ID NO: 721793 - DNA, 655 bp, Homo sapiens
taaaaacagaaatctccaagtccaatgccagagttcaaattctctctctgccatttactacttgtgtgaattttgcaatatattaccctctgctgytcatctacaaaatgtttataatacacctacctaataggcagggctggcttcttggtcattcaaataatttgtaaaattacaatcctgatgttaaaaagcagaatatttagacagaaaacatacagtcccactccccaagtatatgttttacatttccatattataccatatttcatattatagctgagaagtttatatatactatatatcatgatctgaaaatgaaaattaactctatcaatttaaagatgtatatgtagtttagtcattgaatttagtatgtcctcataggttagaacatatttcagacaagactaaatatctctgagatcctcaaatgtaaaattcaaagcaaatttaataaactatttttctttctgctagaataattacattgaacacttcttgtcatacatgattacatcaactgcctatccctggctacattttttcttatgaaagagttcttctcaacagttgcaaatttattttcattattattgacctttcaggttgttattgaccaactcaaaaaagttctgaccatatggcaaaatga

SEQ ID NO: 721794 - DNA, 655 bp, Homo sapiens
taaaaacagaaatctccaagtccaatgccagagttcaaattctctctctgccatttactacttgtgtgaattttgcaatatattaccctctgctgctcatctacaaaatgtttataatacacctacctaataggcagggctggcttcttggtcattcaaataatttgtaaaattacaatcctgatgttaaaaagcagaatatttagacagaaaacatacagtcccactccccaartatatgttttacatttccatattataccatatttcatattatagctgagaagtttatatatactatatatcatgatctgaaaatgaaaattaactctatcaatttaaagatgtatatgtagtttagtcattgaatttagtatgtcctcataggttagaacatatttcagacaagactaaatatctctgagatcctcaaatgtaaaattcaaagcaaatttaataaactatttttctttctgctagaataattacattgaacacttcttgtcatacatgattacatcaactgcctatccctggctacattttttcttatgaaagagttcttctcaacagttgcaaatttattttcattattattgacctttcaggttgttattgaccaactcaaaaaagttctgaccatatggcaaaatga

SEQ ID NO: 721795 - DNA, 617 bp, Homo sapiens
caagttcatactatgaggcttttcatgttctgatccttcccagtctcatctcttagaatccaggcctcacatactataccccaagtttacttaacagcttggtggttcctaaatgactatcagaaacaccctcctccctttatctaaatcctactcttcctacagctggcaaatttgggaagaatttctggaacacactgcctacacacaaaattgaattaggaatccttaccctcagtataacatttatcacactatatgtgtgtgtgtgtrtatatatatatatatatatatatattaaagcaaatttactgaatcataacttacattaaaatatgagccatgcattttaagcatagtttatctcttcattaatttagatatttaatttctttcagccattttatgtcatttccaatatatagttcttatatatatttaattaaatttattactagatgttacacattttatgtcaattttacaacacattcacatagtactttttaatttaatttaatattttgctttttcttatatgcttatttatccttttttaattgacaagaaataattgtacatattcatggagtatatagtgatatttcaatacatat

SEQ ID NO: 721796 - DNA, 639 bp, Homo sapiens
cacttcttttattgcatttacaactcttaatcatttcattatgcttcagagtttcagtttatagcttaattatgtttatgttttcctttaaatctttacatacatttttaatcactatcttaaagtcattgtctgataattctatcatttgccatttttggatctgtttccattgacagatttttctccttgtaatgggacacatttttctgctttttctcttgtttttaaatcaaattctggataatgtaaattttgtgtttttaaattgttgaaatttttttaaaatataaagaatgttggacttccaatgttgggtgcatttatatttataattattatgttctttaaatgaacatcatatcacctaaayatgtaaagcaaatattaaaagaattaacaggagaactagacagtaatacaataacagtaaatgactttaatactccaatttcaacaccagagatatcattaatagaaaatcaatagtggacttgaataacagtataggccaaatagatctcactgatatatatatgcacatacatatatatatatacacacacatatatacataaatatgtatacacatatatacatacacacacacacacacacacacacatatatatatagaac

SEQ ID NO: 721797 - DNA, 676 bp, Homo sapiens
tcataaagtatgtatttatttagtaaacaccaagtacaccacaacatcagttacaaaaatcaccaccttggtcttgcaagtgaataataaatacagtgccttaaaatatctggctgccaagatagataaaagagcaaagaagtcagcacatactgacctcaaactctgcagccttcccctgcctctggaggagaaggcacactggatgctgagtgattaggccttggagatagctgcagcactctgaggcactgaataatggatagcctgagaagcccttggtggaggctgcaaaactgccacagggggaggggaggatgcccaagaaccttaaaggtcttgcagtgaccgggggraaaaccagagaagagattggcaataaatctttcaatgcctaagaaaacaggctaccagattttttttaaaaaagtatgcattttagccagaagagcatttgttctcttgttatcatagccactcatttgaaataaatgtatgaatgctatattagatccagtctgagaaagacagaccaaaattatctattcaaaaccattagttgtttaaccctggcttgcagattagcacaaattaattgacagaacacattttgccgggaattttcagaaggctttccaaatggttaaactgagacacattattgatcatcaagagt

SEQ ID NO: 721798 - DNA, 1543 bp, Homo sapiens
ctttcttttatgttttgtgtgtaccatattttttccactgcttcgttttacacattttcagcctgttgtttgattgataaatttgtttgctctttctttttatgttaatttagaaattaccatttgtatttctattcttttagtggcaacattaaaattttttgcaatcctacttaatttcatatttttctaacaaaacctaaagtttgctatttctctcttactcctaaaatgttttagcttgttttatcctccaaacactgcccttccttttttctaggatattgttattcccaataatcttaagataattagtgactattaatattccttttagagtcagtaattaggctgcactcatattccaatgatatcttcctagagagtcacaaattcactagtccactatttcttcattcagtaactacagatgggcaataaattcactacatcctagtacctgaaaatggtattctgcctttactattgaatgatagcttagctagttatagttacatgttgagagttattttccctctctgacaacttataacatctattgttgcttcctagaaggctattgtgaatttaattttactcttttttaggtagtaaataagagtaaaattttttttactctatttaaaaaatagaaaatttttttaaattttctattttcttttcattgtttacagggttttttggttctgagtctaattggatttacttttatttttccttttcagcttgcagtgtgtattttgtgacaataaatttcttgtcttcaattcagaaaaacactaagctattatctcttgaaatgctacttctctgctattccctctttttcctgcttctggaactgttatatgtagtttggggctcctcagtctatcctctgtgcttcttaattttacttagatattttccatctctttgtctatctctcctgaataacaggtcaagctttcagatatttcctccagttaactctttcttttttggctatgttcaatttactgagtttattacagtgattacattttttttatttctcaaacctatacatttaaaaaatcatctcctgtaattgactcataatcatctatatttattcatatcttgctcctgctgtgtatttttcctatatgattttcaggattttaaccatgtacattttaatgtcctgttcagaagattgtaattttctgggtaatgarttttatcatttatgaaatttgttggctattatgagtttagttttcattcatagaattttagttgcaagaccaagttaacaatttccttgtgttttattttaactttttttttttctatttctctctcggcactcacttctatatgtctggtctttttatagttgcctctatttgggttacccaagtctccagtcagaaacaagtcttgtattggcagctcagaattaccattctgggagctgtaacaaattgagggtccaagtcaacatatggcttgagcatattcagctgtctctgcttcctcctgccatgccatccagcac

SEQ ID NO: 721799 - DNA, 1191 bp, Homo sapiens
aatgtcttccaaaaaaaaaaaaggccgggagtggtggctcactcctgtaatcccagcacactttgggaggctgaggcaggtggatcatgaggtcaggagtttgaaaccagcctgcccagcatggtgaaaccccttctttactgaaaatacaaaaaattagccagcatggtggcacatgcctgtagtcccagctacttgggaggctgaggcaagagaattgcttgaatgcggcaggtggaggttgcagtgagccgagatcgtgccattgcattccagcctgagtgacagagcagactccatctcaaaaaaaaaaaaaaaaaaggtcacaaaacttgtcagcattcttatctgtagtaggcaatcttgtgaaaatgcaacagacttgataggcaaatggagctttaagatgaagttctgaaaggatcaccagtccttgcaaccatcgctacagccagcccttactatgtatagatttgagagccacgagtggctttctgactcttgatgttggctttgccgtggttcccccacaattctctccttgttctctatgcttttctgggatgattttaatcattcctgaggagtttcctaaggtgactcagcttttgcaatgtgattaaaaataagattgcctcttagcaagtgtgggtgtctggggctcagggagtgactgggatagatcaagtttgcttcctgtgactgctgtcattcatcctttctccctacattttctgatatagggagaaacaagtttgggaactctaacaacatggaagtgaaatgtgtacacctaaaataagaggttggctgggcgtggtggctmacgcctataatcccagcactttgggaagccaaggcagaaggattgcttgagcccaggagttcaagaccagcctgggcaacatagcaagaccctgtctctacaaaaaaattttaaaattaggcaggcatgggggcatgtgcctgtggtcccagctactcgggaggctgaggcaggagaatcacttgaagctggaaggcagaggttgaaatgagctgagatggcgctattgcactccagtctgggtgacagagcaagactctgtctcaaaaaacaaacaaacaaagatgctacttaccagtaatacttattgatctgatcaacatgggataaaaacattttatttaagagtcaggccatcaaagaaa

SEQ ID NO: 721800 - DNA, 2002 bp, Homo sapiens
gctctgtagagaaataggtaaacaccagctgggcatatctggcaacactttcagcaataaaatcaactttgggttgtgaaaaccagatttatttatttggatatgggacaggatgggcctttggaaatttttctaaacctcagtgccatttttagcatcttttagagatgcaaaataatttaacttggtggcacagaaatggattctacgtggcagagcctgggatgactgatttccctctgtggaactggcctgtatttggggtgcagctgactaggccgcacctcagcaagcactgagaattcaaaccagctttgcccagagcagaggtccacaaactttttctggaaagggcaaaatcataaatattttagactcaaagttgtctgccaccactcaccgactctgccattgtagttcaaaagcagccagagacaataagtaaataaatggctgtaggataaaattatctttatggatacygaaatttggatttaaactttttcacatgtcctgaaatgtaatttttcttttgttttttcccaatcatttgaaaatgcaaaaagcattcttaaagagctgtacagaaatatataatagggtggatttggcccctgggccacagtttgctgacctcggctggatcaatggctctgagacatcagcactcatcagcatccacgtggagggcttatttcatttatttatttgaagcctacaactcatagaattggaggacttattttaagcaagatttccaggcctcaccctaagggtgactttctgagtcagaatgtctaagacacaagtccccaacccccaggccacagacctgtaaccgtgagtggcctgttaggaaccaggccggaccgcaggaggtgagtggcaggcgagtgagcgttatggccagagctccggtcagaccaggggcggcgttacattctcacgggagtgtgagtcctgtcgtgaactgcgcgtgtgagggctccgggttacgcgctcctcgtgagactctgatgcctgatgatctcagggggagcaatttcatccccaaaccatcccccatcccaccacctctgccctcggaccggattttgtcttccacaaaactggtccctggtgtcaaaaaggttgggtggggatcactgatttagggtgtagggtggagctggaacaacattcccgccacccccgcataaccatttcattcacagcatcaagagtctgaacatttttaacacatttccaggtgacccgttgctacaggtctggcctagaattctttttttttttttttttttttttgagacagagtctcactctgtcgcccaggctggaatacagtggtgggatctcggctcactgcaacctctgcctcccaggttcaagcaattctcatgcctcagcctcccaggtagggggaactacagcagttgccaccacgcccggcttattttttgtattttagtagagatgaggtttcaccttgttgcccaggatggtctcaaactcctgagctcagacaatccacctggcttggcctcccaaagtgctaggattataggaatgagccgccgtgcacagcctggcctagacctctacaaagcctgctgtcttgtttcattcaacagcttgaggttccagccccaatgacagtcacattgtataaggactgatctttcatcagctgtggctgtggtacagaaagtcagggctgggcctccaccagaggggccttggggcaaaagggaagcaagacaaaaagaagtattcccatccaggcaagcagcaggtccagaaggtgaataagaagttgatgctggagcagcttgagtcttctaggaatgccagtgaatcaaccacctaaccctggcctgggattcggtcctggctctgggttcaaggcagcctcagctcaaggcactggagggttgggagcaggctctgtaagggtggggcctgggatatgtgtggggccaggaacaatctctccatgatcttt

SEQ ID NO: 721801 - DNA, 1661 bp, Homo sapiens
tgtttctaaagactctttaatctgttgtcaaaacccaactacagcacatggagaaataagaaaggattatttcacaggcaatttgaattgttttttattcatagtaataaaaattttcattatagtaaatgaaattcaaaagggctaaaatatattaatttttcagtttatccttttagttggacatagtatacaacaaagcatattttaatttttatcacaaaaataaaataatgattaatcaataagcagaggtgggacaaaagagatttctgttcaacaaagggaattgaaattatttgcgtcataaatattcacagttttatttttaaatttggtgaacttgcaaataatttacaactgggaatgggcgatgaaaagaatccaaagctatgccgctccttttacaacgttttagtaatatatttcataatttcatggtgcttatttccactgaggcacacagagccatttaaatttattttaacaatgttttcagccttaaattctgtttctggacaaactttagaacttttttatgtaatatgtttttatgagtttatcttaagatttaaataaccagtcaggtgtggtggctcacccctgtaatccagcactttgggaagccaaggcaggcggatcacgaggtcaggagtttgagaccagcctggccaacatagtgaaaccccgtctctactaaaaatgcaaaaamttagctggatgtggtggcaggtgcctgtattcccagctactcaggaggctgaggcaggaaaatcacttgaacctgggatgcagaggttgcagtgaaccaagatcacgccattacactccagccccggtgacagtgcgagactctgtctgaaaaaaaaaaaaaaaaaaaagatttaaataatcttgctaaatgatacaataaagaaaaaatgattatatactatcacaactaacagttcttggccataatcattaacttttataaaaaaagaattttaatattttacagagtagaatattttacaaattataggagagatcttttcaaaatttttgaatatgtcaatttatagatatcactactaataaacattgttaataaacatttataatatgaaatttactctttcttctattaaaatatatttcttttctctatcagaaccttgacttcattatattaagataagcaaagagatgtttaaacattgttgggcagcagagtttcataagcaagcggctagtgcaagctcagtgaaaaggagcatttttatcttcattgttgttgaaatatgttatcttggaattggaaaatgtttaacttatccaggtaaaaatgcagttattgctttatctacctcagaaacctccagaaagcaggaatgaactgatgttattatagctgtaaagcacactggaagttacaaaatgcgtctcacttgatctcttaactctgtggagacaaagaccattttcttcattttacagctggaaaacctgaggctcagacagatactgtggaatgaattgccaagtttccacacatagccagttgtggcaggtatggtcaggtcttctgcctcatcatccagcacagtttatcctgaggaagataaactgggtcaacgagacaaagtatgcaaggtttttttattgactattaataaaaa

SEQ ID NO: 721802 - DNA, 1661 bp, Homo sapiens
tgtttctaaagactctttaatctgttgtcaaaacccaactacagcacatggagaaataagaaaggattatttcacaggcaatttgaattgttttttattcatagtaataaaaattttcattatagtaaatgaaattcaaaagggctaaaatatattaatttttcagtttatccttttagttggacatagtatacaacaaagcatattttaatttttatcacaaaaataaaataatgattaatcaataagcagaggtgggacaaaagagatttctgttcaacaaagggaattgaaattatttgcgtcataaatattcacagttttatttttaaatttggtgaacttgcaaataatttacaactgggaatgggcgatgaaaagaatccaaagctatgccgctccttttacaacgttttagtaatatatttcataatttcatggtgcttatttccactgaggcacacagagccatttaaatttattttaacaatgttttcagccttaaattctgtttctggacaaactttagaacttttttatgtaatatgtttttatgagtttatcttaagatttaaataaccagtcaggtgtggtggctcacccctgtaatccagcactttgggaagccaaggcaggcggatcacgaggtcaggagtttgagaccagcctggccaacatagtgaaaccccgtctctactaaaaatgcaaaaacttagctggatgtggtggcaggtgcctgtattcccagctactcaggaggctgaggcaggaaaatcacttgaacctgggatgcagaggttgcagtgarccaagatcacgccattacactccagccccggtgacagtgcgagactctgtctgaaaaaaaaaaaaaaaaaaaagatttaaataatcttgctaaatgatacaataaagaaaaaatgattatatactatcacaactaacagttcttggccataatcattaacttttataaaaaaagaattttaatattttacagagtagaatattttacaaattataggagagatcttttcaaaatttttgaatatgtcaatttatagatatcactactaataaacattgttaataaacatttataatatgaaatttactctttcttctattaaaatatatttcttttctctatcagaaccttgacttcattatattaagataagcaaagagatgtttaaacattgttgggcagcagagtttcataagcaagcggctagtgcaagctcagtgaaaaggagcatttttatcttcattgttgttgaaatatgttatcttggaattggaaaatgtttaacttatccaggtaaaaatgcagttattgctttatctacctcagaaacctccagaaagcaggaatgaactgatgttattatagctgtaaagcacactggaagttacaaaatgcgtctcacttgatctcttaactctgtggagacaaagaccattttcttcattttacagctggaaaacctgaggctcagacagatactgtggaatgaattgccaagtttccacacatagccagttgtggcaggtatggtcaggtcttctgcctcatcatccagcacagtttatcctgaggaagataaactgggtcaacgagacaaagtatgcaaggtttttttattgactattaataaaaa

SEQ ID NO: 721803 - DNA, 635 bp, Homo sapiens
ggtcttcgaaatttaaaaaaaaaaatggaggagggaagatgtaaaaactcttgttaaacattaatatttttattttcagagaaatattttwaaaaatatcttccctctggaaggcaggagtaaattcaaactcttggatcttgagtttctttatgaattaagaaagctgatttcattgaggagtaattgcaatttggattaagcagttatgattgtggcctattttggaagataaaactttcaaaagatggaatatcgtgggtgaacttttgggcagggtcatatgctgagctattttctaaacatttgtaaagtaacttaaagaaaaatagaaataagccaagagagagattgtaatctataatcaatatcatatcatggagtttccagctgtcatttctaacaactttagaagtgaccattccttcctgtgaacttcagttcaactttgcatacaccatgacatatggcacttttacaagtttcatcttccccaccgaattctaaattccttaaaggcagtgactgaactttacttacctctgtagctcctatacatacaaaaagcacagtttgttgtaccagtaggtgctcaatcaacaatgaatgaatggtaattaaaagagataattgct

SEQ ID NO: 721804 - DNA, 926 bp, Homo sapiens
tatctaaatattttttcctgtgtagagtcaccataattatactctttttcttagtggtttgatattttattgtgtctatttttttcttgttggacataactttgtctaacttatttattaattctgtgatagtggcttttgctccttaagttgcttccttcattctggaatttagctcccacttatcattttcttaatgtccttcttttataaaattatgttcttataatctcctatagaagggagaataaagtcttcatggtgagttatcctctcattttagattgtttccttccagaatagatttcttatctgcttatttctttctattattttttccatatagaatgtttttatagttgccatgccatttatttctaggtttttttttgcatgctttacatcagtaactctgttagatgttttcaatgctcatatagaatacgatcaaattctcttttatctacttctcttctatctagaacattttaatattttcctctgaatttcactttagagactgtggttgagtctgcctatttactcttagtccaaatttctccaaattggggtggaacatgcagtattaaaaatattcttagaaattgtaaagttacttcttcctctccatactgttaaactcatctcagttttctatttttcagcataataaatctttttgattgtctcatccccaatttataaatttacaaatgatacatgaacttatggaatataaatggcrcatggccattgtttgaaatattaaagaaatattaaaatagatgaacagagacagaaatgcatatatgtgatatcctttcatatttcttggttttcaatgaaatagtctttcttaaaagtaaagagctaattttggtcttctccagaaaaaaatttacccacatccctaaaaccctaagaat

SEQ ID NO: 721805 - DNA, 987 bp, Homo sapiens
ggattaaagataatgcatgtaaattgcctggtacataatgggcagtaaaggcatgctagcagttgtttttatggagacctgctgggagtggaactggaagttcaatgtgaccaaagaacagattctgtggaggaaagcagcaagggaatagtttgagagacaaaatcatacatggcttggaaggcattctaagaaattgtttctgtaggatacgggcagcttcagtagtgcatgatggaaaaggaaaagcttgagaattgtcatagtcagaatagaatctaatatctagatattgataaactgctttctcaccttttcaggagagtaagtgtggcacattggagagaatttaaggaaatagcttcttttttagaaataaagtagtttctatcagctttatgatctctacactttttattgtacatcttaatttttaaaatgtaccctgttttacttataattatattcattaactaaatcactaaaattatgtatattgtagaacattataatagaaatattaaggtgaactaaagatgtgttttaaaataatttttattttttatttatgaattatatttacattgttttgctcttattagaaatgttattaatcatttttttgagagttctttgactgactcttccttattcttctttaaaatgctgatttaacactttgaaatacagcaatttcargatcagtttatttataatctttatcttaaaaatagtcatagccaaaaatgacaccacacaggatcctggagaagttgcatcattagctggttataaatcatgagccttattttgtaatgctatccctcaattctgtaaaggcttttggtaaaattcagcaggtaaattaccattttctctgatgtctatcagttcattctaaaaaccaatcaaaaggtgttgcatttttatatttttaacaaatgggcttaaaaccctctgcaactgttctttcggcagattatttta

SEQ ID NO: 721806 - DNA, 987 bp, Homo sapiens
ggattaaagataatgcatgtaaattgcctggtacataatgggcagtaaaggcatgctagcagttgtttttatggagacctgctgggagtggaactggaagttcaatgtgaccaaagaacagattctgtggaggaaagcagcaagggaatagtttgagagacaaaatcatacatggcttggaaggcattctaagaaattgtttctgtaggatacgggcagcttcagtagtgcatgatggaaaaggaaaagcttgagaattgtcatagtcagaatagaatctaatatctagatattgataaactgctttctcaccttttcaggagagtaagtgtggcacattggagagaatttaaggaaatagcttcttttttagaaataaagtagtttctatcagctttatgatctctacactttttattgtacatcttaatttttaaaatgtaccctgttttacttataattatattcattaactaaatcactaaaattatgtatattgtagaacattataatagaaatattaaggtgaactaaagatgtgttttaaaataatttttattttttatttatgaattatatttacattgttttgctcttattagaaatgttattaatcatttttttgagagttctttgactgactcttccttattcttctttaaaatgctgatttaacactttgaaatacagcaatttcaagatcagtttatttataatctttatcttaaaaatagtcatagccaaaaatgacaccacacaggatcctggagaagttgcatcattagctggttataaatcatgagccttattttgtaatgctatccctcaattctgtaaaggcttttggtaaaattcagcaggtaaattaccattttctctgatgtctatcagttcattctaaaaaccaatcaaaaggtgttgcatttttatatttttaacaaatgggcttaaamccctctgcaactgttctttcggcagattatttta

SEQ ID NO: 721807 - DNA, 690 bp, Homo sapiens
aaaagaaaataaaaagaaaccaaaatctatttgcaaaattgaatttgaacttttaaaaataactttatagagaaatagtttaaatacactaaggtgatctcattttaaatatattattcaatcaggtgtttgtttagccttataaaaacctgtcaaactatcttgcaatgtaattatgccattctacactccaaccaaaaatacatgagagttctgaaatggtttttgcctttataaaatttcactaatgtttctgctgasagtgatttaatttttagcattttataaataataacaaacaggtgatggattgcttatttattataatgtattacgattatttgcttcactatattcaggagatttaatacaggtgcatgcagagaatgattagtgttttttgttgttgttttcttttttgtctggcttatattcctattcaggcctttctgccttcactagaaattaaggagttatattttgaggccatgaataaaaatatagataaatcacaaaacatataatgactatttgacacacttacggtagtatctgatgctaacaaagaacatgatgttttctactttaaagaaacccctagacaatagttctatcttttcatgtatatgctgtaaaatttactttttgtggtatttccagggccgttgaggtccagatgccttgattcta

SEQ ID NO: 721808 - DNA, 1055 bp, Homo sapiens
tctttatcctaagatcctgaaaccacaaacacacatctacaactgagtgctatcatacttaacacatatgtaacatgcaatagtcactttgctatatgaaaccaacatgtctggaactgttttataatactcccagagaaatatgggagaaaaagtttgacctaaattaatttgctagcaaatccttatcataatgacacggctgataaagaatctggagtatgagtattgaataaatcagccccggggggaggagcgggttctttaagaaccaagagcaagtatgcagcaccgtttgcaggtcacctgttccccctttaacccacaaatctggttctcctctcgttctatcttacttcagccgcaaggaaaatcagtcatatctttggtctttccattcttaagcaaaacaagacctttctggcacgtttcgtgagaatcccagataaaagttatayctgtaaagttctacagcttgcctgaaagttctcaggactcttaaatttcccggtgggaagcagggaaaaaaccaagtacaacttccctcctcagtctctcccgataaatgcaccagtaagcaaaatttgatagaaaattaaagacataattctctatttgacgttatatgaataaaaacaactggcatactattaggtttcttttgaatggtgattcattctagaattcagccccaaacttttttgtactctcctctttaaacgttttctttcataataaatagcagagacaaaagtgtttctattgggaagtgtgagagtaaagagatatacaattaactagtggtctgctcagttacaggaaaaatgcctgaacagcattctgttatcttgcaataatggggccatttatgtgcatcacattttcattttcagttctgtgctaatttaaatcattttcatttgaattcccaatcttaactttttcccctacacatgcctggctaataaaaatgcttgatttattaatattgcacttattacaatattaattgtactttattaataaagagttacagcactttattaataaactaa

SEQ ID NO: 721809 - DNA, 1055 bp, Homo sapiens
tctttatcctaagatcctgaaaccacaaacacacatctacaactgagtgctatcatacttaacacatatgtaacatgcaatagtcactttgctatatgaaaccaacatgtctggaactgttttataatactcccagagaaatatgggagaaaaagtttgacctaaattaatttgctagcaaatccttatcataatgacacggctgataaagaatctggagtatgagtattgaataaatcagccccggggggaggagcgggttctttaagaaccaagagcaagtatgcagcaccgtttgcaggtcacctgttccccctttaacccacaaatctggttctcctctcgttctatcttacttcagccgcaaggaaaatcagtcatatctttggtctttccattcttaagcaaaacaagacctttctggcacgtttcgtgagaatcccagataaaagttatatctgtaaagttctacagcttgcctgaaagttctsaggactcttaaatttcccggtgggaagcagggaaaaaaccaagtacaacttccctcctcagtctctcccgataaatgcaccagtaagcaaaatttgatagaaaattaaagacataattctctatttgacgttatatgaataaaaacaactggcatactattaggtttcttttgaatggtgattcattctagaattcagccccaaacttttttgtactctcctctttaaacgttttctttcataataaatagcagagacaaaagtgtttctattgggaagtgtgagagtaaagagatatacaattaactagtggtctgctcagttacaggaaaaatgcctgaacagcattctgttatcttgcaataatggggccatttatgtgcatcacattttcattttcagttctgtgctaatttaaatcattttcatttgaattcccaatcttaactttttcccctacacatgcctggctaataaaaatgcttgatttattaatattgcacttattacaatattaattgtactttattaataaagagttacagcactttattaataaactaa

SEQ ID NO: 721810 - DNA, 1802 bp, Homo sapiens
  misc_feature 1686: n = A,T,C or G
aaactacaccaaacactcatccattccagtttcagcaacccaaactaagtgcatccaacaaattctaagggacagcctcaaactctgtttagactaaaactgacaggacccacatccattcagaattatatcttattctttactatgttttactagtctgataagcctatattttcacagcactttttcactttggagctgtagattcataataactactctgcaggattgttgcaaaaacaatatcaattatcattatttccatgttttattcatcctgtcaaattcatttttattcagaacctacaatgtgaacaagacaatacaggacatatttgtttatgaggttttgagtgaggcaacctgtgacgatagtcaaggcagtggctcaaatgttagcgaaactaagtaagttttactctattccatttatacaaactcaatacctcaatccccttttgaccatgtggaatcttaaggaaaccaacaacatgacccaagaacataagatgctctgtcagctcactttataagctctaggaagaattaagcacacacacgtaaagataccagatatatgaagtttcaaccaatatcaagatcactaaaaagcattttggatacatttcaaaggaagtaacaagaatatgttacccatcaaaatcaaaacacttagccatcactaaaatttcataagacaaattggagctgccaaaatctagaaatttcattcacttcatggatgaatatagtgtttgcattcctgcttcacttaacaaaaacaaaaatatagatggaaattataaacacaaagttagactcttctaagagcttaattgctcaacattatgattttctagatattatcatatattttaactgacattaacaacagtttacttcaaattgtaattcataatacaaagcagcaattatagttttaggtatcatgtattaaatcatatcttgacaaatggcagacttgtttatttgtttgccattatgaaagattatgtttgcttattattttttttacaaatatgagaataggagatacaatgtatattcttcatagcaatgtggtaataaagaggttgaggtgtctcctatatagatcttcaatatttataaattcaaaaaatgctattgtcttcagtctgaagttggctgacatattcattttgaatcaatataatttacttttcaatgaggtttaagtggctaccatgtataaagcactgttaaatattctgcatgacttaaaaatacacagtcagtctccattcttcaataaaatcataatctaagaccatgaataagatacagggaatttacgtgaccagataatataattggtatgccattgttgcgaataaataagaagatttaaatgatggcgagcacttctccatacagtgcgattgagaaaaccttcacacagtcctaggtgacactgattttcaattcctaacaaatggaatatttttagccaattcacagggggagcaaagtacaaaagtgtttgagaaaacaccagaattatacttgaactagaaggaaaggaggctaaaaattaggaaaaccaaaatcacgggataggaaaatgagagagaaagtraaaggccaaggaatggtcaaagcaaaagtagacaaacacacacacaaaaaatgtgtctacccctgagncatctttgttctaatatttggtatatttgtgtcttggttttcaacgtgaaactggggctggtcggaagaaatactgttgacaattacttatgcctaatgttttaagaaaaacaagg

SEQ ID NO: 721811 - DNA, 1802 bp, Homo sapiens
  misc_feature 1686: n = A,T,C or G
aaactacaccaaacactcatccattccagtttcagcaacccaaactaagtgcatccaacaaattctaagggacagcctcaaactctgtttagactaaaactgacaggacccacatccattcagaattatatcttattctttactatgttttactagtctgataagcctatattttcacagcactttttcactttggagctgtagattcataataactactctgcaggattgttgcaaaaacaatatcaattatcattatttccatgttttattcatcctgtcaaattcatttttattcagaacctacaatgtgaacaagacaatacaggacatatttgtttatgaggttttgagtgaggcaacctgtgacgatagtcaaggcagtggctcaaatgttagcgaaactaagtaagttttactctattccatttatacaaactcaatacctcaatccccttttgaccatgtggaatcttaaggaaaccaacaacatgacccaagaacataagatgctctgtcagctcactttataagctctaggaagaattaagcacacacacgtaaagataccagatatatgaagtttcaaccaatatcaagatcactaaaaagcattttggatacatttcaaaggaagtaacaagaatatgttacccatcaaaatcaaaacacttagccatcactaaaatttcataagacaaattggagctgccaaaatctagaaatttcattcacttcatggatgaatatagtgtttgcattcctgcttcacttaacaaaaacaaaaatatagatggaaattataaacacaaagttagactcttctaagagcttaattgctcaacattatgattttctagatattatcatatattttaactgacattaacaacagtttacttcaaattgtaattcataatacaaagcagcaattatagttttaggtatcatgtattaaatcatatcttgacaaatggcagacttgtttatttgtttgccattatgaaagattatgtttgcttattattttttttacaaatatgagaataggagatacaatgtatattcttcatagcaatgtggtaataaagaggttgaggtgtctcctatatagatcttcaatatttataaattcaaaaaatgctattgtcttcagtctgaagttggctgacatattcattttgaatcaatataatttacttttcaatgaggtttaagtggctaccatgtataaagcactgttaaatattctgcatgacttaaaaatacacagtcagtctccattcttcaataaaatcataatctaagaccatgaataagatacagggaatttacgtgaccagataatataattggtatgccattgttgcgaataaataagaagatttaaatgatggcgagcacttctccatacagtgcgattgagaaaaccttcacacagtcctaggtgacactgattttcaattcctaacaaatggaatatttttagccaattcacagggggagcaaagtacaaaagtgtttgagaaaacaccagaattatacttgaactagaaggaaaggaggctaaaaattaggaaaaccaaaatcacgggataggaaaatgagagagaaagtaaaaggccaaggaatggtcaaagcaaaagtagacaaacacacacacamaaaatgtgtctacccctgagncatctttgttctaatatttggtatatttgtgtcttggttttcaacgtgaaactggggctggtcggaagaaatactgttgacaattacttatgcctaatgttttaagaaaaacaagg

SEQ ID NO: 721812 - DNA, 1737 bp, Homo sapiens
ttattattattggactgagtcttgccctgttgcccaggctggagtatggtggcacagttagagcttactgcagcctcaacgccctgggttcaagtgatcctcccacttcagtttcccaagtagctagtatcacaggtgcatgccacgacacacagctgatttttgtttattttttctagagaagaggtctcagtgtattgcccaggctaatttttgtaacttaaaagtaacattaactaagtcaraaaatatcttgtggagcacaataacagggttatgtgatagtaatgagattgaccaaagaatgaagatgttccaatttctcaagtaccttttgaaagtctaagtttttattctacatttatagaaatcctaccaaaagaggaaattaggaaataatttacctatttaacaagctacatccagaggtcaacacagctgaacatgaatatattgtttcttcaatttacacttttattttcttaatgtttattttggaaatcattgtcaagctatataaagctttaggataatcatctttatcatgtatccttattttttaaatttagaatttggctctcattaatgtcctgtgaggaataagtttaaatgacaatgactgctgaaataaagacattctggtaaaaattgtaatcactgggaagatccacccaggtgcctctttgggacctagggactcattttttagctgttgggagtatcgacagctgatgacttaaagctgaattattttccatgaattgcctttgttggaagaaaactgctttacccaagccatgactctccccagggtagccaatattccaatgactggcccatgtagggggatctaaacttgatctctcacctttattatggaatttttgaaggacaaaactctctgtaggattggccaaggctctattgcaataacattataattcaacctctcctcctgctaagttcatccttcatacatgttgtttctccatccctagtacctcctgtatgaaaatcttaaacagtctcaaaatctgtttcatacgacctatgaaagaggctaagattcacatatatagaatcaacttttctttacagtatatgtttgctacaaagataagccaatttacagtgatattttccctcaagcaatggagcctgtaaggatagccagagcccagaagataattcataccatataagacaatctgtacttcagggagagagtgttctaatacttctacatcattttacagaaagtgacagaatatgattttagaaaaattattcttgcaacgaaaggaaggggagattgcagagatacagagatacatgttcaggcactattgttttagtgcaggtgagaagtagtaagggctgaaagacagataatgcagtgggggttgaaaggagaaatatgaagagccatggaggaactagacataggacttagctggtgactgaatgttacatgtgaggaagaaagaagaatcaaagggtaattagaaatttctagatcctttggttgtctgagtcaatggttatatccttcactgggctgtgataactgaagaagaaatagactatgggagaaagataaattagtcttagactccctgattttcaaccaaaaatacttagggagaatggagtgatgttgaaagagagaggagagtctaatttgactagtatattagaaacgtgaaggcttctagattgttttattttcataaaaaa

SEQ ID NO: 721813 - DNA, 1983 bp, Homo sapiens
  misc_feature 1344, 1345, 1346, 1347, 1348, 1349, 1350, 1351, 1352, 1353,1354, 1355, 1356, 1357, 1358, 1359, 1360, 1361, 1362, 1363,1364, 1365, 1366, 1367, 1368, 1369, 1370, 1371, 1372, 1373,1374, 1375, 1376, 1377, 1378, 1379, 1380, 1381, 1382: n = A,T,C or G
  misc_feature 1383, 1384, 1385, 1386, 1387, 1388, 1389, 1390, 1391, 1392,1393, 1394, 1395, 1396, 1397, 1398, 1399, 1400, 1401, 1402,1403, 1404, 1405, 1406, 1407, 1408, 1409, 1410, 1411, 1412,1413, 1414, 1415, 1416, 1417, 1418, 1419, 1420, 1421: n = A,T,C or G
  misc_feature 1422, 1423, 1424, 1425, 1426, 1427, 1428, 1429, 1430, 1431,1432, 1433, 1434, 1435, 1436, 1437, 1438, 1439, 1440, 1441,1442, 1443: n = A,T,C or G
tgtacaacctgaaaaaatgcagtgattctttaattgtttggtaagacttaaccctgaaagcacaaacataacattaaaggaatctacatgtaaagaccaattcaatgtatttaatgtctaatagttcattaatatttcatatgaaatatcattttagctaagctttcaactttattggcataaaatctatttttctcttgggaattatttaaatttctaatttgtagttaactttcctttttttctttaatattttatgtttgccattattttaactgattgacctaccaagcaaactgcctaccccattatctatcttcaaagcagtttttctatttattgatattatatattatttgtttactatttcattaatttctcttaatttaattttaatcttcctcatgtttcaggaagtggttttgtggttcttttttgttctctttgtggttctttttcctagatttttagatgaaaatttaactyatattttttatttttattaagcatattttgatagataaatttacttctaagtcctcaattagctgcatcccatttttatagtattttcaggatcatttaattcttttttttcattttgatatcctaattaaaccatgaattacttaggtgagcattttcaagtttccaaatgatatatacttgtttatttcttctttttcttttattttttaactattattttgttgctttgttttctacttcaattatatcatgatcatgaaatatgttttacatgatagtgacttttggaggctgtgtgacttcttttgagatttattacatcatcaatttttgtaaaatatttgtcatttttatacctgttagatgtagattacaaatttcattgttaattttctggaaccataatctatcgggagaaattcagccagatatcgggagaaattcacctctgatatttcacataggttcttttctattttccctaagtgtcggctgttctgagaaataaagggacagaatacaaaagagagaaattttaaagctgggtgtccaggggagacatcatatgttggcaggttctgtgatgccccacaagctgcaaaaccagcaagtttttattagtgattttcaaaaggggagggagtgtacgaatagggtgtgggtcacagggatcacatgcttcacaaggtaataagatatcacaaggtaaatggaggcagggcgagatcacaggaccacaggaccggggtaaaattaaaattgctaatgaagtttctgcatgcattgtcattgataacatcttatcaggagacagggtttgagagcaggcaaccggtctgaccaaaatttattagnnnnnnnnnnnnnnnnnnnnnnnnnnnnnnnnnnnnnnnnnnnnnnnnnnnnnnnnnnnnnnnnnnnnnnnnnnnnnnnnnnnnnnnnnnnnnnnnnnnngattcgagctcgtacccctgagttctcctttaaggttgattctgaaattagaggtgcaacagagctgcaggccatgagcagggccagcaccacctcctcaagattgtttagaaacggtttagaaaatccaagccccatataaccatccaagttcaacttcctgagcccccttgagaaagtcttctgcacacacatttattgagtatcccctgtgctaagacttcaaagatgtataagaactctccttgactcaaagagttcaaagtccagtggagaaagcatttacataaacaaagaatttaattggcattaggggctgtgtggagtgccaaaggagcagctagtctgagcagatctgagaacgcattctggaatgcatgctgatggcattcaacttggcaggattagcaagagtcagccagtctgaagtgacagatgttgtcctccttatagggagaccctccacattcagcctcactacgcactgcttctagaacccctgttctaaacccacaggaaggtgtgactgcccctttcttt

SEQ ID NO: 721814 - DNA, 1983 bp, Homo sapiens
  misc_feature 1344, 1345, 1346, 1347, 1348, 1349, 1350, 1351, 1352, 1353,1354, 1355, 1356, 1357, 1358, 1359, 1360, 1361, 1362, 1363,1364, 1365, 1366, 1367, 1368, 1369, 1370, 1371, 1372, 1373,1374, 1375, 1376, 1377, 1378, 1379, 1380, 1381, 1382: n = A,T,C or G
  misc_feature 1383, 1384, 1385, 1386, 1387, 1388, 1389, 1390, 1391, 1392,1393, 1394, 1395, 1396, 1397, 1398, 1399, 1400, 1401, 1402,1403, 1404, 1405, 1406, 1407, 1408, 1409, 1410, 1411, 1412,1413, 1414, 1415, 1416, 1417, 1418, 1419, 1420, 1421: n = A,T,C or G
  misc_feature 1422, 1423, 1424, 1425, 1426, 1427, 1428, 1429, 1430, 1431,1432, 1433, 1434, 1435, 1436, 1437, 1438, 1439, 1440, 1441,1442, 1443: n = A,T,C or G
tgtacaacctgaaaaaatgcagtgattctttaattgtttggtaagacttaaccctgaaagcacaaacataacattaaaggaatctacatgtaaagaccaattcaatgtatttaatgtctaatagttcattaatatttcatatgaaatatcattttagctaagctttcaactttattggcataaaatctatttttctcttgggaattatttaaatttctaatttgtagttaactttcctttttttctttaatattttatgtttgccattattttaactgattgacctaccaagcaaactgcctaccccattatctatcttcaaagcagtttttctatttattgatattatatattatttgtttactatttcattaatttctcttaatttaattttaatcttcctcatgtttcaggaagtggttttgtggttcttttttgttctctttgtggttctttttcctagatttttagatgaaaatttaactcatattttttatttttattaagcatattttgatagataaatttacttctaagtcctcaattagctgcatcccatttttatagtattttcaggatcatttaattcttttttttcattttgatatcctaattaaaccatgaattacttaggtgagcattttcaagtttccaaatgatatatacttgtttatttcttctttttcttttattttttaactattattttgttgctttgttttctacttcaattatatcatgatcatgaaatatgttttacatgatagtgacttttggaggctgtgtgacttcttttgagatttattacatcatcaatttttgtaaaatatttgtcatttttatacctgttagatgtagattacaaatttcattgttaattttctggaaccataatctatcgggagaaattcagccagatatcgggagaaattcacctctgatatttcacrtaggttcttttctattttccctaagtgtcggctgttctgagaaataaagggacagaatacaaaagagagaaattttaaagctgggtgtccaggggagacatcatatgttggcaggttctgtgatgccccacaagctgcaaaaccagcaagtttttattagtgattttcaaaaggggagggagtgtacgaatagggtgtgggtcacagggatcacatgcttcacaaggtaataagatatcacaaggtaaatggaggcagggcgagatcacaggaccacaggaccggggtaaaattaaaattgctaatgaagtttctgcatgcattgtcattgataacatcttatcaggagacagggtttgagagcaggcaaccggtctgaccaaaatttattagnnnnnnnnnnnnnnnnnnnnnnnnnnnnnnnnnnnnnnnnnnnnnnnnnnnnnnnnnnnnnnnnnnnnnnnnnnnnnnnnnnnnnnnnnnnnnnnnnnnngattcgagctcgtacccctgagttctcctttaaggttgattctgaaattagaggtgcaacagagctgcaggccatgagcagggccagcaccacctcctcaagattgtttagaaacggtttagaaaatccaagccccatataaccatccaagttcaacttcctgagcccccttgagaaagtcttctgcacacacatttattgagtatcccctgtgctaagacttcaaagatgtataagaactctccttgactcaaagagttcaaagtccagtggagaaagcatttacataaacaaagaatttaattggcattaggggctgtgtggagtgccaaaggagcagctagtctgagcagatctgagaacgcattctggaatgcatgctgatggcattcaacttggcaggattagcaagagtcagccagtctgaagtgacagatgttgtcctccttatagggagaccctccacattcagcctcactacgcactgcttctagaacccctgttctaaacccacaggaaggtgtgactgcccctttcttt

SEQ ID NO: 721815 - DNA, 1237 bp, Homo sapiens
acacacacacacacacacacacaaacacacaaacagatttcctaaggcaaggttttgatgagatcttaccagtaataattcagggacatagtgactataaatctcatatttctgagtgcctatgtaaaatttatgaaataaaaattagaatttctacaatatataaccttaaatatctatggcttgttttgaccttaatatgacagctcatacacatttttatgtatggtatgatatgtttctaagcatcctcttatttgattaaagaattctatgtatttatgagcttttattttctgaaaaatgcatgttttaaagttttgagaagtataaaaatggctgaatcatgaattggatctcaaagaaacctagaatgaatgctaatgacacataagaagaaagatcaagctgactagaaaatagagttagacctcttccgtgataaaggacagaggacactgacggaagacaagccatgaaaaatgagcagaggacatttgtctataccaaccaaatgggggaaccactcaaagcagcaatgcagatgagcactgcgtcagaaacccacatgacggtgccactgcttcagggcagatgactgggaacaagagttaactaaatcaggtcaattcagttatagtgtattaacaacaacgggatggagtggagtggaatatgatccaccaggcacaagcgatgtgcactcaggtcgttgatcttcagtctcctcgtgtctaaatcgagatgataacaatctcaccaagtgatttcaaggcagtgtgtctaacctacaactgatccctctccctaggaacacggcttctttctgccaactggtgtggtccattatcaccccagggatgggaaatgggagtattgaccgctccaacaacttgccagcagctccctaggaaagccagaaactcaaaaaatttcctcctcactgcagaggaagccaggtctaagtaaaaataatgttactaatgtagctgatatttatgaaatgtttacaatgtgccaagggctcgtggtaaacacttatatgtatatayacacacacacacacacacacacacacacacacatatacacacacacatatatatacacacacatatatatacataaataattgtctatttaatcttcaagacagacttatgatatagatatgattactcttcctgatttatggagaagaaaactgagcctccaaaatgttaaataatttgattca

SEQ ID NO: 721816 - DNA, 595 bp, Homo sapiens
atttgtgtcatcattgaccactttgcttttaaagactagagtatcagagaaagttgaattcagaaaattcaaaactttgcactgtagggaagaaaaggacaatatttagacttgggattttactgttccttaggtattagggtccagtctttctccagtatctgcagttaagtctctgaagacttgatctggctgactctgaagttactgtaacatggaagagttctgagttttgagtctttctcacttggtaatcaagtaactattagaccgtaagtctgtttttcattagtcttccctctaggtattggtaaatgtgctaagttgtggggagctaaaaatgcttacagatttccagagggaaagatgtattctggaagaacaattgacatttgtccaacaaatacttattaagcactttttatgtaccatacactttgttgggtgtcgaggttacaaagayaaaacacatatggtgctctcaacaggctcgcagacctgacatgaaaaggagtgaatgcaatggaggggtaggagaaactgctagcatcatattggcttggattcaacttaagtgttctcctttggtggaaag

SEQ ID NO: 721817 - DNA, 595 bp, Homo sapiens
atttgtgtcatcattgaccactttgcttttaaagactagagtatcagagaaagttgaattcagaaaattcaaaactttgcactgtagggaagaaaaggacaatatttagacttgggattttactgttccttaggtattagggtccagtctttctccagtatctgcagttaagtctctgaagacttgatctggctgactctgaagttactgtaacatggaagagttctgagttttgagtctttctcacttggtaatcaagtaactattagaccgtaagtctgtttttcattagtcttccctctaggtattggtaaatgtgctaagttgtggggagctaaaaatgcttacagatttccagagggaaagatgtattctggaagaacaattgacatttgtccaacaaatacttattaagcactttttatgtaccatacactttgttgggtgtcgaggttacaaagataaaacacatatggtgctctcaacaggctcgcagacctgacatgaaaaggagtgaatgcaatggrggggtaggagaaactgctagcatcatattggcttggattcaacttaagtgttctcctttggtggaaag

SEQ ID NO: 721818 - DNA, 725 bp, Homo sapiens
tgatccacccaccttggcctcccaaagtgctgggattacaggtgtgagccaccgcactcggcccttatctaatgttttataacaacacttagtcattgcatttagggccaccctagatgcaggatgatttcatccttaaccaattacacttccaaacatcccgtttccaaacaaagtcacattctcaggttctgcaaatacatgaatttkgtgggacactcttcaacccactacacccatcttcaggcaaacccaaggcagtcttagccttgggggaagccgcccctcacaacaacaataacagctaacgcatcttcaccacttgctgtgcaccagggataagtaccttgcccgtattatttcacccaacccaaataaatacaattattgtcccactttacagatgagtaaactgaggctatcagaggctggataatttatgcaagggcacactgtcaacaagtggaagagcaggagatggctgcagacgggctgacttcagagccgacattcacacgtgttccactgcatggctatttgggacccctcaaaatccaacatcttcctgtgcgcacagagtgactcccttcagctccatggggagacagcatttcggggaaaactcgaggacaacagtcacaacagtcgctactcgtgacggcgttgctaggccgcattccccagctttcgccttaacctcctgccgtgtcttcgtgaccccgggc

SEQ ID NO: 721819 - DNA, 725 bp, Homo sapiens
tgatccacccaccttggcctcccaaagtgctgggattacaggtgtgagccaccgcactcggcccttatctaatgttttataacaacacttagtcattgcatttagggccaccctagatgcaggatgatttcatccttaaccaattacacttccaaacatcccgtttccaaacaaagtcacattctcaggttctgcaaatacatgaatttggtgggacactcttcaacccactacacccatcttcaggcaaacccaaggcagtcttagccttgggggaagccgcccctcacaacaacaataacagctaacgcatcttcaccacttgctgtgcaccagggataagtaccttgcccgtattatttcacccaacccaaataaatacaattattgtcccactttacagatgagtaaactgaggctatcagaggctgsataatttatgcaagggcacactgtcaacaagtggaagagcaggagatggctgcagacgggctgacttcagagccgacattcacacgtgttccactgcatggctatttgggacccctcaaaatccaacatcttcctgtgcgcacagagtgactcccttcagctccatggggagacagcatttcggggaaaactcgaggacaacagtcacaacagtcgctactcgtgacggcgttgctaggccgcattccccagctttcgccttaacctcctgccgtgtcttcgtgaccccgggc

SEQ ID NO: 721820 - DNA, 725 bp, Homo sapiens
tgatccacccaccttggcctcccaaagtgctgggattacaggtgtgagccaccgcactcggcccttatctaatgttttataacaacacttagtcattgcatttagggccaccctagatgcaggatgatttcatccttaaccaattacacttccaaacatcccgtttccaaacaaagtcacattctcaggttctgcaaatacatgaatttggtgggacactcttcaacccactacacccatcttcaggcaaacccaaggcagtcttagccttgggggaagccgcccctcacaacaacaataacagctaacgcatcttcaccacttgctgtgcaccagggataagtaccttgcccgtattatttcacccaacccaaataaatacaattattgtcccactttacagatgagtaaactgaggctatcagaggctggataatttatgcaagggcacactgtcaacaagtggaagagcaggagatggctgcagacgggctgacttcagagccgacattcacacgtgttccactgcatggctatttgggacccctcaaaatccaacatcytcctgtgcgcacagagtgactcccttcagctccatggggagacagcatttcggggaaaactcgaggacaacagtcacaacagtcgctactcgtgacggcgttgctaggccgcattccccagctttcgccttaacctcctgccgtgtcttcgtgaccccgggc

SEQ ID NO: 721821 - DNA, 1420 bp, Homo sapiens
ttacaggcacctgccaccatgtgtggctaatttttttgcatttttttagtagagacgaggtgtggccaggcttgtctcgaactcctaacctcagatgatactcccacctcggccccccagagtgctgggagtataggcgtgagtcacctcaccgtgcccggccttatgttctttttttttgagacagagtctcactctgtctcccagcctggagtgcagtggcacratcttggctcactgcaatcgccaccccccaggttcaagcgattctcctgcctcagcctcctcagtagctgggattacaggcatgcaccaccgtgcccagctaatttttgtatttttagtagagacagggtttcaccatcttggccaggctagtcttgaactcctgacctcatgatccacccgcctcggcctcccaaagtgctaggattacaggtgtgagccaccgtgcccggccgatgttctcctttttaagtctgagttcttatgagtcatcccatgtgtagaaagcaagtgatcaatcaatgatcactagacagactgtccaagtgtggactgtccaaatgtggaaagtctgtcaagtgaatggttggacagacaacttgaagtttaattcagaaaaatgatttaaggtcacagcttataaaatatttataaagtagaatgactctacatcccagtaggtacttactgtcccaaatctgtatgtggataggggagctcattcaaagttcaggtcattttcaagcctgatccatcttttattttctatgggcccttttctgtctcttatgtgcatgaacacagcctcaggttcagtcaggagttgcatcagtcctttggtctctgattcacatgagtgcaacctcagccaggaatatgcttatcccaccaccactgcaatctcaggctagaagagctgttgacctctcaggctagggagctgtagggctccctactggcctacttcaagatcatcatttccacagatgctgcagctggtcatgggcattactgactattacaaattaagtgagccccttcaaacagacagaatctgtgtgttgactgaattggggtggggatgataggagcagacccataccagaatgccacgaagttccactatttttacacaaaattcagcagttttaaaaaacataaacatttctaagattgctatatgtctttggttgatttccaaatgttgaaatgattgtttttttttccattttgtccagctttatagttgcttttttggggaagataatctgttaatctcttcacttggccagagccaaaagtcacatgggaataaagatttttaaattgtttctctcaataaaatccatacggagttgtaacagacaacctgaattttaattcagaaaaatgatttaagatcatggcttgtcaa

SEQ ID NO: 721822 - DNA, 657 bp, Homo sapiens
cataataatggacagatttaggttctgtattttgtttccycactgtttaagagaaaagctaagctatgatttgttactccatctcctatggaggaaactgctttctttaataatgttgcatccaattatttaccttgtctgatgtatataatgcatatatcttttacctctctacctaatgcaggtatctctacgtcagtattggaaccctctaataatacaacttttatcccaactgtagcaaatgaaggaggaaagcactggactgtgccagaagtcagggctctaatagacatctggtctgataaaagcatacaacgacaactagagggaacagtgagaaataagaggatatttcaacaaattgcagccaagcttcagaaatttggaatagacagagactggaaacagtgcagaacaaaatacaaaaacctaaaacacgaatacaagatcgtaagaacagctcaagatctaggcatgactaagagtatgaaattttttactgagttggatgctattctgggacccaataaaacagaaaaatcacgagaccaggaatcccaagatggagaacatgtcacagaatgtgccaacgtaaaaatgggagaggaccagacaggtaggaaggtgaagaaaaataatcttaacatcatgtta

SEQ ID NO: 721823 - DNA, 657 bp, Homo sapiens
cataataatggacagatttaggttctgtattttgtttccccactgtttaagagaaaagctaagctatgatttgttactccatctcctatggaggaaactgctttctttaataatgttgcatccaattatttaccttgtctgatgtatataatgcatatatcttttacctctctacctaatgcaggtatctctacgtcagtattggaaccctctaataatacaacttttatcccaactgtagcaaatgaaggaggaaagcactggactgtgccagaagtcagggctctaatagacatctggtctgataaaagcakacaacgacaactagagggaacagtgagaaataagaggatatttcaacaaattgcagccaagcttcagaaatttggaatagacagagactggaaacagtgcagaacaaaatacaaaaacctaaaacacgaatacaagatcgtaagaacagctcaagatctaggcatgactaagagtatgaaattttttactgagttggatgctattctgggacccaataaaacagaaaaatcacgagaccaggaatcccaagatggagaacatgtcacagaatgtgccaacgtaaaaatgggagaggaccagacaggtaggaaggtgaagaaaaataatcttaacatcatgtta

SEQ ID NO: 721824 - DNA, 657 bp, Homo sapiens
cataataatggacagatttaggttctgtattttgtttccccactgtttaagagaaaagctaagctatgatttgttactccatctcctatggaggaaactgctttctttaataatgttgcatccaattatttaccttgtctgatgtatataatgcatatatcttttacctctctacctaatgcaggtatctctacgtcagtattggaaccctctaataatacaacttttatcccaactgtagcaaatgaaggaggaaagcactggactgtgccagaagtcagggctctaatagacatctggtctgataaaagcatacaacgacaactagagggaacagtgagaaataagaggatatttcaacaaattgcagccaagcttcagaaatttggaatagacagagactggaaacagtgcagaacaaaatacaaaaacctaaaacaygaatacaagatcgtaagaacagctcaagatctaggcatgactaagagtatgaaattttttactgagttggatgctattctgggacccaataaaacagaaaaatcacgagaccaggaatcccaagatggagaacatgtcacagaatgtgccaacgtaaaaatgggagaggaccagacaggtaggaaggtgaagaaaaataatcttaacatcatgtta

SEQ ID NO: 721825 - DNA, 1548 bp, Homo sapiens
atgtttcaattgaaataaatgtaatacaggcaaaaaacaattgaaacatccagacttacattaatttgttttttttcaacaaggatatactttagattacattttttcataaaatgagttgataatgacggtggtgaatctggctcgataggtacataagcagccgggacttggagaattctaaagaaaaaagtacacagtcagcatagaatgtctgttgatttagtatttgtttaagcatttctatttctctatgcactttatttattttttgtagcagcataaaaatggtttccggagcactttattgctgatcagaaatttccaatgttttcactgacacatagttggtaataaacgctgtcattttagccgggcacggtggctcacgcctgtaatcccagcactttgggaggttgaggcgagcgaatcacctgaggtcgggagttggagaccagcctgaccaacatggagaaaccctgtctctactaaaaatacaaaatcagccgggcgtctgcaatcccagctacttgggaggttgaagcaggagaattgcttgaacccgggaggcggaggttgcggtgagccgagatcacgccgttgcactccagcctgggcaataagagtgaaacttcatctcaaaaataaataaatacataaacactgtcattttatcttttcttaatgaaaatcctgagtatttactatgttmaattcttatcacttaatatagagaaatacaagatttttttaaagttaagcattttaagtagtttcaggtatactttaaggacactagatctttgcacatagtaaattctcaataaatttcgtcaataattgagtgaaagtaaatttttgttgttgtttttatttgttttatagagatggggtcttgtgaagtcaccagggtggtctcgaactcctggccttaaataatactccagcctcagcctctcaaagtgctgggatttacaggtgtgagccactgtgcctggccaaaagtaaatttttgaacatcttttgctttatatttatataattaatttactaagacacatattatagaatgaataaactatttctttggcagtttatacttactgcagagttctagaatagaaatcactatatgaggataacattctagaacaatttaaatgattgaacattttgcaaatatttgttggaatagtgtcttctaatgggttcatatttcaatctatatcaactattatccaaaactctaatttactgatttattgaataccttagtgcctcaaatttcagttgcggacaaaaaacatagtcatgttatctgtgaaatcctgttttcttttatctaacaacaaagtgttataaattgttataattgttttcctttaacagattaatgaagcccttacattttggagatacttatacgttctattagtgaaagcttctagtctttcctaaataagctcagaataattaatttaaataatataaaaataatactggggaaatgcaaacttctttagtctctctacaattgaccaaacaata

SEQ ID NO: 721826 - DNA, 583 bp, Homo sapiens
cagatgatcatattgaaaaatagagaaaatgaaaagtaataatagcagtagtagtaattataatagtggtggtcacagtggtaacatttatcctagctaaattttattggacacttgtgatgtatcttgcatatatgctaacctctttaacataatatcagaatctttttgatatataatatttaaaacttatgtggtaggcactgttagtaaggctgttttatggacaaggaaactaaggtttgaagacaatgagcaatttgctataaattaagtaactgtctatattataattttttctggcctctgttccactggtctacttgtctgttttttgttgttgttgttttgtttttacttttyttacttacctgtttttataccaataacacactatcttaattgctgtagctttttaaggagtcttgatatctagtagtttaagtttttcagctctggttttctgggtttttttctttctttcttttcttttcttttttttctttttactttttttttttttttttttttgagacaaggtcttgctctgctacccaggctggagtgcagtggcatgatctcg

SEQ ID NO: 721827 - DNA, 598 bp, Homo sapiens
agatttagcaatgtttctcagaacagtagttgtatctaacctcctatttccagagattgttatttatttactgctttgtttctctgatatctctgcggtggggccatactgtatctcatgatccgaccttgactatctcttgcacctttcctctctygcagtttacactctatcaaatcacatattccatttgtttagaaagctccttctagcccagtctgacatatttctattagttcttcaaaactcagacccaatattatagttatcattagggttgacttctgcacctgtctcagagaatcaatcatttctccatgatgactttctctcttgtgcatatgcttattgtttaggggtgtatatgtttctgtgtgtgtgtgtgtgtgtgtgtgtgtatacacacacatagatatctgtcttctcaaatagactgtgaacgtcttgagaaaaaggttcctgacttgtcatttgtccatttccagtcctagtctggtaactgaaacagaataagagtcaaagtattttattttctattgattttaattgagttaaatatatggctttaaaataataagaaaggaagtttaaaatccta

SEQ ID NO: 721828 - DNA, 584 bp, Homo sapiens
cagtgagctgtgattgtgccactgcactccagcctgggtgacagagcaagaccctgcctcaaaaacaaacaaacaaacaacaacaacaagaaaacccacaaaaaaactctcttcctctctcctctgattccctgccctgccctacagtttttgcctttctaatccctaactctccctaacccctccttggagcacatttttggcttgtgcagaaggctttgtctccctaatctgaagattgcttatagaaaataaagctctctggctgggcgcggtggctcacgcctgtaatcccagcactttgggagtcctaggcaggtggatcacgaggtcaggagatcgagactatcctggccaacatggtgaaaccctgtctctactaaaaatacaaaaattagcttggtgtggtggcgtgtgcctgtaatcccagctactggggggctgaggcaggagaattgcttgaaccaggraggcagaggttgcagtgaacggagattgcgccactgcattctagcctggtgacaaagtgagactctctcccctaccccaccccaccccccaaaaaagaaaagaaatctttccct

SEQ ID NO: 721829 - DNA, 1430 bp, Homo sapiens
tttattcttcagcagcattcatgtgtctgctgcttgagaaagtttccactcagctttgtctggaattggacttagtggcaggttgccatagagagattcgagagactccgaaaaatgtataatgttttaaagtaagtgattaaaaataacttttcaaaatattaaacttatatctacaattctgtgacttattttcataaataaaacactctcaaaataacaatgatctttaactaaagtaaaccacttgaatttgacaaaaatacatgagttttccagatgccttatcatagcaaattctactgaattttgcatgcttctcataaaaagcagtttaggtgcatttattcttattttgttctatttaccaaaattctawattgaaagaattgtttgtttgcaactaatactcagaagcctacttgacaaagaggtttttagaacattttgttttcaaccttggttttcctcactagaaataagtaacacttaatgtttaacaatggcaatccagtacttttttcagataattaaagttcttgaaataccctatccaatcacaatctggcctcttgacaagagttaaaaacagtaggttagcaagactcttgaggtttgagtgagtcaggttgcttatttccatggtacatattcagaaggcattacaataaaggtctttcactaagcatatgacctaggcaaatgccatggtcttaatattggtgtctcctcaaaatgtatgttggaacctaatagtattaagaggcggggccttttggaaagtgatgaagccatgaagactctaccttcatgaatgggattggtactcttgtgaaagaagattaacggagctgccttgccccttctgaaattgttgtgaggacacagcagccaccatctttggagcacaaggtgacttttcatcagacaccaaatctgctgataccttgatcttggacttttcagtctatagaactgtgagaaataaatttcttttttttataaattactgagtctgaggcatggcatctttcaataaatcatgaccaatgttaatattactaagattttcagtttcatattttgaatttttaaaaattaagttttaaaactgaagttgtatcatagtttatgaatttaatacaataagcagaattctttggcaatatggaaacaagtaaaagcttaaaatagtgagactgaagttctaaaaattcttatttcctcttctaggttatggtttaactcagcagaatttgttgaacaactacgacatgctggggatcatggtatgtttagagacacaaaagtgaattcaaaatcttctcttcaattattttatcatacgttccctttgtttctttgctatttgccaagccctctatttgtgtttccaccttaatgccttcacatgtgctctttcttatgcc

SEQ ID NO: 721830 - DNA, 1343 bp, Homo sapiens
tttaaaggaagagagaaccaagaagaataaaactggggagtgagaatgtgtgtgtgtgtgtgtttgtgtgtgtgtgtgtgtgtgtgtgtgwgagagagacagagagagagagagaatgagagccaattgtggtagtcagtcagtcacccaggtaacaatatactgattggaaggaaatcatcacaaaattttaattacaaaatgagaaaatgtttcatcgtgttcctttaaaattttatcttttcttcctatgatctgaggaagaaaagattgggaaaaaatcaaatgaaaagcaaatctctttctctccccaacccctgaaatcccctaagtaggtcacacacagtattctcaatcatctcagtggaggctcagcctacagcaagcataaaagaatttcgaggctttacctagatagatctggttagggagagatgctgacgggttacacagggtggaagtcattagactaacgatctttaatcaggttggagctgtggagttagggacattcatgtgtggcattctttcatcagggtcttaaactagaggaactggccccgtgggtttactttcagccctagagagttcagagctaagcaaagtttaagaggtaagtttgtttctctgggagaatatgagagctcgatttacaaacagaaaaagtacctcattatagttaggtagtttataatattgaaacttgttctgtattatatttctctttatcctccactgaaatgatctaatttatttatttttatttttcatttttcattgtttttttttttctgagacagagtgttgctctgtcacccaggcgggagtacagtggcgcaatctcgcctcactgcaacctccgcctcttgagttcaagtgattctcctgcctcagcctcccgagtagctgagaatacaagtgcacgccaccatgcccggctaatttttgtatttttagtagagacggggtttcaccatgttggccagactggtctcgaactcctgacctcaggtgatcctcccaccttggcctcccaaagatgatctaatttatgtttttattttaataaagaaagcattacaaattattaattacacatgtaataaatgaatactttttcttttaaaaattaagaacaattttttttgactaccatccctaatttcgtatccctactttatggggaactattttcatctttttggtgtattaccttccagtttttttctatgtatttccatacacatactcatagaaaatagaatatttgggatttaaaaaatgtaacatttcatactatatgcaatgctctgaaacttgtttctccccccaacaatttgtct

SEQ ID NO: 721831 - DNA, 1853 bp, Homo sapiens
acacagaactatgtctaagatatgctatgctgttgagtgaaaaatgaaactttcactgaagtgtttctaaaatgacaccacgaatcaaaataaacagagtgaaaacacacacattctgcatgcaaaaacactcaaacatacatatacgcatgtggatatgtatgcttacaaataaatagactattttggaaagcatacacaatctggtaacaatgtttacttcaggagaaaaartactgagagtgttgggtgtgaatgtggggtaggtaacagcagaataattttttcattttttttttctgattcaaataagaatctatgcatcattaaaaaataaactagttgatttttaaaaattgctacaagtaatcatgcaaaatagttacaaggcgtgatggcacggtccaagttccctgtggtcctaagtctaaaaacaggcattctttacaaaacattgtaaagaaaaaaagtatagaaaatctcatatcctgaagtacatctttgtaatgtcccgaggcagggtttttattctggagttagagggtccataaacttgggtgagaaaaaaaaccctctttttaaaaaaaaaaaaaatacaaaaaccaaaaaaaacccaaactaaactttggctgaaagtttgcatttcctttgataggaaagtgggcaagcagccacactagagtcagcaggatttgtcaccaatagaaatcagatctgtgatataacattacatttgttgcagatatcttgaaatatttccacttgtcagtacttcaaaattatagtagttatttatttgacttgctgctagatcttgtttatttaatatgttaaaggactttttttactctataataaatttgttttttcaacattataactgtatttcaatataattggttttctttgaaatcctgtgtcttttatttgatgtgttgactgtgagaaggggcttcatcagattgccaaaggggtccgcgaaacaatggagccaaggaaccttggtgttaaggtaaatgctaaagggctggggacaaggaatcacaaatgggcgctgtggggagtgtccctagaagctgggagaagggaccctactgcttcctcttgatgccgggggctgattaatggcctgaatatatgaatcggagatgcaattttttgttgctgttccagttggtggatcctcctcctccccaaccagctgcctccctggatctccgcccggcccagtgctggtggtgtgagccctggggctgacgcctgcgaatgacagtgagcccggcttgcccttggtcccattttaacctccttttggggcacggccagggtgctaagctcagcctctaagcaatgcacattagcctggcaggaaactctgtcttgaagaatttcaaaaaattcttgtgcaaaaccaagccccaaattcatcccaacaggagagagaaagcttagcggggagcaagacactgtaggcagacacacttggaaaaagttaaatggggctctaggaggaatgggccacttacatgtgctagaacattctgtttctgaacactttaaactgaactgctcgttggtgcaacttttatagcacaattcctgtgctcgcaccagagaggggcacttgagtgttcaaagggtggtcagatgagctgcgggtgagtgtggccaggagtgtgctgtcaatagagtcgtaagagcagagcctgccaatgtggacagattctactgtatcctgagctgactcatggtgctgtcatgccaggaggggtgatgatgggtggggtgaagatggccctccccctgcactgattccagccttacaagtccttaaaacacagctcactttcctt

SEQ ID NO: 721832 - DNA, 1372 bp, Homo sapiens
ggatcctgtagggggcacagctattttccctctttcccaggagagatcccaacccttctctcccacggagaaaacaaacacagctatggaaatcttgtgccatcctggcacctgaaagtctatcaccaattggaagttgctcctacctgcacttctccctttgccaaacacagtcctcccccacatctgcttcctccccttatgagtgaaaaagttttcacggaaaatttagaatttggaaccttcttcagattccaaagaagttattgttctatatcatgctgcttttgcttgggtgttatttcaactcagagaaagtagaaactcacatctctattttgctggaatgctcttcctgaatcattaagaaaacagtaattaagtaccttctttgtttgaagctcttgagtactttttgaagcccatctcaaactcaagtcctagagtccacattccccacattatctgttaggttttcagggaagaaggatgttgatggggtcggctcagggacaaatcactggaagatctctgggagatcgtcgcatgatagtcggaaagttttcatcgcaaggagaagagaaacaagatagcatcaaggtgkcaagaacctctcactttttattgtgtggaagctcaggacctgagatgctagggggacaaagtctcagaaaggcacagacagaaaggagagagacgatgggggtaatgtgagtaagaagaaagtgagggtgggcttgatgacttgaagagcaagacccagagagaagccacatcatctcacactacgatgtggctgggaaaggtctgagattggcagcatttaaaaccctggcttccagggtgctgggcctgaaggaaactgagaaattttctggccagtgattctcaaagcctggtctgtggactacctcttcagaatcacctggtgggctgattatacctgcagattcctggtatccttctgacttactgaatcctatttgctgggggttcggcccaggcagctaccattgtttatgaagtttcacaagtgattctgatagttctcaaagtttgagatcccttaatctaattcaacctcctcgttctccaggtgtgaggcctgaagcctagagaagcaaagcagcaagcctagagccacagagctaattgatggcaaagctcaaatgggaactctgttgctcctgatcaccagagccgtgttcttcccatttgaatatgctggaagcctccttacctgtttggagctatttcccctgcccctaaaagccaaagcctgcacctttgatccattcctgcatcctgctgaggccttctccttcctgagcatgctctggtcacagcctctgcaggctggaggccaggggca

SEQ ID NO: 721833 - DNA, 1677 bp, Homo sapiens
tgaaataattaactcaccgtaatgtagaatcagtgggaaccctgagctttatttcctccaactagatggtcctatttgggggtgatgggagacagtgacagatcatcaggcattaaattctcataaggagcatgcaacctccttatggacaggtacctgtcctaccatggacaggcactggtccatggcccagggcttggggacctttgctttaattagcatttttgtgagagtgcatatgggaaggtgtgcctaggattacccaagcaaatcccttttgatgatgattatttttttctctgagagtatgatatggtttggctgtgtccccaaccaagtctcatcttgaattgtagctcccataattcccacatgttgtgggagggacccagggggagataattgaatcaaggaggtggtttctcccgtgtgctgttctcgtggtagtgaataagtctcatgagatctaatggttttataagggatttcgcttttcacttgactctctctcaattctctcttgcctgcaccatgtaagacgtgcctttcaccttccgccatgattgtgaagccttcccagccgtgtggatctgtgagtccattaaacctctttttctttataaattatccagtcttgggtatgtctttatcagcagtgtgaaaacaaaccaatacagaggaattgaagagaaggaaattgagagcacagaccgtggatacaggagaggtggtacttgtgaatgtccagtgggagacttactgggcaaggatggcacacactggttactcgaggcaagaatgaagaaagtgatttttggcctcagtgtgcagaggaggccaggaagtgttcttcaaaatctaagtatttcagagcttttgattttttctctgcaggacttgatccacgaaagctgaataaggtgatgtgagatctctaatcccctcaaagaaaatacagtgagagaaatgagttacatcttacatcttttatgcattttcagtctcctttcttgcacctggaagagcattagaactccaaatggcaggttgagtttctgtggaaaggctgatagacatacaggaagttagaattcaggtaagatacttggattgtttcaatttggagttcttaaatatgtgaagacaaaataaacttgaggggtaacagcaggttgaatttaattgatttttccagcaatgacttgggcaggtcacattgtgtactctggtgaaatagtgtatgggaaggctcagaatggagggaggtggcctgtgagttatattatctgaaacagtaactaagttgaagggaaggctcttctgctttccaggaaagacaaaacacttaaattaacttgtgacctctctgcctttttatgacctgtcaaggatgagctgtgcctcacttggggctcactttagtagtctgtaatcaccaattcccaactctccctttcaatctacttagggtttccaatcattcttagacaaggtctctattagctgggtgcaggatcttcccacataagcacagagaytaaattttctgggttttggtttgccaacttggtaagtgaatagtctcatctgcttttattttataaggatttgaaatcctgcagattaccagtatattttgtcttcaggaaatctgggttgtatgggaaagaacactga

SEQ ID NO: 721834 - DNA, 1677 bp, Homo sapiens
tgaaataattaactcaccgtaatgtagaatcagtgggaaccctgagctttatttcctccaactagatggtcctatttgggggtgatgggagacagtgacagatcatcaggcattaaattctcataaggagcatgcaacctccttatggacaggtacctgtcctaccatggacaggcactggtccatggcccagggcttggggacctttgctttaattagcatttttgtgagagtgcatatgggaaggtgtgcctaggattacccaagcaaatcccttttgatgatgattatttttttctctgagagtatgatatggtttggctgtgtccccaaccaagtctcatcttgaattgtagctcccataattcccacatgttgtgggagggacccagggggagataattgaatcaaggaggtggtttctcccgtgtgctgttctcgtggtagtgaataagtctcatgagatctaatggttttataagggatttcgcttttcacttgactctctctcaattctctcttgcctgcaccatgtaagacgtgcctttcaccttccgccatgattgtgaagccttcccagccgtgtggatctgtgagtccattaaacctctttttctttataaattatccagtcttgggtatgtctttatcagcagtgtgaaaacaaaccaatacagaggaattgaagagaaggaaattgagagcacagaccgtggatacaggagaggtggtacttgtgaatgtccagtgggagacttactgggcaaggatggcacacactggttactcgaggcaagaatgaagaaagtgatttttggcctcagtgtgcagaggaggccaggaagtgttcttcaaaatctaagtatttcagagcttttgattttttctctgcaggacttgatccacgaaagctgaataaggtgatgtgagatctctaatcccctcaaagaaaatacagtgagagaaatgagttacatcttacatcttttatgcattttcagtctcctttcttgcacctggaagagcattagaactccaaatggcaggttgagtttctgtggaaaggctgatagacatacaggaagttagaattcaggtaagatacttggattgtttcaatttggagttcttaaatatgtgaagacaaaataaacttgaggggtaacagcaggttgaatttaattgatttttccagcaatgacttgggcaggtcacattgtgtactctggtgaaatagtgtatgggaaggctcagaatggagggaggtggcctgtgagttatattatctgaaacagtaactaagttgaagggaaggctcttctgctttccaggaaagacaaaacacttaaattaacttgtgacctctctgcctttttatgacctgtcaaggatgagctgtgcctcacttggggctcactttagtagtctgtaatcaccaattcccaactctccctttcaatctacttagggtttccaatcattcttagacaaggtctctattagctgggtgcaggatcttcccacataagcacagagactaaattttctgggttttggtttgccaacttggtaagtgaatagtctcatctgcttttattttataakgatttgaaatcctgcagattaccagtatattttgtcttcaggaaatctgggttgtatgggaaagaacactga

SEQ ID NO: 721835 - DNA, 1159 bp, Homo sapiens
tctcctcctccagagccaaatctgtcatcctggacataaaccgcacaaaatattctagtcctgaatgtggaaattccactcttggaagaatttagtgtgaatggtacatcagggaaactgttttgtgccatgtgaaaccaacctcacaaatctactgatattggcaggttactcagaaatcatagaaaataacagaggactgtgtaatgttgtatgagatcacaggggagggccactacattaggttggtcggagttggtgttagtcatggaaggtttgcttgtagagtcattggtgggtcatcatgataaagccagatattgagaataaatttctgaccctgtatcagtatgtcagccagtccaccaaccaagccaaaagatcaaaygttactacacaaaacatttttcaagttagatgtttccagcagtgcaggcttccatgtcttttctggccatggtcaatatgtgacagaagctcaggtgtctgtgcatactcggaacaaaggaaaaattaccagagagaagaaaacccttcctaagtagaggttttctactactgctcagtgtagctatctttgttggctttgtggcctttctagcttgggacatcccttcctcatggcctgtgataactacctgttctgtctgactttgctgacctgaacttgatccctctgattattacgcaatgcctgtcctggctccatagcctctccttttctgtcaccactcctatctaggtctgacatgtgttcttctgtacttttaacccatatttcacaaagaaaccattccagtacctctcatggttgtgtatttatgtgtgcatctatatgaaataaaggatttggcagtaaaagtaacacagcctaccctcacttgtggacccagtggcagtgaagccatgacccttttcagtgtgatttttcctgtcattaaagttctgcaaaaagtgcctttgaacttcgaaggataagttatttctcctttattcttctaagtgtactgacccttcaattagttcaaggatcctgagtttccacttttatggtataagtttaatacaaaacccaattttgtttacactgtcaaccttttaccagtatttcttttttgtggtctcttccaaggcctaatcagtaagatctatggctaag

SEQ ID NO: 721836 - DNA, 1159 bp, Homo sapiens
tctcctcctccagagccaaatctgtcatcctggacataaaccgcacaaaatattctagtcctgaatgtggaaattccactcttggaagaatttagtgtgaatggtacatcagggaaactgttttgtgccatgtgaaaccaacctcacaaatctactgatattggcaggttactcagaaatcatagaaaataacagaggactgtgtaatgttgtatgagatcacaggggagggccactacattaggttggtcggagttggtgttagtcatggaaggtttgcttgtagagtcattggtgggtcatcatgataaagccagatattgagaataaatttctgaccctgtatcagtatgtcagccagtccaccaaccaagccaaaagatcaaacgttactacacaaaacatttttcaagttagatgtttccagcagtgcaggcttccatgtcttttctggccatggtcaatatgtgacagaagctcaggtgtctgtgcatactcggaacaaaggaaaaattaccagagagaagaaaacccttcctaagtagaggttttctactactgctcagtgtagctatctttgttggctttgtggcctttctagcttgggacatcccttcctcatggcctgtgataactacctgttctgtctgactttgctgacctgaacttgatccctctgattattacgcaatgcctgtcctggctccatagcctctccttttctgtcaccactcctatctaggtctgacatgtgttcttctgtacttttaacccatatttcacaaagaaaccattccagtacctctcatggttgtgtatttatgtgtgcatctatatgaaataaaggatttggcagtaaaagtaacacagcctaccctcacttgtggacccagtggcagtgaagccatgacccttttcagtgtgatttttcctgtcattaaagttctgcaaaaagtgcctttgaacttcgaaggataagttatttctcctttattcttctaagtgtactgacccttcaattagttcaaggatcctgagtttccacttttatggtrtaagtttaatacaaaacccaattttgtttacactgtcaaccttttaccagtatttcttttttgtggtctcttccaaggcctaatcagtaagatctatggctaag

SEQ ID NO: 721837 - DNA, 648 bp, Homo sapiens
aagacactacagtgaaaatgtcagtaaccagtagagatggtataagtcctatataaattcaaagatatgtactggattgaatggaggagaattcatgaaggggttagtatctaagtaagtcatggcaaaagataaacgtggtcattggaaggggtaggtgaggaggcatgcttggcaaaataaatagcatatatacctgttgggtggatatcattttctttaagtgacatttagggccagtaaggcagtctgttgtgatgaagtagaatgtgtttgacattatgagttcttcagcagggatgtaatctgattgaagcagaaatttagagagttatccaataagtacaatgaaatggaagtttagaatcaaacaggatgataaatgtagtaatattgatcataggtggagtaataagaatgataaagacgtattcaaaagctgcttctcaggaaaagttcacatgcttttgtgtcttatcagatacagggttgaatcataaactatctcaacrtttttaaaataatggcttgaaaaatagtggtatcattgatagtaattggctattggaaatgcagctctttccttggagagagaagagagagaagaggatggagatgaacttaattttgccacaattatattttgag

SEQ ID NO: 721838 - DNA, 2000 bp, Homo sapiens
tttgaaatgaacacaaagcaagaaactgtttatgcagaaaaaccaagtgctctgcattctccagttcctcaaggagaatgtttatgtggtttaccttgcgaagccaaaggtcttttgcagcacttatgcacctgaaggaagccctgagggatggcagagttagccttctggtgggtgaaggtgccatgtgtcttgtctattttatctccttcacccactacctacctcctccaccaccccaccccaccccaccccaccctcattctccttttttattcctttctcctgtctcatattattgggtacagggctgtgtgttagcatttagcatataatgacttacacatagaagatactctacatgcatcaaatagaactttaaataaacaaacctgggtatagatcactagcaaatgccaagtcttagcaaagcagaactcttaaaattagagatatactaagatgatgagtaaaatcactgcatggaaatgttttttaattcaaatgtattattgtatatttgtctgagacatctgacagatctttttttaaagtacacaattctaaataaatgctttggtcaaaaatcttgatcaatctctgtctttctctctacatttactgaattgaaaaggattccacaaatatactaatgagtagcaaaaggcccaggaaaaccgccacctaaaagttgttcaggataaaagcgtctattttcctaacagagctgcaccacgcaagggtaaagcctccttttaagtgttggggcaaatccaattcacccaacacaatcaatccatcagcctaatctatattcagaattttcaaaaacagtagttttccgttttgcaggcatctaaaagtctgcartgtactttgtaaaatgaaataaaacatgtttttaatatttggccgagacttaaattctcaagagccaagatttcagagcaaatatttccacattaattgaaaattttattgtcaaatatatttcatggtttattcatgcagagtagtgcttcttgtcttctaccattcattccagtgatttcacggagaagccagaggctattttcaaaattggggtgacatttaaaatcagggtgacattgtttttctcacatgcaaaaataatgatttctttctttatgctgaatatcttcttcactgggtaattttgttgataataatatcttttctgcttagctcacaggacagttatgaaaactacaaagagatagcatgtgcatccaccatataaaaaagaattttataaatattgtagattattattattgttattcattcaaagtaagattcaagcatcaaagactcatagaaccaattgaggaaattaatttaaaagtgtacatagagaggagagagagaaagagagatggcccctgattaaggcatagttctgaggcaacgctgcctgtgttcagttttgcctttactcattactacctctttaatcttgcacaagttacttaactcatctaagaccccaaatttttaatctgtaacacagggaaaataagagttttgtttgtttgtttgtttgttttttagaagaagtctccctctgtcacccaggctggagagcagtggcgccatctcgactcactgcaacctccgcctcccaggttgaagggattgtcctgcctcagcctcctgagtagctgggactacagaagcccaccaccacacccaactgatttttgtatttttagtagaggcgggggtttcaccatgttggcctagctggtgaaataagagtatttttatcaggttggtatattagtaagttagataaatcatgggaagttggtttctacatagtacatgctcacctgtcagctattaatatttcactgaaatgtaagtaccagcactttgggaggccaatgcgtgtggattgcttgagtccaggactttgagaccaacctgggcaaaaccccatctcttcagagatgatggtaaaaccttacctttataaa

SEQ ID NO: 721839 - DNA, 1151 bp, Homo sapiens
gttcattcttctgtagggagatcctctccactgggaagggccgtaacatgccttttaatggcrtggtctctgctactgctacctgtgtggctccaagttggttcgggagtttccagaattaattgtatacatgttttgtttgtttgtttttgtttttgttttgagacggagttttgctcttgttgcccaggctggattgcaatggctcactgcaacctccgcctccctgcctcagcctcccgagtagctggtatttcaggcgcccgccaccacaccgggtaatttttgtatttttagtagagacagggtttcaccatgttggccaggatggtctctatctcttgacctcgtggtccacctgcgtaggcctcccaaagtgctgggattacaggcgtgagccaccgcgcccagcctacatgatcttttaagaggccctgagattgtccaaattctatcctctctacttctactccaaagctctatacacaacagcaaagtgcaaacagtacattgagaaggaattaagagctcatacagtgccaccaggaatggcagtgttatttgaaaggggtatgtgtgggagggggtacttttaaaacaatgaacatttcatttggaaaatagaaatcagtacccataattccaacaatcatgacataaacacattcctttgaatttgaggtaacacaaaaaattatacctattcatctaaatatttattaaaatcaaagttcctttagttttagttaaaaggaaggactaaaaaactaaacagaaaatggaactctattagtattgaaaactttgtgttagtttagttttgagaaaaggtgttgtgctacttatactctattacaagaattttatctgggttagacagtgatgtttaacgctgccttcattacattcattgcatagatttcagacaaggccaaacaacaactggaataagtgaaacaagcttaagcaatattaagattgcaatacacaacagaagcagtgagtaccaagttcagactgacactctatccttaactcaccccacttttcctgactaggaaagcctgcaaaggggccattacctcaggaactgagcagaaacctccacaatcagcagagaacccccctatcagccatactctcatttcatc

SEQ ID NO: 721840 - DNA, 1151 bp, Homo sapiens
gttcattcttctgtagggagatcctctccactgggaagggccgtaacatgccttttaatggcatggtctctgctactgctacctgtgtggctccaagttggttcgggagtttccagaattaattgtatacatgttttgtttgtttgtttttgtttttgttttgagacggagttttgctcttgttgcccaggctggattgcaatggctcactgcaacctccgcctccctgcctcagcctcccgagtagctggtatttcaggcgcccgccaccacaccgggtaatttttgtatttttagtagagacagggtttcaccatgttggccaggatggtctctatctcttgacctcgtggtccacctgcgtaggcctcccaaagtgctgggattacaggcgtgagccaccgcgcccagcctacatgatcttttaagaggccctgagattgtccaaattctatcctctctacttctactccaaagctctatacacaacrgcaaagtgcaaacagtacattgagaaggaattaagagctcatacagtgccaccaggaatggcagtgttatttgaaaggggtatgtgtgggagggggtacttttaaaacaatgaacatttcatttggaaaatagaaatcagtacccataattccaacaatcatgacataaacacattcctttgaatttgaggtaacacaaaaaattatacctattcatctaaatatttattaaaatcaaagttcctttagttttagttaaaaggaaggactaaaaaactaaacagaaaatggaactctattagtattgaaaactttgtgttagtttagttttgagaaaaggtgttgtgctacttatactctattacaagaattttatctgggttagacagtgatgtttaacgctgccttcattacattcattgcatagatttcagacaaggccaaacaacaactggaataagtgaaacaagcttaagcaatattaagattgcaatacacaacagaagcagtgagtaccaagttcagactgacactctatccttaactcaccccacttttcctgactaggaaagcctgcaaaggggccattacctcaggaactgagcagaaacctccacaatcagcagagaacccccctatcagccatactctcatttcatc

SEQ ID NO: 721841 - DNA, 2791 bp, Homo sapiens
  misc_feature 1459, 1460, 1461, 1462, 1463, 1464, 1465, 1466, 1467, 1468,1469, 1470, 1471, 1472, 1473, 1474, 1475, 1476, 1477, 1478,1479, 1480, 1481, 1482, 1483, 1484, 1485, 1486, 1487, 1488,1489, 1490, 1491, 1492, 1493, 1494, 1495, 1496, 1497: n = A,T,C or G
  misc_feature 1498, 1499, 1500, 1501, 1502, 1503, 1504, 1505, 1506, 1507,1508, 1509, 1510, 1511, 1512, 1513, 1514, 1515, 1516, 1517,1518, 1519, 1520, 1521, 1522, 1523, 1524, 1525, 1526, 1527,1528, 1529, 1530, 1531, 1532, 1533, 1534, 1535, 1536: n = A,T,C or G
  misc_feature 1537, 1538, 1539, 1540, 1541, 1542, 1543, 1544, 1545, 1546,1547, 1548, 1549, 1550, 1551, 1552, 1553, 1554, 1555, 1556,1557, 1558: n = A,T,C or G
gtggagcagttttacttataataaagcatagcagttctaggtaagactggtttggagtgcagccatggaaatggatggctgaagtgcaggtgaagactgacctcagtgctaaagtcttcctgtcaacgacaggcccgtggcctcggaggagccggggtttattaaaatgaggctagaggagttagatctgaaagagacattgagaataaggataccaactccatctcttagtctgaaatatgtgggaagtagaagaatgagctaaaacttctgtattagaatttttcaaaggaacagttccttcagggtggagctagtaagaattggaaagagtacactgaaatggtgggtgatgtaggggagtttgtctcttctggaaaaaggttttgatgacatccctttgccaaagcagtgtgaccgtgtggtagcaccttggcttcagttagactaagctttgactaatttggagcctcctcagtactatgctatttgtatctgttctgccctggaaacaaaattagtttttcacttaaaataaagttgccttatttgacatcctaccacagatcagagggtggagcataaaacaagctttccttattaatcatgtgataatactatttaaaggtatttgaattaaatcagtacgtgtgtgtagggagatggagaattaaagtcacatacaccaagttattgtaatttctgcttgaaaatcttcagggaacataggatcaaggaaagaactgaatgattgccacctacccatcctagtcttgaggaggaaaaacttcatgtaattaagggaaatgggaagaatcaatggtgctcagttgttaaaaagctataggtaaaggcttgattctgatagtgtgggtatagtcaaacagtctccctctattctgttacctttctgagagtcctaacccaaaacactcaaggccaaaatagttaacctttgaacggccaggcgcggtggctcatgcctataatcccagcattttgggaggccgagacaggcggatcatgaggtcaggagatcgagaccatcctggctaacacgatgaaaccccgtctctactraaaatacaaaaaataattagccgggcatggtggcgggcgcctgtagtcccacctacttgggaggctgaggcaggagaatggcatgaacccgggaggcggagcttgcagtgagccgagatccagccactgcactccagctggggcgacagagtgagactccgtttcaataaaaaaaaattaaaaaaataaaatagttgacctttggacaacatgggagttaagagtgcctatcctgtctgggtacagtcactcatgcttctaatctgagcactttagtgggccaaggcaggaggatcacttgagtccaagagtttgagactagcctggacaagaaagcaagaccctgtctctacaaaaaaaaggacaaaaattagctggnnnnnnnnnnnnnnnnnnnnnnnnnnnnnnnnnnnnnnnnnnnnnnnnnnnnnnnnnnnnnnnnnnnnnnnnnnnnnnnnnnnnnnnnnnnnnnnnnnnncagaggttacagtgagctgagattgtgccactgtattccagcctgggtgacagagactttgttttggggttgggggcaggggtgggaattaaaatgcaccgttcagatcttatatgcatcgctgacagggaaacttttttcagggtgaagaaggtgaatacagtgaagaggaaaactccaaagtggagctgaaatcagaagctaatgatgctgttaattcttcaacaaaagaagagaagggagaagaaaagcctgacaccaaaagcactgtgactggagagaggcaaagtggggacggacaggttagtacattccacagtcctccattttagaggctggaatagagattcttgaggcttggaagagtaaggatccctttatctgtcctctaggagagcacagagcctgtggagaacaaagtgggtaaaaagggccctaagcatttggatgatgatgaagatcggaagaatccagcatacatacctcggaaagggctcttctttgagcatgatcttcgagggcaaactcaggaggaggaagtcaggtaaaagccacttgctgctgctgctgtctaacatgtattttacacatgtaggccaggtacttcgatttgcctgtatttcatttattacagcattttaagataagtattatgattatccttatcgtacaaatgaggaaagtaggcttagaatatttggtaactcttggtgaggcagctaagatacagacctaggacagtttgtttccagaactcatcttctcttaattattatacttttgcttttcttagtctgaggtgtaaggcgtctgagaagtgaaatacttgcataggttgccttttaggagaaaggagatgtttcaaaggtactgaatggcatgaaatgaagtctttttctcatttctgtgtctgttatatttgagcccagcaggccctgaggttctgtgattcacgcttgctttggggaggcctgttttttataatctctttgggatgatgaggagactacgtaaagttcctattgtccccctgcctccctgacccattttgttcaagaacatctctacttggagaattctgctgacccaagacacttttccttcattttatccagacccaaggggcgtcagcgaaagctatggaaggatgagggtcgctgggagcatgacaagttccgggaagatgagcaggccccaaagtcccgacaggagctcattgctctttatggttat

SEQ ID NO: 721842 - DNA, 1606 bp, Homo sapiens
  misc_feature 468, 469, 470, 471, 472, 473, 474, 475, 476, 477, 478, 479,480, 481, 482, 483, 484, 485, 486, 487, 488, 489, 490, 491,492, 493, 494, 495, 496, 497, 498, 499, 500, 501, 502, 503,504, 505, 506, 507, 508, 509, 510, 511, 512, 513, 514: n = A,T,C or G
  misc_feature 515, 516, 517, 518, 519, 520, 521, 522, 523, 524, 525, 526,527, 528, 529, 530, 531, 532, 533, 534, 535, 536, 537, 538,539, 540, 541, 542, 543, 544, 545, 546, 547, 548, 549, 550,551, 552, 553, 554, 555, 556, 557, 558, 559, 560, 561: n = A,T,C or G
  misc_feature 562, 563, 564, 565, 566, 567: n = A,T,C or G
aaatttaaagggacatttttagtgttggctaattcctgacagttcaagaagtgccaggaatgaacagtaaaatctggatacatttacaaagtaattttctcagcatattctgcaaatatttcattgtccattttaaaatgctatgaaggcagaaaaaaagggagattaatatacatgtatctcaaggccacagattgtgggtaatatcaattctaacaatgccccttgggaaatgagccccagacacccaggcgcataggagagagagtcctttgctttagatcttctatggattaccgagatgtcaccatctagtggacagagcaagaattcaggaataggaagaggagaatctttaacatctcattttcttcatctgtaaaatgtgattagtcacatttcttaaagggaggtacactttatatcaagtaaattacatgcaccatgtatgtattatatcatgatatnnnnnnnnnnnnnnnnnnnnnnnnnnnnnnnnnnnnnnnnnnnnnnnnnnnnnnnnnnnnnnnnnnnnnnnnnnnnnnnnnnnnnnnnnnnnnnnnnnnncattgtctgagattaaagaaaaaaatcaaagtaatacttcactgggaccagtgacttcagtagtgaaaaagacagtttttgcgacacagagatgaataacaaggaagtttagaatccaatagtagcgagaagaaagacaacgctagatacaaatcccctaagttcaaatacaagacctccctttccatggctgtgtgacttttgacaaattatatagtctctctgtgcctcaatgtcgtcatctataaaaaggagttaaataatacctatttcataggtttgctataaggtttaagtgtggtcatatgtgtagggtacttagatctgagactgatgcctagtaggtgttatggaagtgttggctattttcttcttgatgctaccaaaacttcatatgtggtgtgtgtcatcctgtattttgatttctcatcatttttgtcatttgctcttctgtttttctcacaaaactatgattttccaaaagggaatgaaacactatggcccatcttgaaatctgtcctgcagactactcttttataatccatgagctgagcatgattatttttttaccttttaaaaatattgttagacataagaatatgcaagygagaccatgtgtggttcacaaagcctaaaatatttaacatctggctcttaatagaaaaatatgtcaaaccttgttctagagaaagggaccatatttcattaattgttacattcaatatgtgtttgataaagcaaaaaaaggataaagaatagaaaggctggaagatgcccaagaaaaatacatgtaaacactgtggaaggagcaattaattctgttcatgcacatcaaggaaggattctagtagatctttaaagatggcggtaatctcaatgaaggaggatgttttgatacattgtggtttggaactcagaaatatttcacagaggttactgaaatatataatgacaattttataaatttagtaaatccaaatattctctaggttcagcaaggtcaaatcctaggtaagaaaaatgtcccttgggtctcatt

SEQ ID NO: 721843 - DNA, 1606 bp, Homo sapiens
  misc_feature 468, 469, 470, 471, 472, 473, 474, 475, 476, 477, 478, 479,480, 481, 482, 483, 484, 485, 486, 487, 488, 489, 490, 491,492, 493, 494, 495, 496, 497, 498, 499, 500, 501, 502, 503,504, 505, 506, 507, 508, 509, 510, 511, 512, 513, 514: n = A,T,C or G
  misc_feature 515, 516, 517, 518, 519, 520, 521, 522, 523, 524, 525, 526,527, 528, 529, 530, 531, 532, 533, 534, 535, 536, 537, 538,539, 540, 541, 542, 543, 544, 545, 546, 547, 548, 549, 550,551, 552, 553, 554, 555, 556, 557, 558, 559, 560, 561: n = A,T,C or G
  misc_feature 562, 563, 564, 565, 566, 567: n = A,T,C or G
aaatttaaagggacatttttagtgttggctaattcctgacagttcaagaagtgccaggaatgaacagtaaaatctggatacatttacaaagtaattttctcagcatattctgcaaatatttcattgtccattttaaaatgctatgaaggcagaaaaaaagggagattaatatacatgtatctcaaggccacagattgtgggtaatatcaattctaacaatgccccttgggaaatgagccccagacacccaggcgcataggagagagagtcctttgctttagatcttctatggattaccgagatgtcaccatctagtggacagagcaagaattcaggaataggaagaggagaatctttaacatctcattttcttcatctgtaaaatgtgattagtcacatttcttaaagggaggtacactttatatcaagtaaattacatgcaccatgtatgtattatatcatgatatnnnnnnnnnnnnnnnnnnnnnnnnnnnnnnnnnnnnnnnnnnnnnnnnnnnnnnnnnnnnnnnnnnnnnnnnnnnnnnnnnnnnnnnnnnnnnnnnnnnncattgtctgagattaaagaaaaaaatcaaagtaatacttcactgggaccagtgacttcagtagtgaaaaagacagtttttgcgacacagagatgaataacaaggaagtttagaatccaatagtagcgagaagaaagacaacgctagatacaaatcccctaagttcaaatacaagacctccctttccatggctgtgtgacttttgacaaattatatagtctctctgtgcctcaatgtcgtcatctataaaaaggagttaaataatacctatttcataggtttgctataaggtttaagtgtggtcatatgtgtagggtacttagatctgagactgatgcctagtaggtgttatggaagtgttggctattttcttcttgatgctaccaaaacttcatatgtggtgtgtgtcatcctgtattttgatttctcatcatttttgtcatttgctcttctgtttttctcacaaaactatgattttccaaaagggaatgaaacactatggcccatcttgaaatctgtcctgcagactactcttttataatccatgagctgagcatgattatttttttaccttttaaaaatattgttagacataagaatatgcaagcgagaccatgtgtggttcacaaagcctaaaatatttaacatctggctcttaatagaaaaatatgtcaaamcttgttctagagaaagggaccatatttcattaattgttacattcaatatgtgtttgataaagcaaaaaaaggataaagaatagaaaggctggaagatgcccaagaaaaatacatgtaaacactgtggaaggagcaattaattctgttcatgcacatcaaggaaggattctagtagatctttaaagatggcggtaatctcaatgaaggaggatgttttgatacattgtggtttggaactcagaaatatttcacagaggttactgaaatatataatgacaattttataaatttagtaaatccaaatattctctaggttcagcaaggtcaaatcctaggtaagaaaaatgtcccttgggtctcatt

SEQ ID NO: 721844 - DNA, 1975 bp, Homo sapiens
gttcttaaagtgaatttatctacaccaaaatttgggaaccactaatagaatttatttatatagtttataatgtttggaagtattatcaacattataaggcaattgtgaggattgcaagaaataaagtatttggcatagtttctgccatgggtaagttcttgataaatgttagtaacacaaaaaagtgttttgcacatttcttgggcaggaattgcatcttatatttctgatttccaagtcaaggtagacgggaccatggtatctgttcaatacattcttattgatcaaagctgcttttctatttcagagtttatgctgtcttttcttttttggttctttcttctcatgtctatttttggactggaaacatctcagggaaatgagaactgcaccttgaccaaagctgctttggtcactgtgaaatgtttcatttggagtatcttaagcagtgttttctgagataagtagagtggctattattagtctggtttcatgtatgaaaatagagatcagaaaacaaaaggtgaccttgtacagatactttcttggttaaaattaaaaaacaaacagacaaaaaagactagaactcaatatttcattagaatcttttccacttcactatactgcttttcacagatagcagtacagcaccataaataaattcagtcttttccccataggtcttcatctctcctctttttgtctttattctctgtattcacccttcagagattccatttttccacattgttcttatcttcagctaatatatggtaaattaatcacatcaaagtgctagacacaaaggaaattcatcccttcgtcccttgtgattgcttttgaagaaagagcgatataaacggaaggtccgtgatccaagccacaatcatggaatttcagacagcatggcacctgaagagatcagaggaagtcatgtggaagttcttcccttcagatcacaattctgaatgcaccttccttctctgtaaatgttctaaggctgctactgacacgacaattataaagctatcttttttgtaataagggatccccaatcttataaactttaattttactgagataaaagcacagattccacagaccattgaatatcttgagagtcatttaagacccatgctcctttctaagtaccagtgtgaggataatgttgggagcaggcattggagtagagaccccatcaggagatcaggtccagctcagaaaccaataccctgatatcagccctgatatcttgccttgggcctctagacagagaagtccactcaatggctgaatttgtataacctccttctagtgtttcatacggtggaatgtgttacgttcacgcatccttttctgggacagtgtttctatttggaattttgcaatattatttaatctatactttacatttaactacataaatttatagccattcaattgttcttatcattctgattaattaaaatgcatttcttcattattttgtatgaactactcttagttattttctcactacaaataatagtcatcacctcttgagggactaccctctcatctgttcttcctactcttcttatttgtgcttcatttgttttctggaagttgtcatctctgttgtatagagtgatacattaaaacaaactaagtgttaaacatacaagtgcaaatatttytaatattaacatataggaatttggagtcttccagtggtcaatggtgtttgatgcaacttcctccacttccatcattttacatttatgtgttctcgaggctgtgtttagacaatattattttatctcgcatactaccctcttttggcacctctcatttcacacacagattcaagctacaactagcagaaaagttgcaccttttggtaaaaaccaaagtcagcgatggttagatgagccctcactgctgttcccaagatgcagttcaaatctttgaatgttctaaaggatgtcctagtgct

SEQ ID NO: 721845 - DNA, 975 bp, Homo sapiens
cctttctccaggcaaagctggggggtaatctgtgttatattaggtatgtcagagctcttgtaatgcaagggctcctggcatcttagaaaatacgctctctgatgtgatctcaagccagctgctctaccctaatcgtctccagaggtagacggagaaatatgccaagaaataatgtcttccatgtgacagcactcktcatatttctgcattctctctaaagacttccacatcctcacacggcatgccgctcttggataagagagccctgtgtttagcatcttagtattcggccttttcacatggtggccagagttcagtctgggacaggtgtcagcgtcactcccttttctatttttgctagaggacttagatttattggcatcaaagttctctggctgaatgacacttggctgtttgcagggtcactttctgccattttttgttacctattgccttatggaacattttcataacctaacctgcacttacaactttaccttgttaacctcttcctttcctgaagagcacgttttggtcgcaaggtgagtcgtttctagtgaatgatcctttcagaaactgctctggctgtgtggaaggaagatgtcactgggataggcagtgcctccctctaggatggccacaggcgggaagccacaacggggctgtgctgagcttcgaacacctgttaagcaacgtgcttggggcacacagcccatttttcagttgagaagtaaaacgtcttttactataaaatgggtacaaagatgaaatttcagtttatctgacaacactggtgattgttgtgaagctctactgtctaccatcgtgtactgtccaatatggtagccacaagccatatgtggatacttacatttaaattaatttaaattcaataaaagttaaacctttaatccctcagttgcatcagtcacatttcaagtgctcaatagccacacgggactagtggctactgta

SEQ ID NO: 721846 - DNA, 975 bp, Homo sapiens
cctttctccaggcaaagctggggggtaatctgtgttatattaggtatgtcagagctcttgtaatgcaagggctcctggcatcttagaaaatacgctctctgatgtgatctcaagccagctgctctaccctaatcgtctccagaggtagacggagaaatatgccaagaaataatgtcttccatgtgacagcactctkcatatttctgcattctctctaaagacttccacatcctcacacggcatgccgctcttggataagagagccctgtgtttagcatcttagtattcggccttttcacatggtggccagagttcagtctgggacaggtgtcagcgtcactcccttttctatttttgctagaggacttagatttattggcatcaaagttctctggctgaatgacacttggctgtttgcagggtcactttctgccattttttgttacctattgccttatggaacattttcataacctaacctgcacttacaactttaccttgttaacctcttcctttcctgaagagcacgttttggtcgcaaggtgagtcgtttctagtgaatgatcctttcagaaactgctctggctgtgtggaaggaagatgtcactgggataggcagtgcctccctctaggatggccacaggcgggaagccacaacggggctgtgctgagcttcgaacacctgttaagcaacgtgcttggggcacacagcccatttttcagttgagaagtaaaacgtcttttactataaaatgggtacaaagatgaaatttcagtttatctgacaacactggtgattgttgtgaagctctactgtctaccatcgtgtactgtccaatatggtagccacaagccatatgtggatacttacatttaaattaatttaaattcaataaaagttaaacctttaatccctcagttgcatcagtcacatttcaagtgctcaatagccacacgggactagtggctactgta

SEQ ID NO: 721847 - DNA, 975 bp, Homo sapiens
cctttctccaggcaaagctggggggtaatctgtgttatattaggtatgtcagagctcttgtaatgcaagggctcctggcatcttagaaaatacgctctctgatgtgatctcaagccagctgctctaccctaatcgtctccagaggtagacggagaaatatgccaagaaataatgtcttccatgtgacagcactcttcatatttctgcattctctctaaagacttccacatcctcacacggcatgcygctcttggataagagagccctgtgtttagcatcttagtattcggccttttcacatggtggccagagttcagtctgggacaggtgtcagcgtcactcccttttctatttttgctagaggacttagatttattggcatcaaagttctctggctgaatgacacttggctgtttgcagggtcactttctgccattttttgttacctattgccttatggaacattttcataacctaacctgcacttacaactttaccttgttaacctcttcctttcctgaagagcacgttttggtcgcaaggtgagtcgtttctagtgaatgatcctttcagaaactgctctggctgtgtggaaggaagatgtcactgggataggcagtgcctccctctaggatggccacaggcgggaagccacaacggggctgtgctgagcttcgaacacctgttaagcaacgtgcttggggcacacagcccatttttcagttgagaagtaaaacgtcttttactataaaatgggtacaaagatgaaatttcagtttatctgacaacactggtgattgttgtgaagctctactgtctaccatcgtgtactgtccaatatggtagccacaagccatatgtggatacttacatttaaattaatttaaattcaataaaagttaaacctttaatccctcagttgcatcagtcacatttcaagtgctcaatagccacacgggactagtggctactgta

SEQ ID NO: 721848 - DNA, 975 bp, Homo sapiens
cctttctccaggcaaagctggggggtaatctgtgttatattaggtatgtcagagctcttgtaatgcaagggctcctggcatcttagaaaatacgctctctgatgtgatctcaagccagctgctctaccctaatcgtctccagaggtagacggagaaatatgccaagaaataatgtcttccatgtgacagcactcttcatatttctgcattctctctaaagacttccacatcctcacacggcatgccgctcttggataagagagccctgtgtttagcatcttagtattcggccttttcacatggtggccagagttcagtctgggacaggtgtcagcgtcactcccttttctatttttgctagaggacttagatttattggcatcaaagttctctggctgaatgacacttggctgtttgcagggtcactttctgccattttttgttacctattgccttatggaacattttcataacctaacctgcacttacaactttaccttgttaacctcttcctttcctgaagagcacrttttggtcgcaaggtgagtcgtttctagtgaatgatcctttcagaaactgctctggctgtgtggaaggaagatgtcactgggataggcagtgcctccctctaggatggccacaggcgggaagccacaacggggctgtgctgagcttcgaacacctgttaagcaacgtgcttggggcacacagcccatttttcagttgagaagtaaaacgtcttttactataaaatgggtacaaagatgaaatttcagtttatctgacaacactggtgattgttgtgaagctctactgtctaccatcgtgtactgtccaatatggtagccacaagccatatgtggatacttacatttaaattaatttaaattcaataaaagttaaacctttaatccctcagttgcatcagtcacatttcaagtgctcaatagccacacgggactagtggctactgta

SEQ ID NO: 721849 - DNA, 865 bp, Homo sapiens
tctgcttcagtgacttttttagccacaccctacttgtaaattgtaaactgtcattcagagtagcatagtgatgtttcaaacaagtcaggttataatacctctacttcttttgtcttaatgcccagaggtgaattcagaaaatgttcctatgttttggctcgtaaaagcatccatctggaaaatactaaataacaaaccctaatagtaaagagcattgcaaagatttatgacactatgcatacatgtaaattgtatatttaaacatcataattagctaactcagccttcattgtagttcagcacgtatttcaggttgaggacaaagaaaagcattctattgttttgtgtcaggttttaagccatattttaaaacatactattaaccctatatactgaattaaaattgcaattaataacaaaaacttcattggagatttttagtatctaaaaagaactatagaacaatctgtattttcgctagctgcagtggctcacacctgtaatcccagcactttgggaggccgaggtgggcagatcatgaggtcaagagatcaagaccatcctggccaaccaacatggtgaaaccctgtctctactaaaaaaatacaaaaattagctgggcgtagtgtcgcacgcctttagtcccagctactcaggaggctgatgsaggagaatcgcttgaacccgggaggcggaggttgcaatgagccgagatagggccactgcactccagcctgggtaacagagcgaggctccgtctcaaataataataataataaaataaataaataaaagaacaatctgtattttaaagcatgctgtattttatgagaaacatccaatttaactttaagatattaaacag

SEQ ID NO: 721850 - DNA, 607 bp, Homo sapiens
cattgattttatagtacagtgattccataacagggtttttttcctcacctgaaataattttattttctataaagttataaaatattgtatatcagactttgttatttatttctcttaaatcataaaaccaaaggaaaggtaaagaggaagaacagttaacctctggtgaccaaaggtacacttgatctgttattttgtattctatactcttcaaaagagcaatataaacagaattatttatgcccagcaaaatgttgcttaattacttatgcaccactgtttgsttgtattttaagctctctctaccacccacaggcagacgttaaacagctgctaaaagctagctttagtcttgcctgtttgaaattagcatacttgagctttgaaaaaactttgttaccaatttacatatgcatagagactgatatttagactcaccatatgatatgtccctcaagagcttttcttattgcctccatcctcaggtctcaacctagagactgtaaatctagcaggtgattaattctatacccttgagaaactagcaattagcacttgcaaccagtaaaaaattgtcatttcaaaaccctgtttactatgcccatgt

SEQ ID NO: 721851 - DNA, 2498 bp, Homo sapiens
tacccatctgacaagggatttataaccagaatatataaggagctcaaacaaatctataaaaaatctaataatccaataaaaaataggcaaaaggttttagtagacatttctgtttgcctgaaaccatatctagccttaacaatgaaagacattttattagaaattttatcttgttgcaatttgcaatgatacagattaactaggacattatgctaagtaaaataagccaggcccagaaagacaaatctacacaatcttacttatatatgaaatccctaaaagttgaattcataaaaacagaggatataatagtggttgccagtgcctggggatagaggaactggagagatttatgtcaaataatatgtaatttcagttataaaatcagtaagttctgggaatctaatgtacgggataggtggtggtggatgtggtaattaatttgatkatagtaatcattacacaatgcatatgtgtattaaatcattatgttttataccttgaatatatacaattttttgtcaattaaatacttaaatttttaaattttcttggttctgcagaggcttgtagaaattacacctgtcctttgacactttctgctccaacattatgtgatttttattaatttgtcttaactactataaagaaaatagcctaaaaatagacccattgcaaattaccttgtttaaatgaatcaattcaatgatttcaactctcttaaattaaataatattttatttatttatttatttattgagatggagtcttgttctgtcgccaggctggagtgcagtggcgcgatcttggctcactgcaagatccgcctcctgggttcacgccattcttctgcctcagcctccccagtagctgggaccccaggtgcccgccacctcgcccggctaattttttgtgtttttagtagagacggggtttcaccgtgttagccaggatggtctccatctccggacctcgtgatccgcccgcctcggcctcccaaagtgctgggattacaggcgtgagccactgcacccggccctatatattttaattagttcaaagttttagtagataaatgtctctggtactgtgaaaaccttatcctttctgagaaacggcggggtggggggggggcggataaaaataaatgaagtaaaggtggcacttctgccttaaatatctcaaaaaatatcccacaaaaaaaccccaaagtcacatatccattctgtgatattcataagtgtgactatgactccgaatgatgttttactaaaaatgaccatataactatactactaacctgagtaattgtaataactcctaaagcaaacattgccaagttttaactttcacctacttataaccaattaaaaatgaaaggaggtaagaagagtacaaaattaagaagagtaactttgtttttttctattttatcatcaactatctttgccatcaatcagtaagctgagcttatttctgaaaataaaaaactattcctacagggtatacaatgtccaatatcctcctccttaatgcttaataatcttgcatgtgaggaaccaatgtaatttgtgagaacaaattgttcctcagggatgtttctactaaatctgaatatattactcatttttaaagtagcgataaagattatataagacgtagttcattatttttctaactgtttcatgattccattgggaggtgagacttaaatcatatacaggatgtctaccttaaaaaggctgcttttcaaatcaaatacaatataattttattataaaaatgtcactcaaaggaaagatttcatttgaaaagacaatcaatgcaatttaaaggaaaatatcttggtacgggctatatagaacatctaaattctggtcagcactaaaattgccacaagaggttctggactccttttactaatatattagaaaatcatattagttttgaaaagcaaagactttagggaaaaaatatgctaggacatacaattatgcatgctaatattcaaaataaaaaaaacaatgggggcatgccaataaataaattagattactaaggagcctataggcgtaacttctttctctgccatcaagcaacctgtgagagttgccttatatttttctccattaactttaaaatacccttcttctgccctgactttaccaacaaattaaattcagcatccaaagtcctcctagatgaaaactcagactagctgttcagccctatcttctacatctcttcacccactttcactaagataaatgaaaaacctttctcttcctagtacacacaccatattttcttctttatgattttatttatattaattaacctggttcaaattcttctctaaaatatcaatctatttatttatctatctatctaatctatctgtccacatgcatagcctaacataatttttattatatatttatgacataaaatgtgtttgctagttgtgcacagcattaaatgattaagttaaacaaaca

SEQ ID NO: 721852 - DNA, 2498 bp, Homo sapiens
tacccatctgacaagggatttataaccagaatatataaggagctcaaacaaatctataaaaaatctaataatccaataaaaaataggcaaaaggttttagtagacatttctgtttgcctgaaaccatatctagccttaacaatgaaagacattttattagaaattttatcttgttgcaatttgcaatgatacagattaactaggacattatgctaagtaaaataagccaggcccagaaagacaaatctacacaatcttacttatatatgaaatccctaaaagttgaattcataaaaacagaggatataatagtggttgccagtgcctggggatagaggaactggagagatttatgtcaaataatatgtaatttcagttataaaatcagtaagttctgggaatctaatgtacgggataggtggtggtggatgtggtaattaatttgattatagtaatcattacacaatgcatatgtgtattaaatcattatgttttataccttgaatatatacaattttttgtcaattaaatacttaaatttttaaattttcttggttctgcagaggcttgtagaaattacacctgtcctttgacactttctgctccaacattatgtgatttttattaatttgtcttaactactataaagaaaatagcctaaaaatagacccattgcaaattaccttgtttaaatgaatcaattcaatgatttcaactctcttaaattaaataatattttatttatttatttatttattgagatggagtcttgttctgtcgccaggctggagtgcagtggcgcgatcttggctcactgcaagatccgcctcctgggttcacgccattcttctgcctcagcctccccagtagctgggaccccaggtgcccgccacctcgcccggctaattttttgtgtttttagtagagacggggtttcaccgtgttagccaggatggtctccatctccggacctcgtgatccgcccgcctcggcctcccaaagtgctgggattacaggcgtgagccactgcacccggccctatatattttaattagttcaaagttttagtagataaatgtctctggtactgtgaaaaccttatcctttctgagaaacggcggggtggggggggggcggataaaaataaatgaagtaaaggtggcacttctgccttaaatatctcaaaaaatatcccacaaaaaaaccccaaagtcacatatccattctgtgatattcataagtgtgactatgactccgaatgatgttttactaaaaatgaccatataactatactactaacctgagtaattgtaataactcctaaagcaaacattgccaagttttaactttcacctacttataaccaattaaaaatgaaaggaggtaagaagagtacaaaattaagaagagtaactttgtttttttctattttatcatcaactatctttgccatcaatcagtaagctgagcttatttctgaaaataaaaaactattcctacagggtatacaatgtccaatatcctcctccttaatgcttaataatcttgcatgtgaggaaccaatgtaatttgtgagaacaaattgttcctcagggatgtttctactaaatctgaatatattactcatttttaaagtagcgataaagattatataagacgtagttcattatttttctaactgtttcatgattccattgggaggtgagacttaaatcatatacaggatgtctaccttaaaaaggctgcttttcaaatcaaatacaatataattttattataaaaatgtcactcaaaggaaagatttcatttgaaaagacaatcaatgcaatttaaaggaaaatatcttggtacgggctatatagaacatctaaattctggtcagcactaaaattgccacaagaggttctggactccttttactaatatattagaaaatcatattagttttgaaaagcaaagactttagggaaaaaatatgctaggacatacaattatgcatgctaatattcaaaataaaaaaaacaatgggggcatgccaataaataaattagattactaaggagcctataggcgtaacttctttctctgccatcaagcaacctgtgagagttgccttatatttttctccattaactttaaaatacccttcwtctgccctgactttaccaacaaattaaattcagcatccaaagtcctcctagatgaaaactcagactagctgttcagccctatcttctacatctcttcacccactttcactaagataaatgaaaaacctttctcttcctagtacacacaccatattttcttctttatgattttatttatattaattaacctggttcaaattcttctctaaaatatcaatctatttatttatctatctatctaatctatctgtccacatgcatagcctaacataatttttattatatatttatgacataaaatgtgtttgctagttgtgcacagcattaaatgattaagttaaacaaaca

SEQ ID NO: 721853 - DNA, 2498 bp, Homo sapiens
tacccatctgacaagggatttataaccagaatatataaggagctcaaacaaatctataaaaaatctaataatccaataaaaaataggcaaaaggttttagtagacatttctgtttgcctgaaaccatatctagccttaacaatgaaagacattttattagaaattttatcttgttgcaatttgcaatgatacagattaactaggacattatgctaagtaaaataagccaggcccagaaagacaaatctacacaatcttacttatatatgaaatccctaaaagttgaattcataaaaacagaggatataatagtggttgccagtgcctggggatagaggaactggagagatttatgtcaaataatatgtaatttcagttataaaatcagtaagttctgggaatctaatgtacgggataggtggtggtggatgtggtaattaatttgattatagtaatcattacacaatgcatatgtgtattaaatcattatgttttataccttgaatatatacaattttttgtcaattaaatacttaaatttttaaattttcttggttctgcagaggcttgtagaaattacacctgtcctttgacactttctgctccaacattatgtgatttttattaatttgtcttaactactataaagaaaatagcctaaaaatagacccattgcaaattaccttgtttaaatgaatcaattcaatgatttcaactctcttaaattaaataatattttatttatttatttatttattgagatggagtcttgttctgtcgccaggctggagtgcagtggcgcgatcttggctcactgcaagatccgcctcctgggttcacgccattcttctgcctcagcctccccagtagctgggaccccaggtgcccgccacctcgcccggctaattttttgtgtttttagtagagacggggtttcaccgtgttagccaggatggtctccatctccggacctcgtgatccgcccgcctcggcctcccaaagtgctgggattacaggcgtgagccactgcacccggccctatatattttaattagttcaaagttttagtagataaatgtctctggtactgtgaaaaccttatcctttctgagaaacggcggggtggggggggggcggataaaaataaatgaagtaaaggtggcacttctgccttaaatatctcaaaaaatatcccacaaaaaaaccccaaagtcacatatccattctgtgatattcataagtgtgactatgactccgaatgatgttttactaaaaatgaccatataactatactactaacctgagtaattgtaataactcctaaagcaaacattgccaagttttaactttcacctacttataaccaattaaaaatgaaaggaggtaagaagagtacaaaattaagaagagtaactttgtttttttctattttatcatcaactatctttgccatcaatcagtaagctgagcttatttctgaaaataaaaaactattcctacagggtatacaatgtccaatatcctcctccttaatgcttaataatcttgcatgtgaggaaccaatgtaatttgtgagaacaaattgttcctcagggatgtttctactaaatctgaatatattactcatttttaaagtagcgataaagattatataagacgtagttcattatttttctaactgtttcatgattccattgggaggtgagacttaaatcatatacaggatgtctaccttaaaaaggctgcttttcaaatcaaatacaatataattttattataaaaatgtcactcaaaggaaagatttcatttgaaaagacaatcaatgcaatttaaaggaaaatatcttggtacgggctatatagaacatctaaattctggtcagcactaaaattgccacaagaggttctggactccttttactaatatattagaaaatcatattagttttgaaaagcaaagactttagggaaaaaatatgctaggacatacaattatgcatgctaatattcaaaataaaaaaaacaatgggggcatgccaataaataaattagattactaaggagcctataggcgtaacttctttctctgccatcaagcaacctgtgagagttgccttatatttttctccattaactttaaaatacccttcttctgccctgactttaccaacaaattaaattcagcatccaaagtcctcctagatgaaaactcagactagctgttcagccctatcttctacatctcttcacccactttcactaagataaatgaaaaacctttctcttcctagtacacacaccatattttcttctttatgattttatttatattaattaacctggttcaaattcttctctaaaatatcaatctatttatttatctatctatctaatctatctgtccacatgcatagcctaacataatttttattatatatttatgacataaaatgtgtttgctagwtgtgcacagcattaaatgattaagttaaacaaaca

SEQ ID NO: 721854 - DNA, 1796 bp, Homo sapiens
tgcttcattttatcagctgcaatttaaaattttaattattaattatcaaaaataaaccagttatattagtaataaaactatgaggtacttataagaagtttgacaaaagatacagaaaactttaatggacaaaattagtaaactttactgataggcctacataaagacttcaataaaaggagagaagtaccattcttgtggatatcaagactcactatgataacactgtcccattgaacaatatcaatctatattttcccatttctctcaatatagaagaaggatggagtagaatggaatcagggagaagttcacaggaattatcaactgcatttgcaatattttcttcattaaaagtcagtatgatcacatatggcatatatttagaactaagtgaggtggtagcactcacgtgtttatttcattataatattctctatatgttatatgctggaaatattacattaaatttttttataaaaatatataatctaggaaagtatgtggagaaaattcagatataaaagaccatcagtcatttccaagttgtaacagtgatttgcataggttcattgaatcttttgagaaagttttgattaattttagcatggcattagttcagtatacttatttaatgaggtatctcaagaataggcatgttcaataagcatgtgactgagcagtaggactaaaaccaaatgaaaaaacaggcaaagttatgttaattaagttaaggttgctttacctaacatcttgagttgcctaggatagtcatctttgatacctgttgtsccaacataattcttaatagtttctcttttcactctcagagtgctcagcttagaagataaattacatggttataagctagttatagattggaaaggaattaatgtgaagttttacaatatcttttacaatgctatccaatagatttgagctaatctttcaaaaccagaatttaatggaccatttttcattttgttgaattcccaaaagttttacaggacactgaacaccctgaaggaaaatgtcctgaaggaaaatgtaagataatacttaattcaacaaatccccatttagcaagaaaagaaataagaatgtaagaaatgcaagatagaatgctaaatgcaagaaataatcactaatagaagtgagagtctatgccctcaagaagattaaaattcactggaagaggcaaagcaaggatgaaaataactatgatagaagacaaaataaggtaccataaaaataagatatcctaaaatacactacaaaaaacagcataagctctcaaagaaggaaaagatcatatgtaattgggagataaagaacttacataaaaataatattccaatcagaacttgaaggagaggtagtattttgaaagctagaaattatgaagctatagaaagagtaccaggcaagattagcaaaaatgaacaaaaaaggcatgatagtgataacatacaaagaaaataaagaaaattaagaaagcagaaggggcatttggatcatttggatattaatagagtttatgtaagaaaataagactaaaatctaaaactatagtttgactttgtattgtagagggatgtgaaaaccagggaaagaaacttttaccaaaattggtaggtaatgggaagctaggaggcagtaatgtgagagagagagagagagagagagagtgtgtgtgtgtgtgtgtgtgtgtgtgtgtgttaagcaaatgagtgatgtaatgagagttgtgttttaggaacttgaatctagtagcagcatgacctatgtttaatggg

SEQ ID NO: 721855 - DNA, 2265 bp, Homo sapiens
cttaatcaggtcactctcttctcaaaattcattcagtgcttggcatcatccactgagatataaggctttccatgatccagattctgtacattcatttatacttatttccagccaccttctctttcccactttacactagccatcctgaattactaagatttctccatatataccatcctgctttatgcttactatgcctacatgcctctacatatagcatttcttctgcctaccatgtccttcttgctttttaaaaaaataattgtaaagtcctattcatctctgtagcctggaaacagatgttactgcctcttagaaaccttttcagatgaccaggaaactaggtgctgtatcctctatgtcaccaatatcctttttttagcaaagccataaacctctatttaacaattcccttattctattgtaattttatgaaatgatgaataaataaatgaagctaatgagtcaaatatctgtcaagacagaaattaaaacaaaagctaatcattattttttaaatagcaaacaatgcatagatgagaaattagaaaagacgtaggaaggtatggtgtaacacaaagaaaagtgatcaatatttagcaaaatagcatgcatataaggagctgcaaattacatcttagagagacacaagttttatcaagaaaagtgaaatctaatgataaatacagatatttagagagaagacaatatttttaaaaaattatacatattttgaatctagagtcaaagaagtgacactcaattctacttccacagccaatagcatttgaaatgaaaagagaaacatctcttaataaagtgggttaaaggcagaaaaaaaggagactgaaaaagtggctgggaaagcaatagctttctcactagccttaactatatgggctatattttacccaagttatctgctggccaacatgcacccatagacaatatttattactgctagaagcattagtattgaacaataacctctgctgccagatatgtggataatctaatatttacctgaattaaccatgacatctttacagaataccctaggtgatcgccaaatcattgttctgtcaccagagaagagattattaacaagtgatgacaaacagaaaataaacacatgaaaagcacatcgatcctttttcacaacatggatttttattaagcttcttccaaatgcatgtttttttctgcttttctatgatatcagagaaactagatagtgaaaataaataggcttataatggagaattttattcattagatattaaggaactgtcccaattgcgttgttttacttaactcattcggtttatggagggcaacyaggaaaaaaaggttaatcacccaaagcattcttagtggaattaggaaataaatcataacctaagaagtccagtaatggggtatattttgttaattccagtaatacctttattgctctgttacttaagaaggccttgattgctgatagtctatggtcttgccaatccaattttgactaaacttgttttcttttgtttatagctgcttttcttgaggcttgtgtactaatccaaggagattcaaataacttcatttttttaatcatttctaatcttattctctgtttaccggattgctattatagattgatagattaaggaaattctgtagacattctatttatatattaggaatatactaggaaaggtctctcagatagtttcaagtatagaatggaaatacgtgttctatttgtgagtattattaggtagttttgtagctggctgaacaattttatttaaaagatgttgattattcaatgtcaattttatttacttcttccctaatctttattatttattttcttctactaagtttgggtttggcttatacctgattttctagttctttaatatacatcattaaattgtttatttgaagtttttcttttttgacgtaggaacttatagctataatcttcgctcttagtactgctgttgctctatctcacagcaaaattgacaaaacttgagacaaactaagaaaaaatagaaaaggtaccaataaatagagtaggaaatgaaaaagaagatattgcagaaatggaagggattattagtgactactaggaacaactatgtgccaataaatttgaaaatctagaagaaatggacaaattcctagacacatacaacctaccagattgacaaaggaagaaatctaaaacctgaacaaatcaagcaagtaactatattgaagccataataa

SEQ ID NO: 721856 - DNA, 633 bp, Homo sapiens
gcactccctgctccccatgcaggcttctcatcctcttttgctggcctcctccctcctcgctgtccctggtctttttcagccacaagcaaaacacactcagccttgaagtcagatgctctacagaagcctgcaaaaacagagtcaggagttgtgtggccttggcgagtcacctcacctcaccaagcctcagcctcctcacctattaaatggggacacaataggacccacttccttggagytgactgaggtatgaattgagtcaatgcattcattgctcagcacacagcttagctcaaagttaatgctcaataaattgtggttcccacctcctgctccacggagcagacatgaaacaggtacgagaagcaacgagaaggggcggcagcagagcatcaacacacagggagtcctgcctactgtcccgacgccacccagaggctcaaggggtgccccggctgctctccgaagctgccggtggcactttcgccagccaccttgtttccaaacttgctgccagcttcccctagcgcagtgatttccacaacggagctcccggctgtgggaagggggctttctttgacttgtcctaaaatggcctcacctggacccagtggggtgtggggaccagggggc

SEQ ID NO: 721857 - DNA, 752 bp, Homo sapiens
tgatttgatttttaatgtacatgttctggggattggcagccgtggacaatattatattccactcaaagtgggccacctatttaagtcatctttgagggaggaactcagggaggcagaattagattttatatctaggagctattttttatttaaatctgtcataatttctatattttgtgtaagattaatattatgtaatgtggtgattaaatttaaaataattgaaaagaactctgttgaaaccttgaagtagacttaacatgcttttcaaaagtatgtgtactctgactaagtgaaaaaacagttctggacaatgttttttcactctccaattaaaggtttatatttctaaaagcattaaagtacactttagaaagcaattatatttacctatcaattttagaaaatcaagtatttaaccaaataatttttggtttgtatccaaatgtgatcattctaaagtttgtacatactgtaaaatgaaagaactttgggaggtcgaggcaggtggatcacgaggtcaggagatcragaccatcctggctaacatggtgaaaccctgtctctactaaaaatacaaaaaattatctgggcatggtgacatgcacctgtagtcccagctactcgggaggctgaggcaggagaatggcgtgaacctgggaggcagagcttgcagtgagccaagatcgcgccattgcactccagcctgggcgacagagtgagactccatctcaaaaaaaaaataaataaaa

SEQ ID NO: 721858 - DNA, 1183 bp, Homo sapiens
ctgaggaaaaaacattctggtttctgctacacatcttgggaaagagagattccagtatctatggctggccttgkggagaacaggatgtgagagacaggaaggcaggagaaggtaaaggagaaacttttgcttttaggctgcttctaatgccttcattatggtgtattattttctgagctccaacattccctggtttgaaactcgcccaagaagttttacagtccagaaactgggatgatgaatgtgcttacaagccattgaaatggtctctctgttctaagaataggccagtccagtttaaacagctaacagttttgtcttattttaggcagtagtgttgcagacaagcttctacaaaagtcctagacttctaattttgtataatgtatctaaacaaatatcttccccactgacaataggtcaatatatgcagaattaaaacataggcatcattaataaagcatccaaaatgtataagaatgctaaaggtatattcagggtgttgtaaatatcaatctgacccaaagaactatagacttttgctgatagaagaaactttagatataatcatctagtttaaattttctcattttaaaaataagttttgaaactgaagaccaggaatatcatatctatactacataacattatttaagtaagattgtatgttctcaatcaaatatttaataataactattttgagcatcactgaatatttatttatatattttttgcctcttcataataaaaaggagaaaaatatgaacacacttagactaagatatccatgacagtagaaacccttttgtgccattgagtcttcagccagtagcccaaaacttgtaaaacttattcctcattggtataagaaatagcagtacagatttttttttccaagatggcagattagaggttttagtatgcctcagccacttggaaatggcaagatagtatggaaagatcaactctgtgaactttaattcaagaaggaaaatgggaatccacttgaactgtgaaggatacccaagatcacagggaggagaaccccagcaaacagctcctgtgatggtgtctgggtgataaaagtaagtgatgccctagtatgtgagcagtcactccctctgtcactcatttttccactggggatccaagcaactcaggcagaaggagagcacgttgtttc

SEQ ID NO: 721859 - DNA, 871 bp, Homo sapiens
cacctgcgtcattggctgaccaccaaactctgaagccatactatgaattctcctgcatctcccaagaaaagtaaaaaagaaaaaaactgatcagatataatcacaactgcacaccctaacacaatctcatgttagtatacctgttcatcaaatctttgccctcaagtcaccataatgtctgagacagataaaactgaataactatgagaagaaaatgagaccaaaagttaaaatttcgatattaattgctatgaattgaattaattgattttaattaacsgttctacaaaacccttcaggcaggcaggagagtctacctgagttggttgttgaaatatttattggatttaaaaatgcagagttgatgtggaataaacatttttggaagaggaatcaacataggtaaatgcacgtaggctctaaacatcacatcatggtgctttgaaagcatcaaaaataatagggatgcttctctactaaagtaaaaccctaagattttctttcagaaacaatcttataaagaagtatatattagcaatctttttcattaaaataaatgggcagtatattattatgttaaagttacaatgtcaaaattgaattactctgatttttttttttaaccttctttgggttttaaacatttttttttttttctgtttctgagacaaagtctcattctgtcgcccaggctggagtgccatcacgcaatctcatgaccttggctcactgcaaccttcacctcctgggttcaagctattctcctgcctcagcctcccaaagtgctgggattacaggcatgagccactgtgcttggccttaaatatgttttcaaatctcccaacctagcacctgtaaatatattttttga

SEQ ID NO: 721860 - DNA, 871 bp, Homo sapiens
cacctgcgtcattggctgaccaccaaactctgaagccatactatgaattctcctgcatctcccaagaaaagtaaaaaagaaaaaaactgatcagatataatcacaactgcacaccctaacacaatctcatgttagtatacctgttcatcaaatctttgccctcaagtcaccataatgtctgagacagataaaactgaataactatgagaagaaaatgagaccaaaagttaaaatttcgatattaattgctatgaattgaattaattgattttaattaaccgttctacaaaacccttcaggcaggcaggagagtctacctgagttggttgttgaaatatttattggatttaaaaatkcagagttgatgtggaataaacatttttggaagaggaatcaacataggtaaatgcacgtaggctctaaacatcacatcatggtgctttgaaagcatcaaaaataatagggatgcttctctactaaagtaaaaccctaagattttctttcagaaacaatcttataaagaagtatatattagcaatctttttcattaaaataaatgggcagtatattattatgttaaagttacaatgtcaaaattgaattactctgatttttttttttaaccttctttgggttttaaacatttttttttttttctgtttctgagacaaagtctcattctgtcgcccaggctggagtgccatcacgcaatctcatgaccttggctcactgcaaccttcacctcctgggttcaagctattctcctgcctcagcctcccaaagtgctgggattacaggcatgagccactgtgcttggccttaaatatgttttcaaatctcccaacctagcacctgtaaatatattttttga

SEQ ID NO: 721861 - DNA, 995 bp, Homo sapiens
tgcagtacagagccatagtccctttatgttctcattgatccctctcctccaagtcttcctagtacctgccctttccaccccactgcccaccatgtcctggacactgggcatgcccatctgttggctatttccttctgatgctttatgaccatctcatctaatgagtagtgttctccaggctccccatctcccaggaggcagaggatcaaagggctgcacagtcatcccttttcctgtgagscttgaccagttcatctttttatagccctctgtgggacccgttttctacctggttattggctgaggccaccagtgactgatctattcttcctgttctggccaattcttagctttatttaaaatgatgtggctggctgacagtacctacccatgtactcttacctacataaagaaaactgtgtctatacatcacagacaggtcactgtctaatcaaacacaggacatcagttaggttcatgcatgattataagaagccctggtcccttccccaacatcagactgtcacctttctatagccgtacgcaggggagtttgttcctgtagaaggcttggtaattacaaaggtcaatgattgtcttatccttgcactatgatttggctgccataggaaggtgaaagctggttcatagctacagccacgatgagggagctgaacagctaagtaaagagttctccataagtttggactcatacatgctgtttgctagtatcaagttcaggttctgtgcacagcattactttttgtttcttcccttccatgccttcctcaccaggctcaggtttagcaatggggagagtatgattgatattagggttttcttccttggctagctcaacaggactgttctattaaagatgatcatggaacaccataatttataattttcatagcaactggccttgctatatcctcatattcatgggggcgtaatctctcaagagaatggcaagagagaaggcatctaattgaata

SEQ ID NO: 721862 - DNA, 619 bp, Homo sapiens
tgttaggcccaggtgtcattcaaaggtttttaccatgaagaacccacccaaactttggcgttcacactggcaccatcttgccagcaaatcttctgcccagctcaatgactgggggctcctactgcttctgaggggacccaaggagaggcagagcagcatcttaaaacaatcagcatgccctaagatttgtctctacgatccattttgattccgtgatcattttgggggtcctaagcagtgtggccaattagacacatcatgaatgggtttcaccatctgagtgctgatggcatgcctggggcgttgttgggtgttagggcgtggtaagagaaagaaagccactccttagcaaggaaatcatgggtggatattttccatgagctcattcttcctgttcctctccytcctggtgactccccctgccagtttccccagcggacaaaagtggggatgcctttggggagaaaataatccatttcaatagaaaaagcaaggggagtctcacgataactgcgcaggcgcggaccagagagctcttttctgaggatccggcaagatggcagaagtagagcagaagaagcagaccttccacaggttcacctaccgtggcgtggacctg

SEQ ID NO: 721863 - DNA, 1063 bp, Homo sapiens
ggattcttaacaaagcaattttacttctgcgcagaggggtgcctccttggccagttgccatgagagcacacctgaacaaaggggcacgagagcctttattcctgatgcaagtcctgcccctgtaccctttcctcattggccggggtcgggtcatacaatctaaactaatcctggttggctaaacattttgattttttttagatagggtgggcacacaaagtggagaggaaggggaaggggtgtctgtaatgagctagaaagttagtcctctttccaaataaggaaaggaacgtgagctggtactgataamgcctggtactgtggcgtgcctgggcacctaacaaaggcaaaaaggaaaaaaaggagaaaaaagtggggggagggggtactatgaattaaagaataaaagattgatcagattatatgaagagaaacctcatcatatcccacaaaatgatcatatatagaagtaacttaacaatgatactaatcattttaattctataaaatcacttattatgttatattcttaagagcaatgtgaaggtgaaatgttggatacttcccctttaatcctttgaattgattttgtacatattgccttgataatcacaagagtaggatagagagaggctggggtgtggtggctcacacctgtaatcccagcactttggaaggctgaggtggacagatcacctgaggtcaggagtttgagaccagcctggccaacatggtgaaaccccatctctactgaaaatacaaaaattagctgggcatggtggtgggtgcctgtagtcccagctgcttgggaggctgaggcaggagagtcctttgaatccaggaggcagaggctgcagtgagctgagattgagccactgcactccagcctcggcgacagagcgagactctagctcaaaaaaaaaaagggatgggggtaggatagagagaattccaacaataattgtgtgtacgggtttatttatgtcccccaagccaccttgcctgtggtccctgatgctctcctccagccagtgtagacacctggctcccttccttctggcct

SEQ ID NO: 721864 - DNA, 612 bp, Homo sapiens
aaatgaacaatgtgataatttgttttttactttacatttcttctcatttttagacaagaataaggattaacttcagttattacaaacaataaataccatttttacctggaaaataattttgatttattgatgttatagtaaaaagagtgaatagaaagttgaaagagaaaacattattgtagttgttctctgatcaaactacatatatatttgagatgtatttggcatttatgcaaaaagaggaatttaaatagtgagaattacataaaatgtgatttttgaacttgcttatcacatgtgtaaatgaaactgaaacacataaagtgtgggaaacaaatctgaatttatatgtgcaacctgaaattaagacaaatgaaagttttatctagtgagataacgccacataatataataaacttaaaagtaattcatacaagactgtcatgctggatgcacttttatttagtttaaacaactctgcagtttgcaaagtatttgggtgaccctttctgatttacactggaacattgacatgtattaataaaacatgagtcygtgaggtctgcagagaacagtcaacacacaacagatggagatgcttgtttattaaca

SEQ ID NO: 721865 - DNA, 1175 bp, Homo sapiens
taaagaatatagattttgtgtttgtagagttatttgggtgaatgtcatggttaactgtacggactctggagccagattgttggattgaatcccagctctgccacttgtgacctgaggttaattacttaatctctctccgcttcattaggaaaatggggaaaatgataacacctagtttgtttgattgttttgaaggttaaatacgtcaaagcatttaaactacttattgatagaatgaggccttgtaccaacaagccctcattaaagtcaggaaaataaaataatagttaatcaatctcataaatacatatgtagctcccattatgtagtcagcagatatttatyagggcctcctaaattgtaggcagcatcattccttatgaaatgaatctccctcttaagcctagtgatagcttatggggagctctagaagacctctccagagctaaacatattttaagtatatgcaacattagagtcatcagagtttaacactaagaggttcagggctaatggctgagaagagtatatcatgatccaaaaacagcaaggttaatcttaattctaattgtgagctcacaagccttaggatcacaaaatctttcttagagaacacatgagggaaatttttaaaaagagagaaaatggtgaaaagcttggttaaaaaacaaattgaggagggtatagaaaaagggatagaattataacattatattctgaattttcagtgtaggggtagttgatgattgagcagaatgttaagcagtcagagcaaagggaacgaaaaagccaaaagtcaactttccagccctattcacttgtatggggtacagcatgtttgacaagaacattaattaaacatatgcttaattaataaccacccagacggtaccttgaccgttgtagtggagagggttgaagtcaggcaggcattagctagctgactagcagagatagaagagataacagttgtgccaaggaaggctttctctgcctgagtctgttgtctaattgactcagagtctaatagcttgaggccttattgggttggaaaagccaactgccttaacaggagacaattgtcactttaaaccaaacagttcgaggtagcacagtttcaaaaatcagattaagactattgccttcttatttaaggtttttttttttttaattcg

SEQ ID NO: 721866 - DNA, 1222 bp, Homo sapiens
cattacagtacttataatgcagtctgtctatacacccactcccatcacattgagaagaattgtaatagggcatgttagtgatgacaccatttattctccttatacagccttcttgaggaatttgaccctccacaatgttggaagaaacagaggtttatatcacgtattccctcagcaattgtgcattagatgcttgaaccaagaatgcaatcagcagctgtgttaatggccacaaaagctagatgtgtaaggttgtatagcaactgaggccatcactgaggggtattaattgtgagtcatgtgtgttcgataagcaggtagggagcactgaggtaagagatcatgtgattttggaaagtgggagagatggaaacataattggctgtgggctctgatagctttcttattctcagttcattccagttgtaatactcaatgattcttcctgcccttggattctgtgatttccttggtttcagctttctccagagtgcatctcttttttacagtcatacagttcttaagcatcaggacagagagttaaaaaataaattagtaaatgcctatgtaattgaaaattttatgatctgattaatctgggaactataagtacagttgatctattaaagtactatcaacataccaaggttgccaaatattttgaaatatttattctttttttattttacttttttttgtttacctcattctacagtccaaagccaacatatttattctttattgaggtttaggaaataaggatttggagttcataatattccttatttcagatcacctttcrgagtggcttttctaggagttgacaaacattttctgtaaaggcccagatgtaagtttaggcttcatggaccattggtttcttgcaccttctcaactctgccattgtggtgttgaaggcgctgtggaagcatccataggcaagtaaatgagtgagatgagtttcaataagacaggcagtaggttacatttggcctttggctgtaatgtgctgacacctggactaagcagttatgaacctctaggcttaagcaacttcaagttttaatattaattcttccagtgattccctgtgacctaggaaatatattcagtgtttaatagactcaagttttttagtttataaaatgacagtgtgataattttaattggcctcatagaatttgatcgagaatatttaattaatcagaccaaatgagattaa

SEQ ID NO: 721867 - DNA, 1285 bp, Homo sapiens
aagcaaaagcaaagagaagttgcagctggcagtggcttaatacatccacagcatgacttagccctgttgaaccaggaggttggaattctatgggacagagatatttagtgcaaaaaagggattcattaaagtttatcttccatgaaaatttatctcaatcattataattgtaatgattgagagtagagaggaaggaaatgcaatacatatatttgagagttgggggtggggaattcaatgtaatgtagtatcagtttttgtttgtttgtttgggttttttgttttgttttgttttgtcttatttattccaggatcagttatatttccacaccagataattaaggaaatttggcaaagatacaattgaatagtaagtaagtgaatgcaacaccgcagtaaaacatttagttttggcaaagtgttcattgttttatacttattataaaagttgaataaaaactattgatgcaatctatttttcaatattatttttaatggtaacacttcaatctacttttgtaccctgtattaatcaacatgcaaggtacaatattcaagcaactagtgatttctattttgttttgttttgcggcattgcagaataataattaggactcactaaatacttaaaatctaattataaaaaaaaggttaactaagcttgtgttaggcaaacatactttgttcatgtatctttggagaatttatattgtttctattgttcatttaatatacacctaattttttcaaaagttatgagacttttctgcacctaaagttagtgcttttcccatttctactgttgggagtcacggaggagatcatagtatgttacttacacctttaatttttacatagattaaatccataaattcctgaagatatattccatttcattttacttttatttattgacttcttggatggaaatttattctttttcatgtgtaaaagaaacattgtgactttaaaatatagtatcacagttgaaagcacaaactctggaaaccaactgacagtgtttgagtttaatgaccaccagttatacgtcactgtatgaccttgagtgtgttacttaacccctttctgcctctcttgcctcatctgtaaagtgaccgtagtaatagtatttatcttatagagctgttgtgaggatygcacaatgtttattacctattgttctgttacaaaacttaatggcttaaaacaattgtattgggctgatcttggactactgtaaaacataactgagactgggtaatttacaagaaaagaagtttaattg

SEQ ID NO: 721868 - DNA, 590 bp, Homo sapiens
tgatagactggatcaagaaaatgtgacacatatacaccatggaatactatgcagccataaaaaaggatgagttcatgtcctttgtagggacatggatgaaattggaaatcattctcagtaaactatcacaagaacaaaaaaccaaacaccgcatattcttactcataggtgggaattgaacaatgagaacacatggacacaggaaggggaacatcacactctggggactgttgtggggtggggggagggggagggatagctttaggagatatacctaatgctaaaatsatttttaaatgtataccccacattttgtagttctgatcatgctttaattatgttggaaaatatgttcatttctggttaataggaaagaacatatggaatgtcaattttagtatagtggttttattccctggtatttaggaatgcaaataatgtgtacccaggattccatgtgtatgtgtgtgtgtgtgtgtgtgtgtgtgtgtggttagtatcagtggtcagatttaatctaatctgtgtattcacccagaaatacacatgtgctcagtgtccagccatattaactatgaaattggtagcac

SEQ ID NO: 721869 - DNA, 590 bp, Homo sapiens
tgatagactggatcaagaaaatgtgacacatatacaccatggaatactatgcagccataaaaaaggatgagttcatgtcctttgtagggacatggatgaaattggaaatcattctcagtaaactatcacaagaacaaaaaaccaaacaccgcatattcttactcataggtgggaattgaacaatgagaacacatggacacaggaaggggaacatcacactctggggactgttgtggggtggggggagggggagggatagctttaggagatatacctaatgctaaaatcatttttaaatgtataccccacattttgtagttctgatcatgctttaattatgttggaaaatatgttcatttctggttaataggaaagaacatatggaatgtcaattttagtatagtggttttattccctggtatttaggaatgcaaataatgtgtacccaggattccatgtgtrtgtgtgtgtgtgtgtgtgtgtgtgtgtgtggttagtatcagtggtcagatttaatctaatctgtgtattcacccagaaatacacatgtgctcagtgtccagccatattaactatgaaattggtagcac

SEQ ID NO: 721870 - DNA, 555 bp, Homo sapiens
gacgaaggagcagaaaggatgggacggagctttctcagcccaaggccctggctgcgctcctgctcagaacacatcagagtggagggcactggggactgtgcttcgcggggacgtgtgaggtggaggggacaggagagcaccaggaaggggcagcagcccaagctgtgctgaggctcccaccccacgcgttcctccagtgggcctcctcactcctctttcttgggcaagtgaggcctgaccttgatgctggctctccaagctgggacagaagatagggtcagttcccacttgctctccacgggcgcgggyccagcagagaggaggtggccctgtcttgagagcccagctgccttttgtcgagggccagtatttgagagtgtggcctgggcgaggccgctccctggttccaccactttccagactgtgaccccccacttggtaactgcccaagacccgggctcctcatcagcccaagggtgatcctagtacccccagcccaggctggcgaacagcaggaatggggccgccaccatctcagctgcaccctacatctcc

SEQ ID NO: 721871 - DNA, 1153 bp, Homo sapiens
tactatggaagttctaacaattatttctaacaggtttccagatggtgctgctgcaggcccagagatcacagtttgaggaccactgtcctgtcatgcgccaggcccctgcaattaaatattaagaatcttgagagttactttgttttcaaaaggaacctattacaacataccaatgtggtgtggctccatcaagaaaacaacttagaaaatggctgaatttttagaaaatccttttccctaaaaaactatggaaaaatcgcatgtagtttatttttatttttatttttacctattcctacttacttgatcagaaaaaagaaaactatcagccgggcggggtggctcacacctgtaatcccagctctttgggaggtggaggcgggcggatcacgaggtcaggagacccagaccatcctggctaacacggtgaaaccccgtctctgctaaaaatagaaattagccggccatggtggcgggcgcctgtagtcccagctactcgaggggagactgaggcaggagaatggcgtgaacycgggaggcggagcttgcagtgagccaagatcgtgccactgcactccagcctgggcgacagagctagacttcgtctcaaaaaaaaaaaatcattcagaactaaaagctaagggcaccttagttatgaatatggttgtgaagagttcatttactatattacattgcaggaaaatctcagggtgggagagaaagatgtttgccttttttctcaaaccaaaccaccagattcaaggcctaagaaaaaactaatcaaaactttgtttttttctggctacacaaatgagcccaatttgccttccaaagaggctattcttcttcctgtcactgcttttagaggaaagaagagcctggttattcttaaaaaggcaagtgctgttcttaatgacttggtgtgaatgtaacaatgaaagtcctgcccatctaaacctagacattaacaggacccctagtttccacagcctcagcttcgttccacaggcatagaaggctagatgactgaaagccagcattgtgtcactaatctttgcctctagtcaagcggccaaagaaaaccccaaccagagcactcaaaataagacaccctagaccatgaaatcttctttcatcctttcagctgcttaaa

SEQ ID NO: 721872 - DNA, 621 bp, Homo sapiens
aaatgtgacttgaaggaatcattaaaaatgtgtgcaaagattttcccactaggaggttctcctcaatgctgcttaaaataacaaaaaaatcaaaacaacctcagaatctatagtaagagaatctgtaaataaggatatacctgtaaataagggtgtaaagtacatggtattctagataatgtagatataaaatggaattatctccacaatatatcattgggtttaaacaggttaagacagcatccataatgattttactacatatgattagtaagacattaaatacaaatattaaaatcaaacaatatatattaaagttaattatacaggcatagagagtagagagacataatggctactaaatgtattagtagttatctctaaacagttgagktgctgttcatttttactttctttacattttcctgtattgcttaaattttctataaaatgcatatcagaatttaaaaatatagttatattcatattcatttttttcttttttcttttaagacagggtctcgctctgtcacccaggctggagtgcagtggcatgctcatggctccctgcagcctcaacctcctgggctcaactgatcctcctcccacctcagcctccca

SEQ ID NO: 721873 - DNA, 1282 bp, Homo sapiens
attaggctcctacacatctttaagaattctactcagggctgggtgtggtggctcatgcctgtaatcctaacattttgggaggtcaaggcgggggaaataacttgagcccaggagtttgagaccagcctggccaacacagtgagaccccatctctgcaaaaaaattttttttaaaaaattagccaggcatggtggcatgcgcctgtagtcccagctactcaggaggctgaggcaggaggatctcttgagccctggagttccagactgcaatgagctgtgactgcaccactgtactccagcctgggtgtcagagggagaccctgtctcaaaaaaaaacaaagattctattcagaagagacctcctggggaaacctttcttgacctgtccagaagagaggagtttcttccataacactacaaaatctacaaattagaacagatttttatggtccaatattttaaaaattccatagcttaatttttaaatgaaccactatcgtacaaacactgtactaaacaaatattaattgatgtgttaaaataaaattttttctcaacagtaaggttcaagataaagcatttatcttcctttcttggttatcttaataatacgtgaatatgatgtcttttttttttttttaacagagatagcactgtgaagttcttggaactttgttctcataattgctatggcatattgttgtctgcttaccatattacattaacactgttaaattatatcttcccctttataaattaagctcttcaacacattattcacccttacatcctcaacacctacttaatattgtgcctggcaataaaaatgttcgttgagtaaatggatagatgaataaaaactgtactcttaggtctgaattatatactcyaaaatttttaagacacttatttaaaatattggtagctttgaaaatgattcatttcaaagccttgactatatataaactaaaatataatttaagaaataaaaacatcccctccactgcccttttttttttttttttttttttgggacggagtctcgctctattgcctaggttggagtgcagtgctcagctcactgcaacctctgcctcctgggttcaagcgattctcctacctcagcctcctgagtagctgggattacaggcacgtgccaccatgcctggctaatttttgtatttttagtagagacggggtttcaccatgttaatcaggctggtctcgaactcctgatcttgtgatctgcccgcctcggcctcctaaagtgttgggattacagg

SEQ ID NO: 721874 - DNA, 2231 bp, Homo sapiens
tatattcgacaaacaattagggaaaaaaactattttcttcatatatgaaataatactctctgggcacaatgatagccaagaaagttaaagaagaaagaaatgcttgctgtcatacgcttattttcatttcatctgacaaataataaaattaaatataggctcttctgaaaatgtcacaaataaatcttytgtcatcattcaacttgccctgaaaataatcactctaaaggacctcaatggaaagtttcacatcaggactgtatgctatattcaactgcaatcatctcacttattctgtcactgtgtaaaatacattaaggatggaaggatggcaacataaatagtctcacaatgaactgcttcatgtttaaggtacaatgatactgacaacttttaattcagaaaaccagtaaatactgacagagcgtcatgtaacaaaataaaaagtaacttctactcttcaaaacataccattgtactcctgtaccactggctggggaaaaaaaaaatcaccatcttggatttggatattgattttaactacaaattaaatgcccgctaatgtcccccccacccaaatcattttataactattccaaaggaaaaagaaacactttgaactatacaaaataaataaaaacaattaaacaggtatgtttgctacaagttaggcactaagaactaagaagaataagtgtatctgaataaaatggaaaccaagaattttcataaggcaatacccgtaggagtaccagtcaggtctgccaacacttatctttctctaatgaacccagggaaataattctgtaaaggcatgtatacctttacagttggattttactactctggcaagaagctgtcgtaagatacatcagtatggtatttctgttcaaacaggatttgtgactttaagacctcaaatcccagtgtaaggaatgtactatcttgaaagaaattattctttctggtttgagatgactttacgctcagaaactcaaatacatatatttttattttgcatattctattatgtggcattttaagagttaagacatttcagataggtgacttgactcccaaagaataaatacccctttgtaaatgtggtagcatacgtattgcttatgaatcaatagctttcttctttactaaaagaataaatactcttgggattacacaaatgcatcagcattagcttggggggcatacatttatgctctaaaaatcaaaggcttgtcaactgcactttaaaaaagtatgccatactctactgggaagtaattagaatcttacctccagggatctgactgtagcctgcatctcagccaactgccgcacctgtattctttgggcattttccacctgagcctcagaattctccttttcagcctttaattccgctacttcagcctctaaaccttttaatttttgacacaaatagactttttctcgagcaagttgttccactcgtttgctgtcttttgtgagatcaacattaagcagctggttacgtagttcttctttatcttcctccagtcttgcaatctaataataattttaaagaaagcatacaaggttaaattattaaattttcagtcatgaacatgctttacaagtcagtaaaattaaaaaatgcacaaaatcaaagctcaggtgctgaaacaaagtacaaaggaaaaaattttaagtatcactatctttttgttcttagtgggactcaaatgtgaggtcaaggactgtgtcctgttttccctgtatctccacgtggtgtctagaacagggcttaatcagttgctgactaaaatttaaaattataatactgtaagtactaaacatacatcaagtattttaaaattcatcataacattataggggttcatgaccaaaactctgactactccaaagcttttcctcacatgactgtaattcttgagctagtctatactaataaaattatctatgtcagggcaacttaattcacacaaaaactgcctgtctgtgtacataaaagcaaatgtgattgatgagagtttttaaatgatagctgagagtttattaaagtcctaattgtaatgatggcctagttcttagttcttagattcaagaagaattgaaaaatcattactccagggcaggtgttaaagtcactggggaacttgcagagcagagacaccagtggtcttgtcattcatgccaattatcactgctggacttcgtgggcctccaaatca

SEQ ID NO: 721875 - DNA, 1096 bp, Homo sapiens
tgtgtccaaagattatagagctacttgcactttctaactgtgcatacaatttggtgcttctgtatatttgcatacccttctgttcatcctagaatgcctttttcctggttcacttggaaaataccttaatattattccataccaaaatcagggatcacttccactatagatagtaatttacccaaaaggttatccaagagaaaaagtcctccagcaatttttttttccttagaattcctgctttgggccaggacatatgtctcccagttcatactgagttttaaatactcatttttaaaaaatctctctccttcactagtttctgagctccctgaaagtaggatcaatacctatgtcattttgtatctcagaatcctaggacagtgccagacatgtagaatttgaatttatatgtccaaatgtatttgacttctaaaggcatatttaaaatgcccaaagatattttcaaaaggtagaaaawacattattttcagtatagctgtaactttcaatagaacggttatctttagaacaatggtacttgttataggtttgattatataaatcatgaaaaatgcacattttctgagacattctgatatataatcattcctcgtttatctgtggctttgctcttgcagtttcagttacccatagtcaaccacagttttaaaaaaatgtgtattcggtagctgttgggtggaatgctataaatgtcagttaggttcatttgtctacagtgcagtttaaatctgatattttttccccttattttctgtctggatgatctgttcattgctgaaagtggagtgttgaagtgttgaagttgcctactgttattgtattacagcctctttttctttgatctattaatattggttttatatatttaggtgttccaatgttgggtgcatatattttataattgttatatcctattgctgaatcaatccctttaccattatataatgacattctttgtctctttttacagttattaatttaacatctattttatctgatataagtatagctactcctgatttctttcggtttccattcacatacaatatctttattcatctctgtactttca

SEQ ID NO: 721876 - DNA, 2062 bp, Homo sapiens
cagaaattaagagagaaaaatcatgaaggagccagagtctgaaatctatctaaaaatgtttcctaaaaggaacgtaaaagtgatggagagagggaacaatcagaatacaacagaatattcccccaattttaaaagtttcagaataaaaacacctggagaattcatgaggggtgaaacacaccaacacctagatacaacattgtgaattgtaagaataagaaaaagattcaaaaacttctacagacaaacaaaaggtacctacatggaaggaagtattcacaaaatacttctgggctaaattagtaaaaatcatatactgacaaatattttcttataggaaacaagagattaaagaatcccttcaaatattgagtgaaaaaaatatttggagtgttacatagtataccctgccaaactatcaagaaaatgtgagaaaaagtatagaatcagttatagattctagttttctaatgccagaattcagtgaatttatcatccatgaaccatatataacccaaaaggcttgcaggaatctggacagaaaataaaagagagtctatttaacataaacatttggaagagtcttttttttaaagtaatgaatttttaatgccatagcatcgtattttcccctttatggatccattcatattactgactttatagaacaaaatatttagaaacccatattgtaaatgctgcctattagcatttgattatttggaatcagtctagacatagcacaaaagacttaatgtttaaatagcagaatgaaaatgctaaggtttggcaacataaaaatggtaatataactaacaaagtgagagacggaatggaaaagaattgaaagaaaagttgaatgtgcataatttcttattttcttagtagagattcattaagcattgtattaatttgacaaatcagtaaagcacatagaaaataagtacgttatttgacatttaataggcaattaaaagaaaaacaaaaaattaatagtggtttcctttggatagcgagactagctgggaatggattttagagagggaagaygtcaactagatttgatattttgtttaatttactaaatagaataacttaaccgaaaaaagaattggttttataataaaaagtttaatacaaaacatattgaagtaaatattatctctgaaatattactaatagtttaaaaataagtttaattttgcttaagcattacggaagtcatcacctcagaaatatcagaaatactttaagattgtcaatgtgttgaatgatagtattgaatgaactaaaccatttaagacaaaacagtcaaaaccactattaacatactgaaagtcttgatgtagtcatgcattctataaatactctttttttattgataatatgatctggacaaggttgagaggatggatacttagtaaaaccaggaactatgatcttcagccaaacatagagtctgaataagctcaggaatagccaaagctccccaccctattagcttattctgagatgccaactatggtctctccctttagccatagtgattgagtagaatgtaagatatgctacacctctctactaacctactgaatgtcagtgtggagaaaagaaaccaggcctcatcaaaaagtcaatgtcacagtagtttcaattgtgaaaaaaccttcctgctagtcaatgttaaatatatgaatgctcttgccctcatgggaggtggtattattttttaaaaaagagaaatttaaagtgagacagccttgagtttccattccaatttcactttgtgaactgagataattaaggaaattgttcaagttaacactgctcttggcttcagtttcttcattagtaaattcggatatcaatagcaatggctcagggttatgagttataaataaatatgctatcatctaggatcacacataattctttgtatggtttaaaatgagtaaattttaaaaatcattaatgcgaacatttatgctgtcattcctaatacaatttaaggtgtgacaagtagtagcaatctcctttttgaggaaatacttaaaatactaaa

SEQ ID NO: 721877 - DNA, 574 bp, Homo sapiens
tctgctcctcgcgcttgtaattgttaatagaraaggcctggcctgcaaggctgtgtcgtagggtcccggccaggctgaaagggaggggtggggccgcgttaaaggggcgtggccagatccagaaaggactataaggaggcggggctgggccggaggagcctgcagtggtgtgcgtggcccgggggtccccactcactggtctccaccgcccccacggcctcggtgcagacgtccacgcccggcgcgcacttcactgtcttcatcttgttcggggagcatccgtcatctgctttctgcacgcagctgtagcactccagggcctgcgctcctgggggagcggagccgaatagacctgagccctccttgctaaagcgtccacccccaaggagaaatagtccttcccatgccctctgtcccgggattagacagtcttattgcacacacttttccagggcaggagtagggaaaagctttccacaaatctggaagcacgggaatcactggacccttttccttcacacccactatgccaactgtgggcacatccttccgacagccctgtatgcccactgta

SEQ ID NO: 721878 - DNA, 655 bp, Homo sapiens
ttttgaactgacctcaggtgatatgcccgcctccacctcccaaagtgctgggattacaggcgtgaggcaccatgcccggccatgtccatgtgttctcatcattcagctccaacttataagtgagaacatgcagtgtttgattttctgttcctgcgttagtttgctgaggataatggcttccagctccatccatgtccctgcaaaagatgtgatctcattccattttatggctgcatagtattccgtggtgtatatgtaccaaattttctttatccaatctatggacactttctactctctcactccttccaccacaactttcagatctcagttcagacattacatcctcaacaaggcctttcctaacctccactgtataataggatatgccaggtacacactcttaaaatactatatctcatccatcctagtcataactttacattcrtttatggtcacatttacccatgttttcatctatgatttacattcttttgtctcttaaggatactgtctctacttctggagttactaagataattcttcttatttccatgtaaatatttttgagttcttctcttcagatttagatcttaaactcccagaaacttgtttttgcatatggtgtgaggtagggatctgcagtagtttccca

SEQ ID NO: 721879 - DNA, 1975 bp, Homo sapiens
ctgttgcagaccaacctggaatagctgacagctgagttccagacatatgagaaggtacagatgacccagaagaaccatccagccaagcctagctaaatgccctacccacaaactcagaagctaaaaaaacatgctactgagctttggggtggtttgttacacagcattattgaaactaaccaatacaagaaacctgcagctgctcagccaaatcctgaagctagcctgcttggatttgaaacccatctccattacctgtcagctgagtgacttaacttccctgagccttagatctctcatctataaaatgggataagagcaggtctaacccaacaagatggttccatcattcaggaaacaacagtttatggggttcctcttgctctgtgtgagaaagaggcaacaatgaccaagacagactaggcatgatggctcatgcctgtaaccccagccctttgggaggccaaggtgggaggattgattgagcccaggaattgaaagccagcctgggtaacatagcaagaccccatctttaaaaaaaaaaaaaaaaaaaaaattaagaacctgggaggccgaggttgcggtgagccaagttcatgccactgcactccagcatgggcgaaagagtgaaactacatctcaaaaaaaaaaaaaaagtttattcaagaacagagaattgcaatgggaataggagtgttatacatattcaaggaggtcaaagaagacaaaggtttttaaagaaaaaaaatgaggagaattacataatggttttgaaataatcatctttggctagaaaaatgaatcacaaagatgatgccagtctggggttggacaggcagttgctgggcaaacgtccttgcagaagtatttttctgtgtaagtttgcaatggtctttgtgtgagattgtgttttttgcagtttttttgtgatagtttttgtgatcagtcatacaagtatgagaaccctctctccatggctttccttcactctgttggtcggagcttttttttctttttcttttttttaacatgagtgactccattttgattctgataaccttcaaaagttcatatgtgcctgggtcatggggactgcttagtaaatgctagctttcactttactattggaatttttacctccaaaatgcagcatctccccattccaaggtcctaagtagaatggaagaggagatgccagggaatcttgacaagggaaactttcacggttgactctacatttgaatttctatagcaggattaagtctgtgtattatttacgtgatttaaaaaggccgagtgtggtggctcacgcctgtaattccaggactttgggaggctgaggcaggtggatcacctgaggtcaggaatttgagaccagcctggtcaacatataatgaaaccccatctctactacgaatataaaaattagccaggcatggtggcatacacctgtaatcccagctactcaggaggctgaggcaagagaattgtttgaacctgggaggcagaggttgcagtgagccaagatggcaccactgcactccagcctggtgacagagcgagactctgtctcaaaaaaaaaaaaaaaaaaatctaaaaattagctaggcatggtggtgcacrcttgtggtcccagctacttggaaaactaaggcagaaggatcgcctaagcctaggaggtcaaggctgccatgagctgcgatcacaccactgcaccccaggctgggtgacagagcaagaccccctctcacaaaaaaatttttaaaaagataatgttaaatatatgttagtagataaatgttcacaaaaatcattagtgttgaaggaagtgaggaaaagattaaagggtgtattagtccattctcacactgctataaagatactacctgctataaagatactggccagacaaggtggctcatgcctgtaatccctactctttgggaggctgaggtgggtagatcacccgatgtca

SEQ ID NO: 721880 - DNA, 2224 bp, Homo sapiens
aataatttggaacataagtaaaagattcttaaaataagatttttatatatgtaggaaagaagaggagttcaattaattcactttatttcaccataaatctgtaagatattcaaaaaggccttcagtgttgcaatgactgctggagtgtatttcttaaatacatttttctgggtggaaaaagtctttgtctcttagtcaaacaaataaatttgtcaagcagcatataatcgattaatattaatgacaatgttttgttgagtaaaatttttatattattggggtaacctctccctttaaacaaatggaatatattgaaaagctctattaactctttgaaaacatcagggtatcagtttttctattttccattttggccaaagttacttatttaatacatattgattaaatagctttcattttttaacatgttattatataggcacatgctattcaaacttgagaaattaattgcactgtgaaatagaagaaaaccatggactactatctaaagaaaagtataaccaaataataaaaattacttggaatttcaacgctattaacttaggaaaacaaaaaatggtacaaacaatactacaacaaatctttaactgttttgttttgttttgttttgtttttgagacagagtctccctctgtcacccagtggcatgatctcagctcactgcaacctctgcctacctgttcaagcgactctcatgcctcagcctccctagtagctggaattacaggcatgcgccaccatgcccagctcatttttttgtatttttaatagatacagggtttcctcatgttggccaggctggtctgaaacttctggcctcaagtgatccacccaccttggcctcccaaagtgctgggattacaggcatgagctgccatacccagccccagtctttaacccttaaataaactcagaaccattagttctttaaaataggcattttttctaaatctttctatttctaattttattgattttttttttcaagaagaatggtaatgactttgctataactacctgcacatattgatgctgcatgtttttactggaaaatgagcttaatgtggacattgattaattttcatgttttgttctttgtaagtgaaatcataaacatacacccgtgcaggtgacagtacaagtgatcatattctattgccaacaaaaataaaatttaacaaattagaattccacaatttattttcccccaaaggtggttctaagaatgattcccagctttccagtaagagtacttttgcaccataggtttgggaatgtgctgagcaattttgtcttgggcaaatgtggaacatactttaaaatgagtacctagttttcagagaccaagtaagcatccaagaccatttgcatttgatgattactaactaaaaccactctaagtaagtgaaagctataataggcagaatttgaatagatctctttaatcaaaataatcctgaactcaatagcttaatttttaatttaaaaatttttcatctgccccatgcttcaagttcttcatttcagcctctccaatcctgttttctttaaatcatcaatttgagctaacctaatattctatgtcttctaagatttaatccctttatggtattttatttgtatacattttaggtgacgatagatgatgtcaaaaggaaaatattttctaattttatttttttgatttattttttaaaaattctttcttgtaacttctcaagcagtgatgtgcatttacatcagcaaaatatacacaaaaatagcctcctttaccacttttctagttcattcatacatgctgcctagtcttacctttcctataggaggaactattccattactaaatgtgccagcttcagggacacctttttttgtttgtttgtttaaatggagtctcactctgttgcccaggctggagtgcaatggtgcaatctcagctcactgcaatctccacctcctgggttggagtgattatcctgcctcagcctcctgagtagctgggattacaggtgcccaccaccaccacgcccagctaatttttttgtatttttagtacgacggggtttcactatgttgaccaggctggtctcaaactcctgacctcatgatccatctgcctcggcctcccaaagtgstgggattacaagcatgagccaccgaacccggcagggacaacttttggttctccatggcttatgtttcc

SEQ ID NO: 721881 - DNA, 2224 bp, Homo sapiens
aataatttggaacataagtaaaagattcttaaaataagatttttatatatgtaggaaagaagaggagttcaattaattcactttatttcaccataaatctgtaagatattcaaaaaggccttcagtgttgcaatgactgctggagtgtatttcttaaatacatttttctgggtggaaaaagtctttgtctcttagtcaaacaaataaatttgtcaagcagcatataatcgattaatattaatgacaatgttttgttgagtaaaatttttatattattggggtaacctctccctttaaacaaatggaatatattgaaaagctctattaactctttgaaaacatcagggtatcagtttttctattttccattttggccaaagttacttatttaatacatattgattaaatagctttcattttttaacatgttattatataggcacatgctattcaaacttgagaaattaattgcactgtgaaatagaagaaaaccatggactactatctaaagaaaagtataaccaaataataaaaattacttggaatttcaacgctattaacttaggaaaacaaaaaatggtacaaacaatactacaacaaatctttaactgttttgttttgttttgttttgtttttgagacagagtctccctctgtcacccagtggcatgatctcagctcactgcaacctctgcctacctgttcaagcgactctcatgcctcagcctccctagtagctggaattacaggcatgcgccaccatgcccagctcatttttttgtatttttaatagatacagggtttcctcatgttggccaggctggtctgaaacttctggcctcaagtgatccacccaccttggcctcccaaagtgctgggattacaggcatgagctgccatacccagccccagtctttaacccttaaataaactcagaaccattagttctttaaaataggcattttttctaaatctttctatttctaattttattgattttttttttcaagaagaatggtaatgactttgctataactacctgcacatattgatgctgcatgtttttactggaaaatgagcttaatgtggacattgattaattttcatgttttgttctttgtaagtgaaatcataaacatacacccgtgcaggtgacagtacaagtgatcatattctattgccaacaaaaataaaatttaacaaattagaattccacaatttattttcccccaaaggtggttctaagaatgattcccagctttccagtaagagtacttttgcaccataggtttgggaatgtgctgagcaattttgtcttgggcaaatgtggaacatactttaaaatgagtacctagttttcagagaccaagtaagcatccaagaccatttgcatttgatgattactaactaaaaccactctaagtaagtgaaagctataataggcagaatttgaatagatctctttaatcaaaataatcctgaactcaatagcttaatttttaatttaaaaatttttcatctgccccatgcttcaagttcttcatttcagcctctccaatcctgttttctttaaatcatcaatttgagctaacctaatattctatgtcttctaagatttaatccctttatggtattttatttgtatacattttaggtgacgatagatgatgtcaaaaggaaaatattttctaattttatttttttgatttattttttaaaaattctttcttgtaacttctcaagcagtgatgtgcatttacatcagcaaaatatacacaaaaatagcctcctttaccacttttctagttcattcatacatgctgcctagtcttacctttcctatakgaggaactattccattactaaatgtgccagcttcagggacacctttttttgtttgtttgtttaaatggagtctcactctgttgcccaggctggagtgcaatggtgcaatctcagctcactgcaatctccacctcctgggttggagtgattatcctgcctcagcctcctgagtagctgggattacaggtgcccaccaccaccacgcccagctaatttttttgtatttttagtacgacggggtttcactatgttgaccaggctggtctcaaactcctgacctcatgatccatctgcctcggcctcccaaagtgctgggattacaagcatgagccaccgaacccggcagggacaacttttggttctccatggcttatgtttcc

SEQ ID NO: 721882 - DNA, 651 bp, Homo sapiens
cgcatgaatttaggtgtgggtgcctttcagtagtcctacctagcacttagtgtatgctttagatctaaagtctggaggatatcttgctatcagggaaacttcttctattatttcttcgaccctgtctctcccatctgttttattctcttttacttctcttaagtgagtatttggtcccctgggcatatcctccatatcttttaatgtcagtcccataatttctattgtctttctgccttcacattacaaaaaaaaaaaacaccttaatttctaaatcactaatttattctgcgaccacatactttcagttactcagcccttctattaattgctttcttcttataatcatcttttaaaatcataagtctttcttctttagtgattggcttttcttcatggaactctaccttagctttattgatttaatatccacttaatttttttaagcaattagcattttatctgaaatgaaaagtwttgtttcattgttgatcagttattgtgtttattcatcttggttcttcttttctttttctttttttatttttatttttcctaaccactaggctacaagggaggttcttctttttcaatatcattcattttccttcaatatttagtaattctttgttttaaatgcagtacctttgg

SEQ ID NO: 721883 - DNA, 1264 bp, Homo sapiens
gattaaagaggcagacctcatggatatgggtgagaggctgctctgtgcaatgtcttgacggacctcatggatatgggtgaggggctgctctgtgtgatgtcttgttttctaggttatctgacctccatgatgactgtcagttcgctgatctgtgtcttgtctcatgggctgctcgttgtacctctctcccctctgcctcaggtttattctctctcatctctgcactggtctggaaggatgcctctatgggctgtatcacctgggctcccatgccctctagcttcgagttgagtttggccaatgggagacacaggtgggagatgggagggtgggaaaagggagagatcaaggcatttgttcctcctgctccctctcttgctttggcatgtgtggtaggacgacttcagagatagctcctggtgatgcctacgtcttggcattggtgccctgctgtaatttcctctgcttaactgggctgggtctcgagattcactcctaacaaatagaagatggcaaagtgatgaggtagtcagttctgagactatgactttagtcttgtttacacacactctgtctctggatcttctcagcttgctctgatgaagtgagtggccatgtgtgaggctgtcctgtggagagacctacgtggcaagaaaccgaggacagcctccagcctgtagccagtaaggagccgaggcccttagtccagctatctgtgaggaactcaaccctgccagctaccacrtgactgagcttggaagtgggtctttcctcagctgagttttgaggtgaccgcagcctcgatgataccttgactgcagcctcattagagactctgtgtctgagggcgcatctgtacctggactgctgatccataacaactgtggataagaaatcatgtgtgaagccaccaaatgtttgaataatttttacagccacggatacttaatgcagcatggtgtggcaatggctgtttctctctgactgcagcttctgtctggtccctgtttcagagcgccatctcttgttgtcaggtgacattattcacccccaccccccaacacgctgcttcagacttcctgctgttgctagtccatacttgaatctctgtaaataatagatacatttttccttaaagaaccttttttaaaaaaagccctcctgagaaccacaaaccactgctcaatgaaataagaggacacaaacaaatggaagaacattccatgctcttggataggaagaatcaatatcgtgaaaatggcca

SEQ ID NO: 721884 - DNA, 805 bp, Homo sapiens
  misc_feature 21, 513: n = A,T,C or G
tttggccaggacacaaatacncagatctttcttcaacacccctccaagaagttcctgtggcagaaatttgcaaaagaaaccatggcaaagcaaagcaaagttagcacttgactccacacctcaatgcagagaaataggatagttttaggggagcagacattactttggtctagttgggtttaaatgacctggccaaagcaccatgttacattcaaacccagattttagatcttattctggttgcatggaacaaaaatatgtgtgtgagagagggtgagctaggtgattcagcctctgccattgtgggtcagccccactcttagtgctctgatggcctgaaagagagaatcacagaaattctgctgctgatattttacacttggaaatcccaccacwagcaaatgtggcctcatcagtgactttaaacgcaataagcacctcctctctactttgacagtttggtgaccttccataagacatttcctccctagagtattctgttttgttttggtnccttttttttttttttttttttttgagacggagtctcgctctgttgcccaggctggagtgcagtggcgccatcttggctcactgcaagctctgcctcccgggttcacgccattcttctgcctcagcctcctgagtagctgcgactacaggcatgtgccaccacgcccggctaattttgtatctttagtagagacggggtttctccatgttggtcaggctggtctcgaactcccgacctcaggtgatccgcctatcttggcctcccaaagtgctgagattacaggcgtgaacc

SEQ ID NO: 721885 - DNA, 805 bp, Homo sapiens
  misc_feature 21, 513: n = A,T,C or G
tttggccaggacacaaatacncagatctttcttcaacacccctccaagaagttcctgtggcagaaatttgcaaaagaaaccatggcaaagcaaagcaaagttagcacttgactccacacctcaatgcagagaaataggatagttttaggggagcagacattactttggtctagttgggtttaaatgacctggccaaagcaccatgttacattcaaacccagattttagatcttattctggttgcatggaacaaaaatatgtgtgtgagagagggtgagctaggtgattcagcctctgccattgtgggtcagccccactcttagtgctctgatggcctgaaagagagaatcacagaaattctgctgctgatattttacacttggaaatcccaccactagcaaatgtggcctcatcagtgactttaaacgcaataagcrcctcctctctactttgacagtttggtgaccttccataagacatttcctccctagagtattctgttttgttttggtnccttttttttttttttttttttttgagacggagtctcgctctgttgcccaggctggagtgcagtggcgccatcttggctcactgcaagctctgcctcccgggttcacgccattcttctgcctcagcctcctgagtagctgcgactacaggcatgtgccaccacgcccggctaattttgtatctttagtagagacggggtttctccatgttggtcaggctggtctcgaactcccgacctcaggtgatccgcctatcttggcctcccaaagtgctgagattacaggcgtgaacc

SEQ ID NO: 721886 - DNA, 639 bp, Homo sapiens
gccatcaccaccaccatcgccattgccatcaccatcgtcaccaccaccaccgtcaacaccatcaccatcaccaccatcaccatcaccatcaacatcaccatccccaaactctgcattagccctctgaggaggctgcatttgagctaagctttacatgacaaggaaagagccttccargcagaaggaacagcaagtttaaaggtcctgtggcaaaaagtctgggcaggtcctaggcagtgacagaaggccagagggactggtgcatagcaagggagagaggcaggggccaggccatgcagtgctggacagggtaggtaaggaggccaggtttgttctaaggttgatgggatgataatgaagggttttaagcatgtgagaaacaagatctgatttatataaaagatgactctggctggcatgtaaaggatgatgtataggcaagggaggaagcagggagaccagctagcaggctactgcaataatccaagcaaaaaatgctcacagcttggattagggtggtagagtgaagatggagagaaggggacagatttaagagacatactctgaagataaaacagtcaagatttgacctcgtatttgatgttgagctgagagaaagaaaggatttatttcatgtga

SEQ ID NO: 721887 - DNA, 624 bp, Homo sapiens
aaaatgttaacacatacagaatagaggatcatttgtcctaagatttttctgtatcaggaaagatttgactaacattatttaagataattcaccctacattatgtgcctgacactattgtctaggccccagtaatacagcagtagacagacagttctgatctcttggtgtttatgcaaactacaaaggacaactcttaagaaatatagatagaaaacagaccccagaaatagtccaacacatacatgagaacctgatcaatgatgagtgagcatacgaactagtgtggaaaggatggggtctccaaaaaaggaaacaggaacacctgagaagtcacaaagaagaaaacaaactgaatccccactcctattactaatatcaatcccaagtagacgtcaagaatgtaggtatgaaaagcatactattcaattttcaggagctaaaacaggagaatatctttatgatctctgaatagaaacagatttcttaaawaagacaccaaaagcaagccataaaaggaaaagaacgatagaagcaaatacattaaacttacaaacttcagttaatgaatagatccttgtattagtctgttctcccattgctataaagaaatatgagactgggta

SEQ ID NO: 721888 - DNA, 624 bp, Homo sapiens
aaaatgttaacacatacagaatagaggatcatttgtcctaagatttttctgtatcaggaaagatttgactaacattatttaagataattcaccctacattatgtgcctgacactattgtctaggccccagtaatacagcagtagacagacagttctgatctcttggtgtttatgcaaactacaaaggacaactcttaagaaatatagatagaaaacagaccccagaaatagtccaacacatacatgagaacctgatcaatgatgagtgagcatacgaactagtgtggaaaggatggggtctccaaaaaaggaaacaggaacacctgagaagtcacaaagaagaaaacaaactgaatccccactcctattactaatatcaatcccaagtagacgtcaagaatgtaggtatgaaaagcatactattcaattttcaggagctaaaacaggagaatatctttatgatctctgaatagaaacagatttcttaaataagacaccaaaagcaagccataaaaggaaaagaacgatagaagcaaatacattaaayttacaaacttcagttaatgaatagatccttgtattagtctgttctcccattgctataaagaaatatgagactgggta

SEQ ID NO: 721889 - DNA, 1498 bp, Homo sapiens
gaaatgtttataaatttggtattgaattttttacataaaatatcaaccaacatatgttcattctctgtgagatatcttcaagtactgaatattctttacctgtcaaaatacaaaaactataattgaacactaaatcgggttataatttttataatctctctaatgttattactttccatatacaaatataaaatttaaccaaaatgatagattttatcacctacacaacatgagaaagtattttatcttcttttctcactaaatttttaaatattgcccatcttctatagtcagtacaaatttcatgtaattgttaaatggtcaaaaatggtgatagttaagtccatggtgaatgacaactattgaaaatggtaatatggaaaaataagtcttcctttcactccttaccctcaaatcataatagaaaatcacagatactggtttcttgggtaattacccataaatattaaatatgtgtagaactgatgaaatacatcaatccatagattcaagaacttccatgagcctgaacacttttcaagtatttgcctgcaaccagaaaagaatactcaagtatcaggtggtaatggcattaaagggcaagaatttgggcaagaaagaatatctgccacagagacaaatggaattctagtctcctttctatcacctcagaagactagatcttgtgatggtcaacttagaggggagtgaatatggacacttcctgggtcaattttcactttctaaaataaaatgctttatactcaaatgacagaacaaacacgtcttgcagactaaaaccagtgacgtgttggtttgtcacttattgagcagattaaaaaataaaaacaattgaatttttaaaactacaaaaatgatcacagagagattatatgtgctctatattaataaagcagtagttgtatttgagaacattttaaactacctatgttttagcatgtatcatactaattgttaaaatgtatattaaaatgaaagttggatttctttctccaaatagagccagcaaattccctagaatagcttgcctacctcacttcatgaccaatgaaaatgtaccatgcttagtccacaattaaactctaccatgcttagtccacaattaaaatctaccctgcttagtccacaaaagtataatgtgtcaattaaaatgtaatatatggattctccacatttttgagaaatgctttgaaattaactcaaatctgtactttaagagaagattgtattcaataaaatcttcgtccttgaagtgmaagtatagcaagaataaaatgatgagaaaacaataaaggaagaaatgaactgattgttcaatggctagagcataaccaagtttttactggaatatagaggtattgattgtaaattgcgtcttggtggtcaaaccacaaaggcatgatgtaatcaatgataaaactatatatagtactacataattacttacataacactttttaatcctgttttcttcttt

SEQ ID NO: 721890 - DNA, 1099 bp, Homo sapiens
tgactaaaaaattagaaacgtctgacctctttccagatgacttttattatgtgctgaatcgtggcctcccaaaattcataagttgaagcctagccacctatttgatgacaggatctttagggagatrctgtaataaagtttaaatgcagtcacaggggtggtgccctattccaacaggactggtgtccttagcagaaggggagacaccagagcactctgtctctgtttctgttgttccctctctgcacatacacagagaagaagccatgagaggacagacacagggataaaacagctgtctgcaagccagctaagtggactaaaagcctgagcatttaatttcaatattgtttggaaatggtaactcttcaaatagcatgttattcattgtgatgtgatatagagttaaaatatatttcagtgataatactattagtatctaagaatcaccccgatacgtaacttgatacatttcttcatgaaatagataattcaaattcaccaagcagcccttcttacaaggaagaatttaggtcaagacagatgttttatttcatctgtctgattagccataaaaatagtaattaatatgtgctgattaaaaaaaataaatgatcaaactgtttagtgtccataatggatgttagcataatgggatttgttgtccaccacttaggtcatttgtaattttagttctttttatctattttattcttcttatttctccattatagattattcttatatattcaataattacaggttattttatgtttattatgtgtgccaatagccatgcccacgtgttttttttctgagagagataatcttctctccctttacttcattatcagtaatttaagattatcagtctttcccagaagaactgtattttatttcttttccttgagccactttgtccaatagaggacttgctcagtgccacataataataaatattttaacaaagagtattaatactgtacctttgatgttgccaccagtaggagttttaattggcctttattgcttaaggccttcttattttcattgcccttgtcaaagatgagaaacactcacattataaaagtgtccctaa

SEQ ID NO: 721891 - DNA, 761 bp, Homo sapiens
gtaggcaagaaagagaatgatctgttgattctaatctcacattttgtagcaatattaagaacttaatactatgtgctaggtaccatggcagatgcgttagacagtatctttctacatttttctaagtgttttcccacattattaacctttttctgagcttttgcctcggcctcttaaggcttgggaagctaaagacacatggtttagaaataacacagattgaaatagacaaaggagttactcagattcaagcagggccatctgcagacatatcagttagaaattgtcctttatactagttacatcagcaggaagttgtgtttcatgatgcattggctagagcctttggatccctgagtttgagaccccttcccttgggccagaaagggtacaactgtagcaagaactcctgagtacaactggagaaggtagaatcaaggaccactcatgggtaaactacatattcttgtgagagacattggggtgggggaacagcttactaaagtgtccactcatctactttactcctgtccttctggaaaatgaccgagccatgtcatataaaaacagtctgtaagatcccatggtatttcattaaaacctcrgacaggtgttataattctaattatacacaaggaagctataactcagagagattaagtgcctttcctgatgccaaatgattagtaagggggtacttagaactagaacttggatttacaattcgtcagaccaggattttacaaaaataaagtcccaca

SEQ ID NO: 721892 - DNA, 761 bp, Homo sapiens
gtaggcaagaaagagaatgatctgttgattctaatctcacattttgtagcaatattaagaacttaatactatgtgctaggtaccatggcagatgcgttagacagtatctttctacatttttctaagtgttttcccacattattaacctttttctgagcttttgcctcggcctcttaaggcttgggaagctaaagacacatggtttagaaataacacagattgaaatagacaaaggagttactcagattcaagcagggccatctgcagacatatcagttagaaattgtcctttatactagttacatcagcaggaagttgtgtttcatgatgcattggctagagcctttggatccctgagtttgagaccccttcccttgggccagaaagggtacaactgtagcaagaactcctgagtacaactggagaaggtagaatcaaggaccactcatgggtaaactacatattcttgtgagagacattggggtgggggaacagcttactaaagtgtccactcatctactttactcctgtccttctggaaaatgaccgagccatgtcatataaaaacagtctgtaagatcccatggtatttcattaaaacctcggacaggtgttatmattctaattatacacaaggaagctataactcagagagattaagtgcctttcctgatgccaaatgattagtaagggggtacttagaactagaacttggatttacaattcgtcagaccaggattttacaaaaataaagtcccaca

SEQ ID NO: 721893 - DNA, 607 bp, Homo sapiens
catttggacagcctgggtgatctgacattcatataacaaactaaaggttagatgcctgcattggtcaggatggataatagttgtgttgggtcagtgtagagagaggstgttttagttagcagtcatcttcttggcctcctgtggaggccctgggtgtatgtggtcctgatgcttacttcctttcttctgagcgaagctgaggtcttgctaacacatttctcctgtgttttgtttcaggggactctgtgttgatgctctcattgaactgtctgatgaaaatgctgattggaaactcagcttccaagagtttctcaagtgcctcaacccatctttcaaccctcctgagaagagtatgcctaacctaagaaatagagagctgtagtgaatggaggcattttgtaggagccaagatagagaggattggtggaactctccagagctagctgagaaaatccccttccatgattctaaactgggccccagcccattctccccatggtgaagttagggccccacattctttaggttgatggtagtgtttgctcagatatagtgcttctgagggacaggcaggtcttgtctgggaaaaaagggtaaggtgcacaga

SEQ ID NO: 721894 - DNA, 643 bp, Homo sapiens
tcacaatcctactcccttgactaaactgattaaaaacacatttaaccgaaactcaaccagtgggaactctctaatagagctttatgtcttttaatgttgtgcagttatgtgaaaaaaataaattatcaatggttattaaaacctttcttatgcttctaaatgtcctaccccaccacgagatctccttcctatggtctaaacctgtgattctcaaactttagtgttaaaactcctttatattcttaaaaattattgaagtcttaagatttttttgtttttataggttttgtctattgatatttattgtacaagaaattaagattgagataaattttaaatattttactaattaaaacaaatccactaaatatcaataaaatatcacattttatgacaaatatattataaaacaaaaaaagttagaagagtagagccgggcacgstgactcacgcctgtaatcccagcactttgggaggccaaggcagatggatcacatctggctaaggcagatggatcacacacaaggctattctcaaatccctgaccaacatggtgaaaccccatctctactaaaaaatacaaaaattagccgggtgtggtggcacacacctgtaagtcccagctactcgcaaggctgaggca

SEQ ID NO: 721895 - DNA, 232 bp, Homo sapiens
ccttctccccctccgggtgatgccaattcattccaggctgaaactctcattggcagactttgggcatcacctagtggccactgttactctgaaaactgaggcctcaaggaagaagaaagytcatggtgcctgtacacagcccagggcaactgtgtcgtctccacttctcctgccgccacctccaagtttctccctcccttgtttcctagggaatcaccaccctgatgactgg

SEQ ID NO: 721896 - DNA, 1137 bp, Homo sapiens
  misc_feature 5, 6, 7, 8, 9, 10, 11, 12, 13, 14, 15, 16, 17, 18, 19, 20,21, 22, 23, 24, 25, 26, 27, 28, 29, 30, 31, 32, 33, 34,35, 36, 37, 38, 39, 40, 41, 42, 43, 44, 45, 46, 47, 48,49, 50, 51, 52, 53, 54, 55, 56, 57, 58, 59, 60, 61, 62,63: n = A,T,C or G
  misc_feature 64, 65, 66, 67, 68, 69, 70, 71, 72, 73, 74, 75, 76, 77, 78,79, 80, 81, 82, 83, 84, 85, 86, 87, 88, 89, 90, 91, 92,93, 94, 95, 96, 97, 98, 99, 100, 101, 102, 103, 104: n = A,T,C or G
catcnnnnnnnnnnnnnnnnnnnnnnnnnnnnnnnnnnnnnnnnnnnnnnnnnnnnnnnnnnnnnnnnnnnnnnnnnnnnnnnnnnnnnnnnnnnnnnnnnnnntatgaataattataatgtgttttctttgaatgttgccctaattgtatccaaacaattcaaaattcatgattttcttggatgcacagttagagttgaaaattgtagttgtctagaattcttttctatgtttattcaggattttatgggttaaagtttctcttccttatgttttgtattttatacttctgtattttttagagtaggctgcctcacatcagttgtgtttctagtttctacctatgtattatggttttgaattacagtatccaaatcagaattttgggagttaatgttaattttaactttgyttgcaattttgtatttctgtgtttcattttttagggtaggccaccttacatgagtttactgtttttagttttaatttatatattataattttgtatgacaatattcaactctgtacaccttaagacagtgtgggacaaaagtcagctatgaatcagccctatgtcctttgtcagtataattatctgagtgtttgtttgcttgtgtaaatgttacacctattttgtttattatttttatatttttcttcttggctcatggccaataattgattctgtctaggtgagtagtcatggaaatattgtcctaatttcaacatctttatcttatattatcttagtgtgaaagaaacagttttgtggtttgaaggtaatttttcagaaagtttataactctgtctctattaggtgtcttatttatttattttttttaagagagagtcttgctctgtcacccaaagtgcagtggcacagtctccactcactgcaacctccacctcccaggttaaagcatttatcctgcttcagcctcctgagtagctgggattaaagacatgtaccaccaggcctggctaatttttgtatttttagtagagatggggccaggctggtcttgaattcttaacctcaagtgatctgcacacctcggcctcccagagtgctgggattacaggcctgagccactgcaccctgccctcaggtgtcatttttaattttaattgtggtaa

SEQ ID NO: 721897 - DNA, 1963 bp, Homo sapiens
tgccctggtctgttattttaagctatttgtgtttgtttgtttgccaatagtatctatctgatttttgctttttaccccaatctaaaagtgctgtcttttaatagaggaaattaagtaacacctttagcgtggtagctaacataactgaattatttcctagyttatttactatatttccttaatttttgtttctctaattttcctgtcttttgctattttgttcaatttttgttgtttgctttttctaatgatttggaaattatatatcaattttctaaccaaaattttaaatctatgtttgaaattatatatctaataagtatatatcaatagcatagatatctatagtctctatgcaacatggcaaaattttctacctcaacctgcctcccagattttatcaaaacaaccacattagcgtcaacaattcaaacttaactttatgtttcattggtttaattgcttacttctgcagtatttataccaatgcttcctgtttatctttaataactaaatataattattaaatttatataattctataaattattgaatttatataattattacataaagataattgattattttaataattaaataattgatttattttaataacaagtaaaggtattaaatatttaataataattttcctcatttggcttgtgcactacaagtcatttcctttattcagaaatggtatgcagaaatttggagtccactgtatttctgaaaatcactttcatgtacccattcacatacatgagcttagaaatcttgcatacagaaagcctagaggaatcttgcttaacaacctgttccttctaaaatatgcaaatgttgctgcattatcttctagcatttgactttatggattaaaatctagtattaatgtgattattttctgtagcctgctttgtcttgtttaacgcttatctttgattttttttgattactgaaattcagaaaatgttctattacatgaatcaaacctaaaacaaaaacatctcctatatgcctgtctgacgtcttacatgtatcttccatgacctttagcttttctctcctaatttccccatcttgtctcattcctctcagttgaaaaatagatcccccaggtgatatcctaattcactaatccaatgttggtcatctggtttccttctcacagtaacattttcgtgtcctccgtctgcctccactgcacttgacagtctcttcttttgcaatgtggcacctctcagatctcacaggtcataagccagagttgttttgaagttttattccatttctctgtttcactgtgtgccatttactccattggcttttggagttggtatgtgatatatcctaaacattcacaaatacttcaaaatgctatgcacactgggcgccgagtggtcagtgtgatgcccgaagcttggggcagtgcattacatacagaagtagaagagaattgtccaatcagaattaaacatgatggctttgacctactgtctgcaggaaataagtgatgagagaaggccaaagaaaactgtagccatgtggcctccagatggaccttattatcttatgggtgcttggtttctttttgttctttgaccctaggtgatttattttgttatatttaaagcaaactagcaatttctgctctataattaaaagtatgtgtatgtctttataaacactgagtatatatactattaattgctgttgttatttttccattctcaaagctttccaggcctaatcgttatcctgcaacaactttcaaagaagtgagagcaatgatttcctctcctccactgttcatacgaatcatggagaagcggggttgaaaacgaagactgcctgagccccaacccccggagtccaacttggggtacctgagatatagccctatctgttagtttcctattgctgctgcaaccaatgaccaaaaactcagtggcttaaaaca

SEQ ID NO: 721898 - DNA, 1963 bp, Homo sapiens
tgccctggtctgttattttaagctatttgtgtttgtttgtttgccaatagtatctatctgatttttgctttttaccccaatctaaaagtgctgtcttttaatagaggaaattaagtaacacctttagcgtggtagctaacataactgaattatttcctagtttatttactatatttccttaatttttgtttctctaattttcctgtcttttgctattttgttcaatttttgttgtttgctttttctaatgatttggaaattatatatcaattttctaaccaaaattttaaatctatgtttgaaattatatatctaataagtatatatcaatagcatagatatctatagtctctatgcaacatggcaaaattttctacctcaacctgcctcccagattttatcaaaacaaccacattagygtcaacaattcaaacttaactttatgtttcattggtttaattgcttacttctgcagtatttataccaatgcttcctgtttatctttaataactaaatataattattaaatttatataattctataaattattgaatttatataattattacataaagataattgattattttaataattaaataattgatttattttaataacaagtaaaggtattaaatatttaataataattttcctcatttggcttgtgcactacaagtcatttcctttattcagaaatggtatgcagaaatttggagtccactgtatttctgaaaatcactttcatgtacccattcacatacatgagcttagaaatcttgcatacagaaagcctagaggaatcttgcttaacaacctgttccttctaaaatatgcaaatgttgctgcattatcttctagcatttgactttatggattaaaatctagtattaatgtgattattttctgtagcctgctttgtcttgtttaacgcttatctttgattttttttgattactgaaattcagaaaatgttctattacatgaatcaaacctaaaacaaaaacatctcctatatgcctgtctgacgtcttacatgtatcttccatgacctttagcttttctctcctaatttccccatcttgtctcattcctctcagttgaaaaatagatcccccaggtgatatcctaattcactaatccaatgttggtcatctggtttccttctcacagtaacattttcgtgtcctccgtctgcctccactgcacttgacagtctcttcttttgcaatgtggcacctctcagatctcacaggtcataagccagagttgttttgaagttttattccatttctctgtttcactgtgtgccatttactccattggcttttggagttggtatgtgatatatcctaaacattcacaaatacttcaaaatgctatgcacactgggcgccgagtggtcagtgtgatgcccgaagcttggggcagtgcattacatacagaagtagaagagaattgtccaatcagaattaaacatgatggctttgacctactgtctgcaggaaataagtgatgagagaaggccaaagaaaactgtagccatgtggcctccagatggaccttattatcttatgggtgcttggtttctttttgttctttgaccctaggtgatttattttgttatatttaaagcaaactagcaatttctgctctataattaaaagtatgtgtatgtctttataaacactgagtatatatactattaattgctgttgttatttttccattctcaaagctttccaggcctaatcgttatcctgcaacaactttcaaagaagtgagagcaatgatttcctctcctccactgttcatacgaatcatggagaagcggggttgaaaacgaagactgcctgagccccaacccccggagtccaacttggggtacctgagatatagccctatctgttagtttcctattgctgctgcaaccaatgaccaaaaactcagtggcttaaaaca

SEQ ID NO: 721899 - DNA, 569 bp, Homo sapiens
ccatgttagccaggatggtctcgatctcctgaccttgtgatccacccgcctccccctcccaaagtgctgggattacaggtgtgagccaccgcgcccggccccttctttttatatgtaagatgcagattcactgaatgccaatcaaagcctccgaggatgtaaccacttgcctcatgggcayccctctctccttttcccctcctgcttgctctttctcagacccctctttggagaaaagcccaggccgcagaccctactgtaacttgtgtttcttttgcttgggtacatcccaaccttggcaaaataaacctctaaaggattgagctctgcctcggacacttcttgggccacaccctcatgctcacttatccagcccccagtgggcgagaaacacccaccagacccgtgggccccatgggatgttcagtgtcatggtttcctggtgggctagtgtataattacttaatcctgctccttggctatttcctaatgtactcatccccaaggtagggcctcttccctggatttctggtgttttggaacgccgggcatctttggatgtcagcaca

SEQ ID NO: 721900 - DNA, 927 bp, Homo sapiens
tagaatttcaagtcattcggccctgatgagggcacgcatcccataagtaaatgtggtwattatagacaaaaaataaattatgtttttttttttcaaatgacatgtttgttatttcacatgactcttaaattgttaagacataaatactcgttaaggattttggacttactatgtagttaaaaatagaaactcatagatattttaaaaagtagcaacacattcagagcttcatgaaccaaaaacattttagaatctctggcatagggtttgtaccagtgtcctcaggttggaatctcaatttaattgacctgaagcaagttagagaaactctgagttttcttacttgaaaaatgtgggcaaaatatcaagtatctcatgggtaatttttttctttcataattaagtgttttaatgtaaataaagcatgtaaaagagaataaggtacatgctaatactagctgaataggtctcatctagaagcataaaaacacactgcatgaaccatgttttggaacttaaggaactgacaatttttaagtaatgaattaataactgctctagtagctatatgtcagaatgtatatgtttcattatagtgtttataacgtcacatgaaaacacagattaaaatgtgcgcagtttatgtttaaggtaagtaatacttgtttattttgtttaggaaaatctctgttcatcaaccacacatgtaattgaaaacactgattaataaaactatatgaaattatttagactattggcatgtaaattttaacctacattctcataaaatcttcacaaataacagctaatctaaacagtttggtagtttatggatgcaaagatagacgttggtatactttttcaaaatgtaaaagaatgatcaatatcaaacggggtatactgtttgccactttgttggagaaagga

SEQ ID NO: 721901 - DNA, 927 bp, Homo sapiens
tagaatttcaagtcattcggccctgatgagggcacgcatcccataagtaaatgtggttattatagacaaaaaataaattatgtttttttttttcaaatgacatgtttgttatttcacatgactcttaaattgttaagacataaatactcgttaaggattttggacttactatgtagttaaaaatagaaactcatagatattttaaaaagtagcaacacattcagagcttcatgaaccaaaaacattttagaatctctggcatagggtttgtaccagtgtcctcaggttggaatctcaatttaatygacctgaagcaagttagagaaactctgagttttcttacttgaaaaatgtgggcaaaatatcaagtatctcatgggtaatttttttctttcataattaagtgttttaatgtaaataaagcatgtaaaagagaataaggtacatgctaatactagctgaataggtctcatctagaagcataaaaacacactgcatgaaccatgttttggaacttaaggaactgacaatttttaagtaatgaattaataactgctctagtagctatatgtcagaatgtatatgtttcattatagtgtttataacgtcacatgaaaacacagattaaaatgtgcgcagtttatgtttaaggtaagtaatacttgtttattttgtttaggaaaatctctgttcatcaaccacacatgtaattgaaaacactgattaataaaactatatgaaattatttagactattggcatgtaaattttaacctacattctcataaaatcttcacaaataacagctaatctaaacagtttggtagtttatggatgcaaagatagacgttggtatactttttcaaaatgtaaaagaatgatcaatatcaaacggggtatactgtttgccactttgttggagaaagga

SEQ ID NO: 721902 - DNA, 927 bp, Homo sapiens
tagaatttcaagtcattcggccctgatgagggcacgcatcccataagtaaatgtggttattatagacaaaaaataaattatgtttttttttttcaaatgacatgtttgttatttcacatgactcttaaattgttaagacataaatactcgttaaggattttggacttactatgtagttaaaaatagaaactcatagatattttaaaaagtagcaacacattcagagcttcatgaaccaaaaacattttagaatctctggcatagggtttgtaccagtgtcctcaggttggaatctcaatttaattgacctgaagcaagttagagaaactctgagttttcttacttgaaaaatgtgggcaaaatatcaagtatctcatgggtaatttttttctttcataattaagtgttttaatgtaaataaagcatgtaaaagagaataaggtacatgctaatrctagctgaataggtctcatctagaagcataaaaacacactgcatgaaccatgttttggaacttaaggaactgacaatttttaagtaatgaattaataactgctctagtagctatatgtcagaatgtatatgtttcattatagtgtttataacgtcacatgaaaacacagattaaaatgtgcgcagtttatgtttaaggtaagtaatacttgtttattttgtttaggaaaatctctgttcatcaaccacacatgtaattgaaaacactgattaataaaactatatgaaattatttagactattggcatgtaaattttaacctacattctcataaaatcttcacaaataacagctaatctaaacagtttggtagtttatggatgcaaagatagacgttggtatactttttcaaaatgtaaaagaatgatcaatatcaaacggggtatactgtttgccactttgttggagaaagga

SEQ ID NO: 721903 - DNA, 688 bp, Homo sapiens
ttgagttttgtatgtattggtgctgctccattactctattttgttgttgttgttttgatacacttaatatttaattaaaagaaattgtgttgctctatcccatgccattgaactttgattagagatctttacagtcagtgaaattagaaagaatgtgttatactagcagtaaaacacaggtttttttttctccagcaatattcaataccaaataacaatgaagcggcatccaaaattttcttaggaaaaaatgtagcttaaatgtacgctaccataatacattaaaaaaaacataaaataacaaagaacactctggaacataaaaaaagatgaaagatttcaaaatcacagcacctatgagtyggatatgatttgaatatgtgtaccctttaaatctcatgttgaaatgtggtgtccagtgttggaggtggggcctggtgagaggccccatcagcattcacatgtttactgcagcagtatttacaataacatgtatggaattaacctaagtggttatcaattgataactggattaaaaaaaaagtggtgtgtataagtgttatatatatatgcgtgtgtgtgtgtgtgtgtatatacacacatagtatgtgtatatatatatagtatgtgtatatgtatatacacatactatatatatacacatagtatgtgtatatatatacacata

SEQ ID NO: 721904 - DNA, 688 bp, Homo sapiens
ttgagttttgtatgtattggtgctgctccattactctattttgttgttgttgttttgatacacttaatatttaattaaaagaaattgtgttgctctatcccatgccattgaactttgattagagatctttacagtcagtgaaattagaaagaatgtgttatactagcagtaaaacacaggtttttttttctccagcaatattcaataccaaataacaatgaagcggcatccaaaattttcttaggaaaaaatgtagcttaaatgtacgctaccataatacattaaaaaaaacataaaataacaaagaacactctggaacataaaaaaagatgaaagatttcaaaatcacagcacctatgagtcggatatgatttgaatatgtgtaccctttaaatctyatgttgaaatgtggtgtccagtgttggaggtggggcctggtgagaggccccatcagcattcacatgtttactgcagcagtatttacaataacatgtatggaattaacctaagtggttatcaattgataactggattaaaaaaaaagtggtgtgtataagtgttatatatatatgcgtgtgtgtgtgtgtgtgtatatacacacatagtatgtgtatatatatatagtatgtgtatatgtatatacacatactatatatatacacatagtatgtgtatatatatacacata

SEQ ID NO: 721905 - DNA, 753 bp, Homo sapiens
taaaaaggctgaayaaacatagtgaaaaagcacatttggaagatttgccagtcatgggggtagactgaggcagctatataaacacttctagttataagaattataaaatttgtacaaaatataaaacaacaattaaaagacattgaaatatcaaaaaaataagagatggaggagtatttgcttttaagaaattgctctggaaattagtgacacatttgtgattggaactttcttaccaagggtgctacttaaacttctgtggaaaatattggcagtgaaaacatgagcagttagaaaattcaggtccagaaaaacagctaaaatttgaatagatattgagacaaaagaagaagaagacagagaaagagacacgcacaaagttttagtataaaccaaacccatagtattagctggttactaaatatatatgagtaagtaacaataagtggacacgaccacaaagcaggcagggtcaatttaataaatacttgtcaaatagaactgtatactgagtgagttctttgtttcttctttttttgcaattgttgtgttctgatttgtttataaagttagtggagcctccaacaatgaacatctctagtagcagaaaggcaacaacttatgtcttaagtaatcagaagacaggtcaagtttggcagatataaacgaaattctgtttgtgtgataaagcaaatgtgactttatttcaaagtgataagggcttcaggaatctgaggccaaaattgttggatt

SEQ ID NO: 721906 - DNA, 753 bp, Homo sapiens
taaaaaggctgaacaaacatagtgaaaaagcacatttggaagatttgccagtcatgggggtagactgaggcagctatataaacacttctagttataagaattataaaatttgtacaaaatataaaacaacaattaaaagacattgaaatatcaaaaaaataagagatggaggagtatttgcttttaagaaattgctctggaaattagtgacacatttgtgattggaactttcttaccaagggtgctacttaaacttctgtggaaaatattggcagtgaaaacatgagcagttagaaaattcaggtccagaaaaacagctaaaatttgaatagatattgagacaaaagaagaagaagacagagaaagagacacrcacaaagttttagtataaaccaaacccatagtattagctggttactaaatatatatgagtaagtaacaataagtggacacgaccacaaagcaggcagggtcaatttaataaatacttgtcaaatagaactgtatactgagtgagttctttgtttcttctttttttgcaattgttgtgttctgatttgtttataaagttagtggagcctccaacaatgaacatctctagtagcagaaaggcaacaacttatgtcttaagtaatcagaagacaggtcaagtttggcagatataaacgaaattctgtttgtgtgataaagcaaatgtgactttatttcaaagtgataagggcttcaggaatctgaggccaaaattgttggatt

SEQ ID NO: 721907 - DNA, 629 bp, Homo sapiens
acatagcttttacctcattggcccttctgccttctgccatgtgaggatgcagtaacaaggccccatcttggaagcagagtacttgagcactcaccatatacttcacctgctgccaccttgatcttggacctcctagcctccaaaatggtgataaaataattttcttaaataaattacccagtctcaggtattttgttatagcagcacaaatgcactaygacaaatatgatactagttctttagcaaatttataaattatcaagctgttgatgctgttgaagtgatgttaaaagaatttgagaatcttataacaaaatcacaagctaaaatgtttcaattttaccctttatcctgtcaacatggataaaaataaaccccagttttcaaatttctaagcatttaagccattctcttcacaagaatacgtgtatgttcaactgtttcagtttctataagtcgttttaaaatgtaactaaaataatttttgcctcattatgaacattttttcattttttgcagtgaaacactgagaatgaataataaatatgttgaataggcaacatacgtgaacgttcaactctttcagtttctataagtagttttaaaatgtaactaaaacaactttttgc

SEQ ID NO: 721908 - DNA, 621 bp, Homo sapiens
atgcttrtaatcccagcacattgggaggccaatgtgtgtggatcacctgaggtcaagagttcgaggccaacctgatcaacatggtgaaacccatctctactaaaaatacaaaaattagctgtgttcagtggcagacgcctgtaatcccagctactcaggaggctgaggctggagaatcacttgaaactgggaggcagaggctgcagtgagccgagattttgccattgtattccagcctgggcaacaagagtgaaactctttcaaaaaacaacaacaaaaaaagaaagtaaagaaggaaggaaggaagacagaatgacagaaagagagaaagagagagagaaaaaggagagaaagagagaaagaaagaaaaagaaaagaaagaaaagaaaaggaaaaaaaagaaaagaaaagaaaagaaaaaaagaaaagaaagaaaaggcatatcccaaaatgttgggagagttaggcacataagaccaaagcaaaaagaaaatgaaattgagattttaacaataatagaaaaaacataaaccttaaaaccataagtttggctgggctcagtggctcatgcctgtaattccagcactttgggaggccgaggtgggtggatcacctgaggtc

SEQ ID NO: 721909 - DNA, 621 bp, Homo sapiens
atgcttataatcccagcacattgggaggccaatgtgtgtggatcacctgaggtcaagagttcgaggycaacctgatcaacatggtgaaacccatctctactaaaaatacaaaaattagctgtgttcagtggcagacgcctgtaatcccagctactcaggaggctgaggctggagaatcacttgaaactgggaggcagaggctgcagtgagccgagattttgccattgtattccagcctgggcaacaagagtgaaactctttcaaaaaacaacaacaaaaaaagaaagtaaagaaggaaggaaggaagacagaatgacagaaagagagaaagagagagagaaaaaggagagaaagagagaaagaaagaaaaagaaaagaaagaaaagaaaaggaaaaaaaagaaaagaaaagaaaagaaaaaaagaaaagaaagaaaaggcatatcccaaaatgttgggagagttaggcacataagaccaaagcaaaaagaaaatgaaattgagattttaacaataatagaaaaaacataaaccttaaaaccataagtttggctgggctcagtggctcatgcctgtaattccagcactttgggaggccgaggtgggtggatcacctgaggtc

SEQ ID NO: 721910 - DNA, 621 bp, Homo sapiens
atgcttataatcccagcacattgggaggccaatgtgtgtggatcacctgaggtcaagagttcgaggccaacctgatcaacatggtgaaacccatctctactaaaaatacaaaaattagctgtgttcagtggcagacgcctgtaatcccagctactcaggaggctgaggctggagaatcacttgaaactgggaggcrgaggctgcagtgagccgagattttgccattgtattccagcctgggcaacaagagtgaaactctttcaaaaaacaacaacaaaaaaagaaagtaaagaaggaaggaaggaagacagaatgacagaaagagagaaagagagagagaaaaaggagagaaagagagaaagaaagaaaaagaaaagaaagaaaagaaaaggaaaaaaaagaaaagaaaagaaaagaaaaaaagaaaagaaagaaaaggcatatcccaaaatgttgggagagttaggcacataagaccaaagcaaaaagaaaatgaaattgagattttaacaataatagaaaaaacataaaccttaaaaccataagtttggctgggctcagtggctcatgcctgtaattccagcactttgggaggccgaggtgggtggatcacctgaggtc

SEQ ID NO: 721911 - DNA, 621 bp, Homo sapiens
atgcttataatcccagcacattgggaggccaatgtgtgtggatcacctgaggtcaagagttcgaggccaacctgatcaacatggtgaaacccatctctactaaaaatacaaaaattagctgtgttcagtggcagacgcctgtaatcccagctactcaggaggctgaggctggagaatcacttgaaactgggaggcagaggctgcagtgagccgagattttgccattgtattccagcctgggcaacaagagtgaaactctttcaaaaaacaacaacaaaaaaagaaagtaaagaaggmaggaaggaagacagaatgacagaaagagagaaagagagagagaaaaaggagagaaagagagaaagaaagaaaaagaaaagaaagaaaagaaaaggaaaaaaaagaaaagaaaagaaaagaaaaaaagaaaagaaagaaaaggcatatcccaaaatgttgggagagttaggcacataagaccaaagcaaaaagaaaatgaaattgagattttaacaataatagaaaaaacataaaccttaaaaccataagtttggctgggctcagtggctcatgcctgtaattccagcactttgggaggccgaggtgggtggatcacctgaggtc

SEQ ID NO: 721912 - DNA, 592 bp, Homo sapiens
gatatatgccaccatgcccggctaatttttgtattttatgtaatggtggggtttcaccatgttgcccaggctggcctcgaactcccaggctcaggcaatccactgcctcagcctcccaaagtgctgggattacaggcatgaaccactgcaccctgccctattaaagttttaatagtacttctttgtatatactcttttataaactgacttttatttttcaaatttgtggaaatattttttctacttagttttaaaaagtattttattatgttctttagtgtatagaatttttagtttatgaatgcaatggtgttgatttytcacattgcaatttattttatcctgagcataaatactcacacacccactagcagtacagaaaattctatttctcactactctcaagaaaacagagtattatcatttaggaaaataattgataataaaacaatataattatttttaattttgattttgacattggcactctcaaaatttttattcaccatttgtatttcttattttataaattattcactctgatctatgtttttctaatttaaatggttatcttctttttcttattcaaaag

SEQ ID NO: 721913 - DNA, 1080 bp, Homo sapiens
tatatccagatatacacattatttagctctcacttataagtgacaacattcagtattcgtctttctgtgtctgacttatttcacatatgataaatgtttcagatattttgaatggtcacagatgtcaaacttattgtcagaagatgaaaaatatcctaattgtctgtcccaggacttggccttacccttttctttattattattttcctatagctggtcttttctcgatagattttttaaaaattaacaaaaaaaccccactttttccgtaatctctttcttcccacggctaacttcatgaaattatagttttgcaaacaaaatgaaaagaacatgggttttaagtgcatggttttacttgaagcaagtttgaattataaatggcctcacttctgtgagtggttcaaactggtgtcactttgcacaggcaaatgggtctggcagagtgtgattcttctttctgtctgctagcactggaggatcaagttaggggtgctcacctgagagtgatcagagacaaattgcagtgtttcactcttaatgtcgaagctgaacaaaacttaacttgctcccaagactgaattgtaactcccgaggtaaatgaacctgcgttagctattcagtttgcaaggcaacagaattgggtttgcctcttcaatctgattatgccagcgttaggtttgtaaaatgaaatctgtcagtaacaaaacttacagactaatttaggcaaccattctcccacaggcagggaagaagtctgcggtcttctatgtatgttttgctatttattgcaagttcctactggatttatctgaggccagagaaacatattaacttatatttgacaagtttcttattgaaagctgattaatttgctgtttgtttaccatttwgaaggacagaactgtggccagaagctcttcattttgtaaatggactcaaaacattccacacctcagtatttatctatttgatatgtttcttttgtcaataaaacactataaactattaaattctaaaggaaagtgcaagcccatctcattttttctactggtgatttagtgagactcttacattttt

SEQ ID NO: 721914 - DNA, 620 bp, Homo sapiens
taaataatcaaaataatcataattttgagttaagattggaacaagaggagttaagcattacggttggtggagggtctgttaatgcttcttgattccctcccacttccgtggttttcccatctgctggacgggtgtataataacgcttacctcatatgcctcttgatrgaatgaagcctgtatcgtgcatttttctttggagaaagattacaattatggcatttgaaatccaagtatatatctagggaatgtgggaattacttgtcattatgtaatttcttatgaaagctttgtctaaaatagcagattgcagaacagaaaaaatcgggtgcaactgcaggaaatgagactgaaaaataattcagagttactttatgaagggcctgaatgccatccaaaggagtctgcatttattctgtaagacatattattttctgaaatatatcccacagaacacgtgcgctataggatgttaatacgtctagggtaagctagattaagtccaagctttagggtactccttaaatatgctaatatgcatcatgattctctaagggagggttgtttgttgttttcctcaaactaaacaatataacttggtaataggcacacagggaatac

SEQ ID NO: 721915 - DNA, 620 bp, Homo sapiens
taaataatcaaaataatcataattttgagttaagattggaacaagaggagttaagcattacggttggtggagggtctgttaatgcttcttgattccctcccacttccgtggttttcccatctgctggacgggtgtataataacgcttacctcatatgcctcttgatagaatgaagcctgtatcgtgcatttttctttggagaaagattacaattatggcatttgaaatccaagtatatatctagggaatgtgggaattacttgtcattatgtaatttcttatgaaagctttgtctaaaatagcagattgcagaacagaaaaaatcgggtgcaactgcaggaaatgagactgaaaaataattcagagttastttatgaagggcctgaatgccatccaaaggagtctgcatttattctgtaagacatattattttctgaaatatatcccacagaacacgtgcgctataggatgttaatacgtctagggtaagctagattaagtccaagctttagggtactccttaaatatgctaatatgcatcatgattctctaagggagggttgtttgttgttttcctcaaactaaacaatataacttggtaataggcacacagggaatac

SEQ ID NO: 721916 - DNA, 1011 bp, Homo sapiens
tttagtagagacggggttttactttggtcaggctagtctcgaactcctgaccttgtgatccgcccgccttggcctcccaaagtgctgggattgcatgcgtgagccaccgcgcgtagcctatcctgcatatttaaagttaattgtgtttaataaaaatagagcagagatagagaagtgattgccagcccagcagctctgagctatctcatataaggcttagtagggaatcctgacccacactccaatctccaagctctagacatctcaccaacaaaacaggaagccaacacattctggatcttctttccaagataaagtcgaccaytcgtaatatttttttcagagacaacggaagctgaaaaataagagctgagaaaggaagaacttttctataagaacttaaatccaaaaggctatgggatagtaatggaaagtggaggagaacaaaaaaggcctggaaagtaaaaccaggaggaaaaacaaacgttttagaacagccaagtgtggggagttggaaagtgaagctttgagtagaaaccagagttacaaaatttcagagctgaaagcggccttataaggaagcagaattgggcccaaggcctaaatatttgccaaaaaccacgcaggcaattagtggcagacaagagaggaccttcatttttgctaaacagggctctttccactgaaacatgtggccctctcaatatctaactaaaaacctttcacaaaatccaagtaaacacagagaaacatcctctcttctgtctccactgctttctctgtccacacgtgcacatgtacacacacagccaccattataacaatacaggaaattgaaggaagccatctgaaacttcaacgtcgggcacagccgccacagataacatatcaaatgcaaggctggaaatcagcactgttcacattcacacaggaagcccgactcaagctgtttgaccgtatttagtaatcagttccatactcacaaaagaatgccagaacaaaaacagacgg

SEQ ID NO: 721917 - DNA, 1011 bp, Homo sapiens
tttagtagagacggggttttactttggtcaggctagtctcgaactcctgaccttgtgatccgcccgccttggcctcccaaagtgctgggattgcatgcgtgagccaccgcgcgtagcctatcctgcatatttaaagttaattgtgtttaataaaaatagagcagagatagagaagtgattgccagcccagcagctctgagctatctcatataaggcttagtagggaatcctgacccacactccaatctccaagctctagacatctcaccaacaaaacaggaagccaacacattctggatcttctttccaagataaagtcgaccattcgtaatatttttttcagagacaacggaagctgaaaaataagagctgagaaaggaagaacttttctataagaacttaaatccaaaaggctatgggatagtaatggaaagtggargagaacaaaaaaggcctggaaagtaaaaccaggaggaaaaacaaacgttttagaacagccaagtgtggggagttggaaagtgaagctttgagtagaaaccagagttacaaaatttcagagctgaaagcggccttataaggaagcagaattgggcccaaggcctaaatatttgccaaaaaccacgcaggcaattagtggcagacaagagaggaccttcatttttgctaaacagggctctttccactgaaacatgtggccctctcaatatctaactaaaaacctttcacaaaatccaagtaaacacagagaaacatcctctcttctgtctccactgctttctctgtccacacgtgcacatgtacacacacagccaccattataacaatacaggaaattgaaggaagccatctgaaacttcaacgtcgggcacagccgccacagataacatatcaaatgcaaggctggaaatcagcactgttcacattcacacaggaagcccgactcaagctgtttgaccgtatttagtaatcagttccatactcacaaaagaatgccagaacaaaaacagacgg

SEQ ID NO: 721918 - DNA, 1011 bp, Homo sapiens
tttagtagagacggggttttactttggtcaggctagtctcgaactcctgaccttgtgatccgcccgccttggcctcccaaagtgctgggattgcatgcgtgagccaccgcgcgtagcctatcctgcatatttaaagttaattgtgtttaataaaaatagagcagagatagagaagtgattgccagcccagcagctctgagctatctcatataaggcttagtagggaatcctgacccacactccaatctccaagctctagacatctcaccaacaaaacaggaagccaacacattctggatcttctttccaagataaagtcgaccattcgtaatatttttttcagagacaacggaagctgaaaaataagagctgagaaaggaagaacttttctataagaacttaaatccaaaaggctatgggatagtaatggaaagtggaggagaacaaaaaaggcctggaaagtaaaaccaggaggaaaaacaaacgttttagaacagccaagtgtggggagttggaaagtgaagctttgagtagaaaccagagttacaaaatttcagagctgaaagcggccttataaggaagcagaattgggcccaaggcctaaatatttgccaaaaaccacgcaggcaattagtggcagacaagagaggaccttcatttttgctaaacagggctctttccactgaaacatgtggccctctcaatatctaactaaaaacctttcacaaaatccaagtaaacacagagaaacatcctctcttctgtctccactgctttctctgtccacacgtgcacaygtacacacacagccaccattataacaatacaggaaattgaaggaagccatctgaaacttcaacgtcgggcacagccgccacagataacatatcaaatgcaaggctggaaatcagcactgttcacattcacacaggaagcccgactcaagctgtttgaccgtatttagtaatcagttccatactcacaaaagaatgccagaacaaaaacagacgg

SEQ ID NO: 721919 - DNA, 1509 bp, Homo sapiens
aactcttatgaagaagaaaaatgtgaacaatgatgaataactacgagtacttatcaaagtgacaagaaagtagctagtaatatggaaaatattgagcagtccaattgtactggaatgatttagtacaatttagtaatattgtcttaggtagtatttatttaattaagcccctggaatcagagatgactctcaatgttagcaattttcccaggaacaagatgaaatcattcaatttaattttaggagaaagtattgtatgttttatagaaagcttaggaattgatttattggcctattgatttgaactgctcttataattctggcacactccacatattaacaattctttctaatccctacttggctgggtaatttatgcataggtcaggaagtcagcctgggctgtagctggctccatatacataccatgtgaaatgacatttagtatttgttttcttcctgatagggcctgtgcttccttcagagactcacacaagaggtttatcatgagaaggaccgcactatttcatttcactcctacaagttttcatttacgttacacattgagaaagttatgagaagcaactgtcactctctggaggtggagactgccgtgattcacaaagacaagaggtaattttcctgtaatcacaggatgactcaggttagtagctttcagcgcttctgcaactcacataccatgaggtgtttttagcaatgtgcatatttagtgaacctaattcttcccaatccctataattttaaatttatgacaatgtgatataaagtaagttggaatttatttttgcatgaggtggaaaacagtatttgaaagtagttgtacagggtatgtaaaaattataagaacatatttagcatttttagaaagcaaaatacttttgtaggacttaaacatatttttaaatgagatttttatcacacaaaagtttacaatatcatttgtacttggaaatgatatatagwtgttaagtgtgaagttgcatgtattaaaaagtaaaatgaaaaagctatgcattttgtaattaggtcttttttataatgtaagttgtcttttaactgttcggaccaacttgcattttcactttagaattgtagtttaagtgtgtctttgaaatttaaagcagaattttatgctctctcttttttaattctgtgtcttctgtggcatttataataggagagccatttccaatatttgtatttctttttagttatgaaaaagtgaccatcgtatgcctagattgtacctataatacagacctggctgggcgcattggctcatgcctgtaattccagcactttgggaggccgaggcagggtggatcacctgaggtccggagttcaagaccagcctggccaacatggtgaccccgtctctactaaaaatgcacaacttagccaggcgtggtggtgggcgcctgtaatcccaactactcgggaggctgggttaggagaattgcttgaacccaggaggtggaggttgcagca

SEQ ID NO: 721920 - DNA, 769 bp, Homo sapiens
tatgaaccgcatgataatcactcaatacatatattaattgcccgtttcttctccttgcacttcccctggtttctttcttcttttccttgtcattctgtcttgatccttttcttgatttttataaagaaaactttactgatacayatgtttgtcttctttgtgttgtttttgttttgggtttggttttttgggagggaacactgattcatctattagttgtgtgtgtttcgggagattaaccatccagataccaattagacccaagtcattgttgtcttaggttctaaggcttttaaatattataacatttttcagaaagattttattctctgcagactaaaaagctcagcagatttttccaataactgcacatataaagagccacataaacagtagactaaatatcacagatgatccacatgagagtaataaatgaggacactagtttgtccatacatttttcataaggtactgaaataactgaaaattgtcttaacgagtaacagtaaccatgaaacagcaagataattagagaatgaaggtaagcagcaatagcaaccacctgctgctacaagctgaggatcatgtagcctccttcctggacctttacacaatttatgttcccatctatttattgagatcagtaatcctcatacattattatagttgtgctacttggaagctgtggctggcacaattcatccttaatttcactttgagttattgagtaaagctattcaatgtgtaataagatcacaaatataaggta

SEQ ID NO: 721921 - DNA, 769 bp, Homo sapiens
tatgaaccgcatgataatcactcaatacatatattaattgcccgtttcttctccttgcacttcccctggtttctttcttcttttccttgtcattctgtcttgatccttttcttgatttttataaagaaaactttactgatacacatgtttgtcttctttgtgttgtttttgttttgggtttggttttttgggagggaacactgattcatctattagttgtgtgtgtttcgggagattaaccatccagataccaattagwcccaagtcattgttgtcttaggttctaaggcttttaaatattataacatttttcagaaagattttattctctgcagactaaaaagctcagcagatttttccaataactgcacatataaagagccacataaacagtagactaaatatcacagatgatccacatgagagtaataaatgaggacactagtttgtccatacatttttcataaggtactgaaataactgaaaattgtcttaacgagtaacagtaaccatgaaacagcaagataattagagaatgaaggtaagcagcaatagcaaccacctgctgctacaagctgaggatcatgtagcctccttcctggacctttacacaatttatgttcccatctatttattgagatcagtaatcctcatacattattatagttgtgctacttggaagctgtggctggcacaattcatccttaatttcactttgagttattgagtaaagctattcaatgtgtaataagatcacaaatataaggta

SEQ ID NO: 721922 - DNA, 626 bp, Homo sapiens
cccactggatggagatgaaacaatgtaagcatcaaaaagactaatgactgcaaaggactagacgatttacatatacatatatacacctgtaagttcttaacaatataaaatcaatctcactagacacggagatttctcaggtaccaactctttattctgaaaactgacctatgaagaggaacaatcaagcatttatcctgccttgcaaaacaaactctattttaaggataaccaaatagttgatcagggaaagatcttctgtaagaaaacttccaactacaaatagaaaggaaattacagaataagaaaattatcattttgcaactctaaaggattactacatgtagacaataatcgattgatgttaaaactgttaaaaaaaaaaaaaaaaaaaaagagtgaggagttcctgactcacagataagggtatgaagaaaaaaaaagagtgatgggaatatttataataaggctgacaacatctgagtctagtgatcaactttaacccctctaatagaggcatataatgtttaattgtctcacttyctatgaagcagtaggagaaatacagcaccaactgtgacaaattcctatttccccaagccatccccccaaaaaaaagtactgaa

SEQ ID NO: 721923 - DNA, 599 bp, Homo sapiens
ggggggggggggggtgagtgactacgtagcgcccctgagtctgtgataattgagtctgtgaagtgcggcgaggaggagcacctatggagtgcttagtgtggcgcgcgccatcggttacatctcggggttgatttggctggcakttcgcagacttgagcgcatcccagtcaccccagggcgtgtagtaacacagaaggccaggccctaccgccgtagtgtatgattccgtaaatttggggcagggccgataactttttcttttgtattaagtcccaggtgatgctcatgcttctggtgcgggagtcatgattgtgctgaaagtgggcacctgtgcgctcttatcacctgttcgctctcagcgttccttgaatgtaggacctgcccccgactcttaaatgcctcatttgcacctgtatgtgatttgctctgccttctggcttcttagatgcttcttaggtgaacttgtgaattaagagagacttccttaggagcactataggttaagagactaaactgtggtttctgggaaagcacactcgagtgagaaaaccatgaagaaacctaaggaagtgatgactacgaaagtcagggggtggtta

SEQ ID NO: 721924 - DNA, 599 bp, Homo sapiens
ggggggggggggggtgagtgactacgtagcgcccctgagtctgtgataattgagtctgtgaagtgcggcgaggaggagcacctatggagtgcttagtgtggcgcgcgccatcggttacatctcggggttgatttggctggcatttcgcagacttgagcgcatcccagtcaccccagggcgtgtagtaacacagaaggccaggccctaccgcygtagtgtatgattccgtaaatttggggcagggccgataactttttcttttgtattaagtcccaggtgatgctcatgcttctggtgcgggagtcatgattgtgctgaaagtgggcacctgtgcgctcttatcacctgttcgctctcagcgttccttgaatgtaggacctgcccccgactcttaaatgcctcatttgcacctgtatgtgatttgctctgccttctggcttcttagatgcttcttaggtgaacttgtgaattaagagagacttccttaggagcactataggttaagagactaaactgtggtttctgggaaagcacactcgagtgagaaaaccatgaagaaacctaaggaagtgatgactacgaaagtcagggggtggtta

SEQ ID NO: 721925 - DNA, 479 bp, Homo sapiens
  misc_feature 379, 380, 381, 382, 383, 384, 385, 386, 387, 388, 389, 390,391, 392, 393, 394, 395, 396, 397, 398, 399, 400, 401, 402,403, 404, 405, 406, 407, 408, 409, 410, 411, 412, 413, 414,415, 416, 417, 418, 419, 420, 421, 422, 423, 424, 425: n = A,T,C or G
  misc_feature 426, 427, 428, 429, 430, 431, 432, 433, 434, 435, 436, 437,438, 439, 440, 441, 442, 443, 444, 445, 446, 447, 448, 449,450, 451, 452, 453, 454, 455, 456, 457, 458, 459, 460, 461,462, 463, 464, 465, 466, 467, 468, 469, 470, 471, 472: n = A,T,C or G
  misc_feature 473, 474, 475, 476, 477, 478: n = A,T,C or G
accatgttggccaggatggtctccatctcttgacctcgtgatccgcccgcctcagcctcccaatgtgatgggattataggcgtgagccaccgcgcctagccttttatgtttttagtaaagatggggtttcatcatgttggccaggctggtctcgaactcctgacctcaagtgatccgcccgcctcagcctcccaaagtgctaggattacaggcatgagccaccgtgccctgcctccttttattttaaaaaaagattaactaaaatttcaagatattctataccaaaattttatcyaaaaataacaacatctttgagaaagcactctaatttgagacagaagcagttagaaaatcaaaaactttcatgaattaccttccnnnnnnnnnnnnnnnnnnnnnnnnnnnnnnnnnnnnnnnnnnnnnnnnnnnnnnnnnnnnnnnnnnnnnnnnnnnnnnnnnnnnnnnnnnnnnnnnnnnnt

SEQ ID NO: 721926 - DNA, 801 bp, Homo sapiens
tttttgtggtagttaaatcaaattgttattttagcacttgtttgagcctctataaaaacacaaattaaaatgcataaggcatgtcacacaggcttaccaggggggaatggaggagcctggtggccacctcctggtgaccagccaccacgcacaaatagcaaaggagattcagcttggctcgggaggcccccatgctcttctcagtggagtcgatctgcgagcacacttgttgcaaaaagtcattccaatcttgatctttcagaaataataacttatccactgcgatggaaagaaaatamtaaaagtacatatgatgagaaaaagaactgctggaaacattacataagaaataaacacagaattacgacagctaagatgaggacaaacattacactgtcaaaaccaaaaatactccaaagatgacactatttttattcgtccttctatattcctaatctctttatctatccacggaaactttttaaccacttcaatggaaaactatactttcaaataaagcagatgtctaaagcagaactgtcccacaacctacactataacaaaatgcaaagttcaatacaactggagtaaaagacaaaagagcctttgtataaataaatcaactctcaaatattgagaaaagcacaaatcctacagttcttaaaaagttccaataaaattattgtaaaaaaaataacgagaataacatgatagctaaaaatcacctgaaattcctacctccaaatccctatacaaaaaaaaggcaaaatctaggaaatgtgataccccctaaaattaaca

SEQ ID NO: 721927 - DNA, 1079 bp, Homo sapiens
aatatatacatcatacttgcttcagtggagaatggatggaggggagcaatggagaactgaggggaccagttagcaggttactgcaaagcctggatggaaaggatggtgtcttgagtgaggaagggggcagaaggaaagaaaagaagtcaatgatagagcaaagggctggatatccctgctgatttaacactgaggaggaactgctagtaaattatattggtccgtaaagtaagacatcaatatttgaaagaggtggccaaattatctttacgtatagataatataactgaacatccaaaaagccaaaattaatcaatgggaaaactcttagaaataacgtaagaattaggccaggcatggtggctcacacctgcaatcccagcactttgggaggtccaggtgggcggatcacctgtggccaggaattcgagaccagtctggccaaaatggtgaaaccccatctgtcctaaaaatacaaaaattagctgggtgtggtggcgggtgcctgtggtcccagctactcaagaggctgaggcaggagaatcacttgaacccgggaggcagaggcgcaatgagccaagatcacaccgctgcactccagtctgggcaaacagagcgagactctgtctcaaagaaaaaaaaaaaaaaatgtaagatgagtaaggtggaccaattaaaaaattgtatgcaaaaattartttcctacaggtaaactgaatgtatgcacgaatgccatataacaaatatcccactcacaacagcaaaaatatataaaataaaatgttcaggaataaactaaatgatcaataattgcaatcagatcataatcattaaatgaaaataattgttataaaattatattcccttgtttcaaaatgaacacatatgtataaaaccagaagcagtaatatcaaaatgtatgagacatatgaggttacaatgaacacaatcatgccaatatcaaaatgtatgagacgtatgaggttacagtgaactacaattgtgccactgcactccagcctgggcaaaaggcttttaaaaaaaaaaaaaaaaaaagtaatcagtgtttacccgggaat

SEQ ID NO: 721928 - DNA, 1958 bp, Homo sapiens
  misc_feature 1269, 1270, 1271, 1272, 1273, 1274, 1275, 1276, 1277, 1278,1279, 1280, 1281, 1282, 1283, 1284, 1285, 1286, 1287, 1288,1289, 1290, 1291, 1292, 1293, 1294, 1295, 1296, 1297, 1298,1299, 1300, 1301, 1302, 1303, 1304, 1305, 1306, 1307: n = A,T,C or G
  misc_feature 1308, 1309, 1310, 1311, 1312, 1313, 1314, 1315, 1316, 1317,1318, 1319, 1320, 1321, 1322, 1323, 1324, 1325, 1326, 1327,1328, 1329, 1330, 1331, 1332, 1333, 1334, 1335, 1336, 1337,1338, 1339, 1340, 1341, 1342, 1343, 1344, 1345, 1346: n = A,T,C or G
  misc_feature 1347, 1348, 1349, 1350, 1351, 1352, 1353, 1354, 1355, 1356,1357, 1358, 1359, 1360, 1361, 1362, 1363, 1364, 1365, 1366,1367, 1368: n = A,T,C or G
taactgtaaaacatgcctacgtttgtaactgcacgtcacccaccaaaacaaaataaaaccccaaatacctcttcccttcatcatagtaattcatattcaacttttcaatgccagcagaaactttacttttactgaatttggctgttgtattaatatttaatttttgtaggtatatagtatgtgtgtgtattaatatttatggggcacatgagatagttggtacaggcatgcagtgtgtaataagcacatcagggtaaatggggtatccatttcctcaagcrtttatcctttgtgttacaatccaattatattcttttagttattttaaaatgtacagttattattgactttagctacttgttgtactatcaaatactagtttttattcattcttactatttatttgtacccattaaccatccccactcccccaccacctccccactatccttcccaacctctggtagccattcttctgttctctatctccatgattccaattgttttaattttcagctcccacaaatgagtgaggacatgcgatgtttgtctttctgtgcctggcttatttcacttaacataatgacctccagttccaactgtgttgttgcaaatgacaaaatctcttttttatggctgaatagtactccattgtgtatatgtatcatattttctttatccattcatctgttgatggattggctgttgtaatcttgaccctttaaaaaaaagtttatttctggcacttagatggtagagaagtaactgggaccttggaagaatatagcaatgggattctcaatgtgcctgactttggccttttatttcatcaatggcgcgtgctaagggttgtgattatctgttaaggaaaggcatagtcttttttgccatgcagtactttgcagaatgtgacctgactgcacaacagtaaacgatactatactttgcataatgtgatttaagtgcacagttttggggtatttaccattagtatttatagctgttagggttattatcctttcatcttacctgcttgcttctcaccattcatccatagggagcaggcactttcctgaatctgtctctggtgcttgggcatagacttctgttgcagtgctcgggccactgtatttactcacatgtgtgttccttgaccaggctgtcagcgtttactgtcttgatcattttttaatgttcgtatctgtcagcgtggaacctctcaggggcactctgtgatggtagggggttgaaatgggtgattttaatcannnnnnnnnnnnnnnnnnnnnnnnnnnnnnnnnnnnnnnnnnnnnnnnnnnnnnnnnnnnnnnnnnnnnnnnnnnnnnnnnnnnnnnnnnnnnnnnnnnncctcccgaagtgttgggattacaggcaggagccactgagcccagcctggaaactatattctatattagataatttactttttgaatttggtgtatttaggaaacaagcaggttcccccaacctctgcaatttactgtcaaggaaggacactgggtgataatgacttgggtttgaaatagctgtgtcactttatagcgtaggcttcttggaccatacctagcttaaaaaatatatatatttttaagctgggtgtggtggctcacacctgtaatcccagcactttgggttcgagaccagcctgaccaacatggggaaaccccgtctctactaaaaatactaaaattagctgggcgtggtagtgcacacctgtaattccagctactcaggaggctgaggcaggagaaccgcttgaaccggggaggcagaggttgcagtaagccgggatcatgccattgcaccccagcctgggtgacaagagtgggactccatctcaaaaaaaaaaaaaaatatatatatatatatatatgtgtatatatgtatatatgtgtatatatatgtatgtgtatatatatgtgtgtgtatatatatgt

SEQ ID NO: 721929 - DNA, 1281 bp, Homo sapiens
atttttgtattttcagtagacacggggtttcaccatgttggccaggctgggcttgaactcctgacctcaggtgatccacctgcctcagcctcccaaagtgctgggattacaggcatgagccaccgcacccggccagagaaattctcttttatttgaagtgttcattacataggtctgtctgtattccagcctactcaggtctctcctgggacaaaagaaaggcataaagctaaggtaaaaatctgtgtgtcggacactcacacaacactacattcccttatacacacacacacatgcacgcacgcgcctagaagaggacaagcctctgacgcacttctggagaaaatgttcaaagaatgtgtaaaaactttctacgttttttaatcatttccgctctagcagctaaacacaccatgtgagagaaattttcatcctgtgggagctgagaacctggtgggtgaatcattcgtgtaaattatgaattaccactttcagcaatttgagaggctgatttgtcaccaacattatgagatgctcctatattgttcaattcctataaaataaataaaagcatttctttgcatatagagtgtgaaaacaagaggtacttataaacagtaaagagtaaatacacatatttgaacacaatattactttgtattgttatgttaccgagcttccccattgcctattccagggagcgtaaatacctctgatctgcataatcttgcatgaggaagctgcatcatgcttgcatgagaaagctgttccatgtctgcacacgtgcagacatagcagagactctgcttgatggggactatgagttaacgtagacttctgaatcttagtatgtgtatgcctaagaacgtcacttaaaggttctaaatgcttcattagaacatagaccctcctctaaagagraacatggattcctctgccttgttccttctggagcactgctacccagtggaactttgtcccatgatgggtgtgtcccaagtgtgcccatccactatggcagccatgagttccatgtggatcctgagcacttgagaggtggccagagccaccgaggatctgagcttttcattctagttaattctaacttaaatgaccacagagggacaggggtttccacacaggaaaacacagtacagagtttaccggcatgcaacattagtgtattcgtccattctcacactgatgataaagacatactcgagactgggtaatttaaaaagaaaaaaaggttttgtttgtttgtttgtttgtttgttttca

SEQ ID NO: 721930 - DNA, 860 bp, Homo sapiens
tcacacccagaatgcctcactgcaagggaccctgggaaatgcagttcttagatgctcactagaaaggctgaagaaccctaagcccaccagccctcagtgtgcaggatttagacacacaatcaacagaaatacagaaatgcccgttttagcacctcatgtaaaccctacacttttacatttcatgtcaatcctctagataatctttttgttgttattgaggcggagtcttgctctgttgcccaggctggcatggagtggtgtgatcttggctcactgcaccctctgcctcctgggttctggtgattctcctgactcatcctgggattacaggtgcatgccactacacctggctaatttttgtatttttagtacagacagggtttcaacatattggccaggctggtctcgaactcctgacctcaagatatccatctgccttggcctcttaaagtgctgggattataggtgtgagccaccatgcctggcctctaggtaaccttttatttgaagttgagatttgccttgattagtacaatggttcttgccctcactgggcgtcagattcacatggataacttaagaagtacagaagaccsggtcccaaatcccagagagcctgattcactcagtctgggcaggcccaggtcatccctggataattcccataaggacccggaatgaggaacactgggttagacaacaccgcagtcacccagtatcctctgcctcccgaaagctgtagaacctcgtagactttgtagaagactctcattgagctcaggactgaattgccgaaaatacataacacatcgtaaaaaaagatctgagaaatgctccgaaggctggaacaacacatgctc

SEQ ID NO: 721931 - DNA, 655 bp, Homo sapiens
ttcaggatctttatatccatctcaagaatggagttgactcagtggataatcataagaaatagactaatggataatacttatactttaaagcctacattgaaagcattcatattcataaagaaactgttcttaagaagttgagtcctgattggagtatcagatgctaccattaacatgggaactattattaatacagcattaatacatataatattaaattttttcaagtggtgagtaagtaaacagggtgcactcatacatagcttttgtcacagtatgtartcacattctcagatgatctgtattaacatacttatttaaatcgcaaagtaaagtgagactttctctgacagaaagtttcatgtggctgattggtttgacaacaggaccagctttggaaattagctcatatgtttcacattttcgataagctcaaagctaaatatatagttctaagatacttataaaaataacttaaagcatgtgaaaaggcaaaataactttatcaacagtaactgtaatcggcagggacgctaaaatgagcattttccaaatcctttttagtatattgacttaaacaaggtgcctctaagtgaaaggatggttaagtttaaatagtcatttgataagtcttggtacagcttttttggtataa

SEQ ID NO: 721932 - DNA, 1359 bp, Homo sapiens
agaacgactgaggctgaaaagccctagatctatgggaggagattgtgtgtaagacagttacatccttcacttcgaggaaaagccagtgcccttcttcttgtcccttcttggattcaggcctgaatagactgggaagtttctccattatctctttgccttcttttattcccccatttgtatgtttttttttcctaaaaatgaaagaggactaatatgcataatcttattacaaaacaccccatttacagataaggaaactggggctgaaagaagtttcaaatctctctgaatgttgtcttcttggtatagggaagggttagagtgttattaatattatagcattacattctagtgttaacctgttaagttcctttttgtcttcaagtgcattctagtcaataagagattttcacgctgggcatggtggctcacgcctgtaatcccaacactttgggaggccagtgtggatttatcacttgagcccaggagtttgagaccagcctcagcaacatagtgaaaccccatctctacaaaacagttagcggggcatagtggtgtgcacttgtagtccagctacttgggaatttgaggtgggaggatcacctgagcccaggaagttaaggcttcagtgagccatgatcatcccactgcattccaccctgggtgacagagtgagatcctgtctctaaaaaataaaaaaagaagagagattttcaaattatagggaatggacttgtgtgctctcttacctcagaatacattgtaggagctgtacattttcctgtgtgcacccatctacaatctgtccattcaccttaggtgccctttcaccrtagctccttccagccgggatacccgaagagggcaaaacatcagatccttagaatgtgcaaacttctgtgctaccatatcagagagccctttgcaaagacaaatacttacaagtaaagaaatgcatcttttatttttttgaaagtccgtcggcttgatggcatgagagttgtctgaaataattcaaaacagaggtaaacttagaagagtgagtttcacttccgaggaggattgcttgtaatcaccctgcttacttaccttcttctattctgaagcagtctgcagtagttgggaaaagtgtaatcttaagaaattcagtaacagtcactggctcattgtacctggtaagttttccccgtgccgtggtgcccacggtttttggtaatgcatggagataatttcggacgtctgcttctcttaactcctgagcacttttgcttctcactgtagaattccagagacacatgggtatggaacttgatctaaaagcctcctagtaatagttgcagattagattgaaagccaaac

SEQ ID NO: 721933 - DNA, 632 bp, Homo sapiens
ttgmttctcttgagacttacagcatgcatgtgtgggtatgagcagacaagcagacttacctttggagggtgaagacccagacaaactgaagaaacggattcctgaggatgatcaaatacaaatcatttttccagaatcactcaatattgccacatcccaaactaattctagactaatctttagaaagaagtaagctccttaagaaatcctactatgaatgttttttcttcttatggaataacacaagaagaggtacaatgcagactcttaattttgctgtaataattcacttttgtatttaataattgtacttctgtgtgagtgtgtcactgagctatttgtaccaattttcaattgatcattctgagaggggccttgagaatttctgtgtatgtgtatgtatatctgtatttatgtgtagtcagaaaaaaaaaagaataggagactaatgaggtgagggaaaaagtgatcaatgtagaaaagtgagtgctcctagtgtacctatttatgttatgttaggtggctgctgcctgtagcccttgaggaatagctgattgcactattcaaaaataaaagcccagcactgttaaatttaggaccgtgtttcaagaaacaggaaagctttatctttt

SEQ ID NO: 721934 - DNA, 1629 bp, Homo sapiens
gcagaatctccaactctccctgccctgagaaaagggactctattttctgtcagacagtaaggattggagaccgtatttgctctcgtgcttgagagcccacatcattattgggttaacagtcatagctagagaattcagtctgtgtatttwttttattagtgttattttccctttctcgtaatgtaacaatttttataaatgtttcatgggctatgaaagaagggcatttttcattttcatgccactgctttagcaatgtatagatacaatcaatattatggattgtgatttaggtgggtgttctatatatttacagtcaattaaaaaccattgaagagcttttcattgatttcattaatttctattatcttaataattctatattcaggcagggctactttagctatttgtgtgtatgtgtgtttccgtgtgtgtaaatgtataaatacatatacatgtgtgtgtgtgcatatacatataaaatcaaaggcatacctagacctaaacaaaatattctgttctcatgatgtaattaatctcataagcaagataccattctctgtgtgacacagtttttttttctagttagaattcacattcactaaatgtttaacactctcttgatttcactttaaaaatagaacatcaggctcacatatggctgctctctacactagaactaccctcaggggtgcacaaattgaatacactcagtatttttctcctggagttttttaaaaactccatttatttccttaaacttttgagacaacagggctgatgttttctgtaatgaagttagctaaatgagctttttattgaaatttattcaataagattcattcttcatgtgtcaatcagatatcacgattaccatgctcaaatccaaattcaaatttttgttttatgagatttcctacacttctggagacttgaattctggtcttctctaacagtcattatctatttatctttaaataaataacttctgtacactgtggattgctttatttatactttggtaatagttttctgctcaatttgacccagagataggctcaggtagtaatattaagggcttctgaaaaatatcaattactatacatatatgagtaatggtggtagtataatttacacattagacagcaaagcaaatcaacaaaaactaaattaaatagggcaaaaagatgctgtggtacgaaattttctggataattttagttttagatcatgttgttaatttataattgagaatttgataaattagttcaatcttcattaccaaccatttgaaacactggctgatatcatggccaggtaaattgtgtcctttttttattaaacgtagttgactgaacacttgcttttcacacattgaattgggtcctggcaatacttggatgaatcaaattgtttccatatccttgagaaactgccagtgcaggcaaaatagggtaacagatgtaataataaatgcatgcacagcatagattggagcaaatggaagcactgacaaactcttcttttttaaaaaaaataattttcatttttttgctgatccataatgtggtacatatttcggaggtacgtgtgatagtttgatgcatgtatataagatttaatgctcca

SEQ ID NO: 721935 - DNA, 1629 bp, Homo sapiens
gcagaatctccaactctccctgccctgagaaaagggactctattttctgtcagacagtaaggattggagaccgtatttgctctcgtgcttgagagcccacatcattattgggttaacagtcatagctagagaattcagtctgtgtattttttttattagtgttattttccctttctcgtaatgtaacaatttttataaatgtttcatgggctatgaaagaagggcatttttcattttcatgccactgctttagcaatgtatagatacaatcaatattatggattgtgatttaggtgggtgttctatatatttacagtcaattaaaaaccattgaagagcttttcattgatttcattaatttctattatcttaataattctatattcaggcagggctactttagctatytgtgtgtatgtgtgtttccgtgtgtgtaaatgtataaatacatatacatgtgtgtgtgtgcatatacatataaaatcaaaggcatacctagacctaaacaaaatattctgttctcatgatgtaattaatctcataagcaagataccattctctgtgtgacacagtttttttttctagttagaattcacattcactaaatgtttaacactctcttgatttcactttaaaaatagaacatcaggctcacatatggctgctctctacactagaactaccctcaggggtgcacaaattgaatacactcagtatttttctcctggagttttttaaaaactccatttatttccttaaacttttgagacaacagggctgatgttttctgtaatgaagttagctaaatgagctttttattgaaatttattcaataagattcattcttcatgtgtcaatcagatatcacgattaccatgctcaaatccaaattcaaatttttgttttatgagatttcctacacttctggagacttgaattctggtcttctctaacagtcattatctatttatctttaaataaataacttctgtacactgtggattgctttatttatactttggtaatagttttctgctcaatttgacccagagataggctcaggtagtaatattaagggcttctgaaaaatatcaattactatacatatatgagtaatggtggtagtataatttacacattagacagcaaagcaaatcaacaaaaactaaattaaatagggcaaaaagatgctgtggtacgaaattttctggataattttagttttagatcatgttgttaatttataattgagaatttgataaattagttcaatcttcattaccaaccatttgaaacactggctgatatcatggccaggtaaattgtgtcctttttttattaaacgtagttgactgaacacttgcttttcacacattgaattgggtcctggcaatacttggatgaatcaaattgtttccatatccttgagaaactgccagtgcaggcaaaatagggtaacagatgtaataataaatgcatgcacagcatagattggagcaaatggaagcactgacaaactcttcttttttaaaaaaaataattttcatttttttgctgatccataatgtggtacatatttcggaggtacgtgtgatagtttgatgcatgtatataagatttaatgctcca

SEQ ID NO: 721936 - DNA, 1629 bp, Homo sapiens
gcagaatctccaactctccctgccctgagaaaagggactctattttctgtcagacagtaaggattggagaccgtatttgctctcgtgcttgagagcccacatcattattgggttaacagtcatagctagagaattcagtctgtgtattttttttattagtgttattttccctttctcgtaatgtaacaatttttataaatgtttcatgggctatgaaagaagggcatttttcattttcatgccactgctttagcaatgtatagatacaatcaatattatggattgtgatttaggtgggtgttctatatatttacagtcaattaaaaaccattgaagagcttttcattgatttcattaatttctattatcttaataattctatattcaggcagggctactttagctatttgtgtgtatgtgtgtttccgtgtgtgtaaatgtataaatacatatacatgtgtgtgtgtgcatatacatataaaatcaaaggcatacctagacctaaacaaaatattctgttctcatgatgtaattaatctcataagcaagataccattctctgtgtgacacagtttttttttctagttagaattcacattcactaaatgtttaacactctcttgatttcactttaaaaatagaacatcaggctcacatatggctgctctctacactagaactaccctcaggggtgcacaaattgaatacactcagtatttttctcctggagttttttaaaaactccatttatttccttaaacttttgagacaacagggctgatgttttctgtaatgaagttagctaaatgagctttttattgaaatttattcaataagattcattcttcatgtgtcaatcagatatcacgattaccatgctcaaatccaaattcaaatttttgttttatgagatttcctacacttctggagacttgaattctggtcttctctaacagtcattatctatttatctttaaataaataacttctgtacactgtggattgctttatttatactttggtaatagttttctgctcaatttgacccagagataggctcaggtagtaatattaagggcttctgaaaaatatcaattactatacatatatgagtaatggtggtagtataatttacacattagacagcaaagcaaatcaacaaaaactaaattaaatagggcaaaaagatgctgtggtacgaaattttctggataattttagttttagatcatgttgttaatttataattgagaatttgataaattagttcaatcttcattaccaaccatttgaaacactggctgatatcatggccaggtaaattgtgtcctttttttattaaacgtagttgactgaacacttgcttttcacacattgaattgggtcctggcaatacttggatgaatcaaattgtttccatatccttgagaaactgccagtgcaggcaaaatagggtaacagatgtaataataaatgcatgcacagcatagattggagcaaatggaagcactgacaaactcttcttttttaaaaaaaataattttcatttttttgctgatccataatgtggtacatatttyggaggtacgtgtgatagtttgatgcatgtatataagatttaatgctcca

SEQ ID NO: 721937 - DNA, 1169 bp, Homo sapiens
ataaacatttgattaactgaactgtcgtgcctttagaaggacctttaccctttagccaccaccctaagagaccgggagacctctttgtacccactgcccatggggtacacaggctataacagagaaaaatattggttttatttctagatatccaaagcatcttcaggcttgctgtagagaaaatagtttgacacttttaaaagtactcaggttcaaaaactgaagttctagcagaagcaatagttttcaaggaatatatgccaagccagtttatccctctacttgtggacgagagaaagtcgtggaagtttgggggtaagagtgtgtcaggcagaattctaaagaaacacacacatgtgcacrcacacacatacccccaaggtttcctgttgcttggttattcaatcaactgctaacccaggtactgcagtgaaggaactttgcagaaagaattaagattactaatgagctgactttaagacagggaaattatgagggtaggcctaatgtaatcacccgagtccttaaaagcagaagaggaaggccagaagagttactgagagagatgcattggaagaggaaggcaaaaaagacgaggcagaagggaaggttagagagattcaaaccatgagaaggactcaacccaccattgctagctttgcagatggaggaagagagccatggaccaaggaacatggacagcctctagaagctgagaatgacctgccgctgacagccagctaacagatctcagtcccacaatggcaagaaactgccaaccacctggtgagctcggaagtgggccttggttttgaccctatgccacctgacacagagatgtcagcagagtcaagctggacttctgacctagagaactgtgagataataaacttgtagtattttgtgctgcaaaatgtgtggtaatttgttatggaagcaatagaaaactaacacaaagactaacagatgcctcttgtgggcttctaagaaggaagcagtactcttctttcccaatccacactaagtcaagcccaggtggataggggatgaatccttaggtaacaaacaccaggtaagttcaggcagatgcctgtgcctgggaaatccaggaaagtagcagctctgagaaaagctcagcacccagcaggggcctgagggatggaggagct

SEQ ID NO: 721938 - DNA, 1977 bp, Homo sapiens
gcaagagattttcaagcaaatgttcttcaaaattcaaaaattttgcatgttttaaacaaggatttttatttccaatacatacaaactcccagtcactcttatttggaaacaattaggaaaagtgagaatttgggattacaaatagaaaaggaaaataattagccaaggaggagcagcaatttctgtggtaaaccctgggtacaaataaaggaacctaaggatttttttttaattcctagcatgtaaattattttgcctctctgggatcatggtgagtcctaggagcctagagttgaacatgaggtgtactacctcagaagtcaaaaactccaagtcatgaattagaagggaactgaacatctggaaatcaagtcagattgggggagaagggagcctcttagtatgcatgtcatcgccaataaagcaacatgaatttgaaagtgttttggtaaaattaggaaagagtacttattgaggaaggaatgataaatggaaatcaatactcgcatatacattattaatttaagatgggtaaaatgctattagcatcatttagtgagcaattttttaaaaggtaaaaatgttcctacaaacttcaataagtttaccccatatcttacccctaacactcttccaccctaatgtcttttagctcctcagacaagaactcagaattcttaccctattttgtgtgtgtgtgccacagacctcttttgtagtctcttgaagcctaaggacctccttctcagaattatgtgtgaaatgtataagatcaaatacataagattacaaatgaagtgaattatatgaaagattctcctatccagagagatgttggggagtccatggacccaacttaagaacatctgattgaggaatgattcttctaggatgatgaaagttttttcttacaggaaacagcatatgcagaaaagtttttaaagcctaaagatgcgcagtgaaaaatcctgctcacaatcaatcagtgaagaaaagaatgagctgcaaagagaagcctgaccttgaacttctgccaaaactcaaagctattcatgctgttgctttaaagccctacattaaggaattactcagaaaattttcttggccccagccctgtagacacagcatattctgtggcctgatggcagatraaataaagcagcattggagaagggaaaactatattgagtcctgagcttgcatcctagtcctctaactagttctctgccactaactagctctgttaccttggtcaagaaactcaactctgaactgagctgtctataaattgagaaggttaagttaaatcatcttcaagagtttcttcctactctgaactgttaggatcctaaggtaatgcacaaccacttttctgggaggaaacattagcaagacttctttttgccctaagctcacagtatgaaaatattttataaataatttttagtcttcagaaataacttatgagaatcacctaaccatataactttagacttggaagagattttaagagacatccaccatctcatcaatctcaggtgataaaagtaaggttcagaaaggtgaatagatttatttttagtcacataataagatggcattaatggactgttggcctaccactacctagcacaagcaggattttagtatttagcattggtagtaaagacaagctcatcagttcacttgagagacagaaagaaacctcaaataacctaagccataggatgggaactacacaaagcagcaggtgactggggtaattgcacctagaggtagcatcctatacctcaggcagagtcaaagccggggccctcattatacactataaccttcccatctcaaagaacagtaaataacagctagagaacaaagaatagttatttcaaaataggtggatggatgaattaaccctgactaataacatcattaaaaccaaagcacaagtttggggctgctaatataatattgaaaggt

SEQ ID NO: 721939 - DNA, 1977 bp, Homo sapiens
gcaagagattttcaagcaaatgttcttcaaaattcaaaaattttgcatgttttaaacaaggatttttatttccaatacatacaaactcccagtcactcttatttggaaacaattaggaaaagtgagaatttgggattacaaatagaaaaggaaaataattagccaaggaggagcagcaatttctgtggtaaaccctgggtacaaataaaggaacctaaggatttttttttaattcctagcatgtaaattattttgcctctctgggatcatggtgagtcctaggagcctagagttgaacatgaggtgtactacctcagaagtcaaaaactccaagtcatgaattagaagggaactgaacatctggaaatcaagtcagattgggggagaagggagcctcttagtatgcatgtcatcgccaataaagcaacatgaatttgaaagtgttttggtaaaattaggaaagagtacttattgaggaaggaatgataaatggaaatcaatactcgcatatacattattaatttaagatgggtaaaatgctattagcatcatttagtgagcaattttttaaaaggtaaaaatgttcctacaaacttcaataagtttaccccatatcttacccctaacactcttccaccctaatgtcttttagctcctcagacaagaactcagaattcttaccctattttgtgtgtgtgtgccacagacctcttttgtagtctcttgaagcctaaggacctccttctcagaattatgtgtgaaatgtataagatcaaatacataagattacaaatgaagtgaattatatgaaagattctcctatccagagagatgttggggagtccatggacccaacttaagaacatctgattgaggaatgattcttctaggatgatgaaagttttttcttacaggaaacagcatatgcagaaaagtttttaaagcctaaagatgcgcagtgaaaaatcctgctcacaatcaatcagtgaagaaaagaatgagctgcaaagagaagcctgaccttgaacttctgccaaaactcaaagctattcatgctgttgctttaaagccctacattaaggaattactcagaaaattttcttggccccagccctgtagacacagcatattctgtggcctgatggcagatgaaataaagcagcaytggagaagggaaaactatattgagtcctgagcttgcatcctagtcctctaactagttctctgccactaactagctctgttaccttggtcaagaaactcaactctgaactgagctgtctataaattgagaaggttaagttaaatcatcttcaagagtttcttcctactctgaactgttaggatcctaaggtaatgcacaaccacttttctgggaggaaacattagcaagacttctttttgccctaagctcacagtatgaaaatattttataaataatttttagtcttcagaaataacttatgagaatcacctaaccatataactttagacttggaagagattttaagagacatccaccatctcatcaatctcaggtgataaaagtaaggttcagaaaggtgaatagatttatttttagtcacataataagatggcattaatggactgttggcctaccactacctagcacaagcaggattttagtatttagcattggtagtaaagacaagctcatcagttcacttgagagacagaaagaaacctcaaataacctaagccataggatgggaactacacaaagcagcaggtgactggggtaattgcacctagaggtagcatcctatacctcaggcagagtcaaagccggggccctcattatacactataaccttcccatctcaaagaacagtaaataacagctagagaacaaagaatagttatttcaaaataggtggatggatgaattaaccctgactaataacatcattaaaaccaaagcacaagtttggggctgctaatataatattgaaaggt

SEQ ID NO: 721940 - DNA, 644 bp, Homo sapiens
gacaactagggactcctcctgcaccctacagcccaccaaattaatcaaaatatctcattttaaacctacttggcttgcgtgctttccattgtccattcctcccaacaaaaactccagtcaaggccctgccctcagctctcctctctgcctgctcatctcatgcagatacttcccaggcatagtgtgctgggccttctatttttaggagaccgtgagaataatgcaaatgcctttattaaccacaatcacgttcgtgcctgtgtgccttatcaaacttaattaaaacaaatcctgggtaccataaaasaaatctgtataaaaacattaaaaagtatgaaaccattaagatataaagagttaatcatcaattatccagaaagtttgcttcactagaaaactcattgccagataatgtcacataaaggaggtactacagtttcctgagttcttgtcaaaaattgaacataaaacgtaaaaaagaaattaaagataatcagacctaagagcttaaaaacacagtagattgttcactggcctacactgtaaaactagaaaatctggagatctcatttaaaataatgaccagcctcacagggattttacttgtaatgaagacttaatgtatctgaaacattttaaaactt

SEQ ID NO: 721941 - DNA, 1259 bp, Homo sapiens
actatcttacttctgggaaactctctaagatggctgttttgtaggaatcactctaggagtttgaatatgatgagaccttattgtttgaaaatcatggaacttccccgttggggttaaagtccacgcttggttcttctatagaacataggagggataagaacagatcattgtgccagagatccacacttgtcatctgtggcagaacacagttacctgacctctgttaaagaaaatgggatatgtagtctacccacgttcacagaaaacacacacacacacacacacacacacacacacgaaacaaaaacaaacaagcaaacaaaacttagcccatttctgcaacaagttgtttccaaaggcttagagtgaaatgtttattatacrtaaaaaatagctctagataatgaggccacattttaaaagaaacatgttaatgaatattattcataaaaatcactaccatgggaagatatacattcattttaatattacatcaattactcaaacaatttaagatttccttttcgtttttaccttttgggtagcttgtaataccacacgaagtaattactattactatatgataataactcaaaacagccaaaatttccctgttatacagaaacagaaatattacctaacttaatggaaaatagtgaggttaattaaaaactatttttcattaacagttcttcatgtgcttctactgctttcatgttcagtaaaagacttcatgtgttgaaaataactttgtaaaagaaagtttggaaataaattttataaaaagttagccgagttttgtcattaaatcagtctattatttgaagaaaagaaagggctttgaaataacaggttcttctcctaccttattgggggacctgaatcagattgatttttattttttggtaaaatgaccaaagataacagataattccaaacttagtagacaagactgaacactgaccacacattttctatatacccttacccaaaacttatcaaagaaaaacttagtttatatccaaagttatctgtaacattatatagagtatgtaaaaatgactaaactccgcaattcaaagaaaagtactagacttttcgataacttgcccttgttatttcagctagaaataaagccaatctatagggccatcattattgtaaaaaaaaaaaccagatagcaccaaaagaagaacaaaaacaaaggaattatgccaaaacttttcagagaaaagggatgataacaatggcagatttgc

SEQ ID NO: 721942 - DNA, 1101 bp, Homo sapiens
ttatataaaataccacatcattttatataaaagactttgagcatccatggattttggtgtgtgcaaggggccctggaaccaattccacaaaaaatacacagggacaactttatataaataaaaatttagtagatttaaataaattatagcacaaaaagtactagccataatagacaaatctgctggatcccataactatcaaattcaaaccaaggagccaggcacggtggctcaggcttgtaatcccagcactttgggaggacaagggaggtgaatcccctgaggtcaagagttcaagaccaacctggccaacatggttaaaccccatctctactaaaaatacaaaaattagccaggcgtggtggtgcagcctgtagtcccagctactgaggaggctgaggcaggagaatcacttgaattggggaggtggagtttgcagtgagccgagattaccactgcactgcagcctaggtgacagagcaagactctgtctcaaaaaaaaggaaaawaaattcggatcaaggtaatttgatttcaacacctatgaaaattaaccactgagcttatagtacttacagtagctagattaattatagaccacactgactgttgcacagctacctcaaatacacaaagagcacattttttttttcctgtggttaatggcaaatttctgtggttaatagcagtggctataaatgggaagactgtcatcttatttttctgaattattttctttccacttggaatgtagcttgataatgttttcagtctacatcacattgtctagagaaaaacaaatgtggaatattctgggtttatttatattagaaaaaatagccattgacccaataacataagtcaagcaacaagctcatttacttaaaataaatatattctctcctcatttgtcttcagctgctttcttgtacctgttctgcttactgcatatacccctagcagcacttggatggtttgtgaggagaaaattattccgtgtaagtggtacattctaagttaattatccactaatgtctgaataaccttcttaatttgtgaaattatatttaaaaattatctagtgtctccattatttttctt

SEQ ID NO: 721943 - DNA, 1101 bp, Homo sapiens
ttatataaaataccacatcattttatataaaagactttgagcatccatggattttggtgtgtgcaaggggccctggaaccaattccacaaaaaatacacagggacaactttatataaataaaaatttagtagatttaaataaattatagcacaaaaagtactagccataatagacaaatctgctggatcccataactatcaaattcaaaccaaggagccaggcacggtggctcaggcttgtaatcccagcactttgggaggacaagggaggtgaatcccctgaggtcaagagttcaagaccaacctggccaacatggttaaaccccatctctactaaaaatacaaaaattagccaggcgtggtggtgcagcctgtagtcccagctactgaggaggctgaggcaggagaatcacttgaattggggaggtggagtttgcagtgagccgagattaccactgcactgcagcctaggtgacagagcaagactctgtctcaaaaaaaaggaaaataaattcggatcaaggtaatttgatttcaacacctatgaaaattaaccactgagcttatagtacttacagtagctagattaattatagaccacactgactgttgcacagctacctcaaatacacaaagagcacattttttttttcctgtggttaatggcaaatttctgtggttaatagcagtggctataaatgggaagactgtcatcttatttttctgaattattttctttccacttggaatgtagcttgataatgttttcagtctacatcacattgtctagagaaaaacaaatgtggaatattctgggtttatttatattagaaaaaatagccattgacccaataacataagtcaagcaacaagctcatttacttaaaataaatatattmtctcctcatttgtcttcagctgctttcttgtacctgttctgcttactgcatatacccctagcagcacttggatggtttgtgaggagaaaattattccgtgtaagtggtacattctaagttaattatccactaatgtctgaataaccttcttaatttgtgaaattatatttaaaaattatctagtgtctccattatttttctt

SEQ ID NO: 721944 - DNA, 844 bp, Homo sapiens
tttctttttttggattctatacaactctgttcctctgttagtacatttcctcacacatcattaattaattacataaaagtttttctttaattgcttgtaagagtctagaggtgtacaagactaaaagtggcaagaaaggaatgtggaataagaaaagaggcagtacttggggcagacgctctagctttgaaccattttcctatattttaagttaggtcyctatactgctcacaaattggtctcaatcttgcctactgcccagaaaacttccaacaggtgtaacacgtggcaaggcaatctgacatgatggaagaatactggaccggaaggtcagagtcctgggctctggtgccaaattccacaattgtttgtctatgtagagttattttatccttatggaccccaatttccacataagtaaaagagagtggcttgatatagccttagactgataaagtcacttcaaaattccgtggctctaatctggacaaaatatttcagaggctataatttccttcattgagctactggcccaggcccttgagatttgtaatctagtttcatgagcaatgtatttataaactgttggatagattactcagtagatagctaatcttatccattttatattgattcttctttatatctcagtatgagaggttaccccaaatttagggggggatactctgcttaagacttgcatttcctatgtactcactaaactcagcaatttcgctatgctcttcccctagctgctgggggctgcagaaaacagaatgcagttgccatcaactattccttctttaaaccaagcagtattatcccatctcaaaatttatcttca

SEQ ID NO: 721945 - DNA, 844 bp, Homo sapiens
tttctttttttggattctatacaactctgttcctctgttagtacatttcctcacacatcattaattaattacataaaagtttttctttaattgcttgtaagagtctagaggtgtacaagactaaaagtggcaagaaaggaatgtggaataagaaaagaggcagtacttggggcagacgctctagctttgaaccattttcctatattttaagttaggtctctatactgctcacaaattggtctcaatcttgcctactgcccasaaaacttccaacaggtgtaacacgtggcaaggcaatctgacatgatggaagaatactggaccggaaggtcagagtcctgggctctggtgccaaattccacaattgtttgtctatgtagagttattttatccttatggaccccaatttccacataagtaaaagagagtggcttgatatagccttagactgataaagtcacttcaaaattccgtggctctaatctggacaaaatatttcagaggctataatttccttcattgagctactggcccaggcccttgagatttgtaatctagtttcatgagcaatgtatttataaactgttggatagattactcagtagatagctaatcttatccattttatattgattcttctttatatctcagtatgagaggttaccccaaatttagggggggatactctgcttaagacttgcatttcctatgtactcactaaactcagcaatttcgctatgctcttcccctagctgctgggggctgcagaaaacagaatgcagttgccatcaactattccttctttaaaccaagcagtattatcccatctcaaaatttatcttca

SEQ ID NO: 721946 - DNA, 844 bp, Homo sapiens
tttctttttttggattctatacaactctgttcctctgttagtacatttcctcacacatcattaattaattacataaaagtttttctttaattgcttgtaagagtctagaggtgtacaagactaaaagtggcaagaaaggaatgtggaataagaaaagaggcagtacttggggcagacgctctagctttgaaccattttcctatattttaagttaggtctctatactgctcacaaattggtctcaatcttgcctactgcccagaaaacttccaacaggtgtaacacgtggcaaggcaatctgacatgatggaagaatactggaccggaaggtcagagtcctgggctctggtgccaaattccacaattgtttgtctatgtagagttattttatccttatggaccccaatttccacataagtaaaagagagtggcttgatatagccttagactgataaagtcacttcaaaattccgtggctctaatctggacaaaatatttcagaggctataatttccttcattgagmtactggcccaggcccttgagatttgtaatctagtttcatgagcaatgtatttataaactgttggatagattactcagtagatagctaatcttatccattttatattgattcttctttatatctcagtatgagaggttaccccaaatttagggggggatactctgcttaagacttgcatttcctatgtactcactaaactcagcaatttcgctatgctcttcccctagctgctgggggctgcagaaaacagaatgcagttgccatcaactattccttctttaaaccaagcagtattatcccatctcaaaatttatcttca

SEQ ID NO: 721947 - DNA, 844 bp, Homo sapiens
tttctttttttggattctatacaactctgttcctctgttagtacatttcctcacacatcattaattaattacataaaagtttttctttaattgcttgtaagagtctagaggtgtacaagactaaaagtggcaagaaaggaatgtggaataagaaaagaggcagtacttggggcagacgctctagctttgaaccattttcctatattttaagttaggtctctatactgctcacaaattggtctcaatcttgcctactgcccagaaaacttccaacaggtgtaacacgtggcaaggcaatctgacatgatggaagaatactggaccggaaggtcagagtcctgggctctggtgccaaattccacaattgtttgtctatgtagagttattttatccttatggaccccaatttccacataagtaaaagagagtggcttgatatagccttagactgataaagtcacttcaaaattccgtggctctaatctggacaaaatatttcagaggctataatttccttcattgagctactggcccaggcccttgagatttgtaatctagtttcatgagcaatgtatttataaactgttggatagattactcagtagatagctaatcttatccattttatattgattcttctttatatctcagtatgagaggttaccccaaatttagggggggatactctgcttaagacttgcatttcctatgtactcactaaactcagcaatttcgctatgctcttcccctagctgctgggggctgcagaaaacagaatgyagttgccatcaactattccttctttaaaccaagcagtattatcccatctcaaaatttatcttca

SEQ ID NO: 721948 - DNA, 1230 bp, Homo sapiens
tgggattcaaattccaactcatttattcataagctgatggctttggacaagttattttcaatctcagtattctactctgaaaaacaaggataacagtacttatcctgaaggagagttgtgaggattaaatgatgagataatgtttagaaaggtatctaacactggtacatattctattctgttgccagaataatcttgataaaccacgaattggatcatgttaaattcctgtttaaagtttttcagtgaatcctgttgcctttgagataaaatccaaactcattagaatccttcaagatccactgcctccctcatttctcatgccttcctatctacacagcagtcatgaagttcccgaacttgctcctcacttacacatctctacatctcttgcctacaatgatttttctatttattttctcctactcatcttcaaaacttagctcagtaacagtctcttcaaagaggttttctccaatcctcaaccatccagggtctacctcaaagaacctatcatactttatcataatttcctgtttgtctgtcttctcactagattatgaactccaggaagaggctatattgttttaggtctggataaccaacaattagcccattgtagatgcttttaaaatgctgaataaattaattaatgaataaagacactcagtactctgctccttttgcaaggaaaggatttaacagtcaagaatcctttttgccttctgtttagtcaaggaaagttttctgattggagaagaatttcaaacaaggtttgcaaaaaaaataaaagcacctaaagcttcctctcaaagcaactggcatccctcccccaaccccacattcgaattacacttaccagggaaggactagctagcatgcagtggaaattccaatagaaggggaggccagagagctcacttcgcacccgtagaatcagtgcatctgccacacaatcacaggagaaggtagcttcgctagggtgagcagcgtccttcaacaatgggcgaaggagattatccaaatgacagaggaaagctgcaggaggagcagtgagccgcttgttcagctcctaaagagagagcagtggtacagagtaasggtgctaaaaggaaactaattccctcataagtaacagcaaaggaaagccctggttaacacgaaggcaatggacatgagaggaaggggagagaagataaaaacatcacaaggggaaagaagaaaacaaaa

SEQ ID NO: 721949 - DNA, 2312 bp, Homo sapiens
ataactacacatttgtttgagctccttatatattctggctatcaatctcttgtcatatggatagtatgcaaatattttctcccattctgtgggttgtctcttcacattcttgattgtttcctttgctgtgtagaagctttttaacttgatgtaatctcatttgtccattttgttttggttgctgaggcttcactttttgaagagggtgtataagaatttgtggaagtattttgaatcagcacaagaggccacatatgtaaaattattgtcataaaataagtgtggagtaaatgaaattgattattacttggaagcttaaatagtatcctgttctactgtacctctctagtactagcagtgcttggtatataacagaccttcttgctcttgtcccccaggctggagtgcaatggcacgatcttggctcactgcaacctctgcctctcaggttcaagcaattctcctgcctcagcctcccaagtagctgggattacaggcgcctgccaccatgcctggctattttttttatttttagtagagacggggttttaccatgttggccaggctggtcttgaactcctgacctcagatgatccacccacctgcctcccaaagtgctggaattacaggcatgagccactgcgcctggccaacagcccttcttaaataatagctaaatgtattgcttgttcttgtgttaggcattgggctaagcaagttagatgaaatagctcatttcaccttcacaatagccctgggaaatgggtcccagtcaattggtatcccaattttacagaggaggaagctgaaatatgcacagataagttaaataattttttagatattaacatggagggcttgatggagccaggaattgctctcaagcaatcaaccataggatgcagcttttaaccaccttactctgggtgtttacaccaatcaaggcctccaaaattattcatctgaaatactcctgcctctgaaacttacttgtccaggaatactttgtgggtgggagaaataatgcctgaatggttaagcctatatcttgaagcgcttctttcagatttagactgccttaatcattcccaaccaaaatctaacaatgtgaaggacaggaatttctccttcattctttcttttttccatcatttgataaaacacacccacaacccttctcctttcttctgttctatacttcaggcttctccatgaaactttgttgtttttcctgtggctacataaaagtttgaaaactgccaaattagatcatctctagaagtcatttcctgctttaccatcttatgagcacgagtcctccctgttccccatcagtacagaagttagtgaccaaatccagtcaattctttcctcaacaattgctctcttgggtctccctttcttgtcccttccctcattctacatctgataagaaccgaaatcgacacattgtagcattcccttaaccaggccagtactctcacttccaaattatcttgtgtccagtggccacataaatcctcaagaatatcctttcgttatgctgctccattgttcaaacaaaacccttcaattgtctgtgtcgcatttctcatatgggggccccacagatatgagtacatatcaatagacaggttttagagaatacagtctaaaaaaagttaagttttttcctttactaatagaatttcatggtgactttgatatgctaatgtgcaatgtgagtcttcctgaaggagagataatataaccaagaggttttctctcttgggcttgttgtgggcaagcacaggtttcaggtcagaaaattcccttgggttgcgattttagaagctgtttcttatcactgatgtctcttccctggcacttctcacttggtgatgaggcccctactcactgtattgtaccttaacaagtgaaagtccagaaagtcattgctcaataggctgttgctctctctckctctttgactctataaccctcagcctcccagaaccaccacttcagaaaatcaacgttatgtttgtgtgtgtatacatatacgtagctttctttactgaaggactgggtgattttatttattcattttttcttcctatttatttgtttttatttgtataaaatcataggataaaagtgcaattttgctaaattgatatattgcattgtggtgaactcagggacgtcagtgcacccatcactggagccatgaacattgcacccaccaagcaaccgtcaatcatctacccccgtcccatccccttcccttccaagtccccattgtccatcattccacactctgcttctgtgtg

SEQ ID NO: 721950 - DNA, 495 bp, Homo sapiens
ggctctgtctgggtgtataaatttgggctaatcatccatccttgcccagcctctgtttcatacctataaaatgaagtaaatactatccactgacagccattgtaaagataaaatgcaataatgtatgtgaaggctcactgtaccctatataatgattaaaaatataaagtttattaggtaattattaacagaggaacagaagggaagggaaaggactggtcaaataactacagtaagcggtcagctttagcatctctgcctagtaaagatttctggtcattttggaagtagtagtaaaagggagcccatcacaccttaagtttttaaacatctggcataaaatagttcagttgtgaaaataagttgcatctcttctagtgttctcttgtgctgatgtgtrccaatgacaagtaattccagatgaccattcctatgcttttacacacagtttacaatttcccctggttggggaagtaggggcaactctgctcagaa

SEQ ID NO: 721951 - DNA, 643 bp, Homo sapiens
ggaaaacaaaagctttctctggagaaatgaagaacaagttttgttataaaccttgtccatcttcaacaccaaaaaaaaaaaattmttttactctggaaaagctaaagaaaaacagaaaattggtttatggcagacttccaagtgttcaacacagtgaggaaatgggattatcagctactacccttatgaccacagcagaacccagtagcataaaatgagaaaccaaacctcactgactccagcaacaagttcctaccttgtgaagccacttgtgtgtggacactaacaccaatgacaggttgagggatcttccttaagatactgacaatgtctgtaacatttttctctttaaaagattgtgtttttttggaacccaagtgaccaaaacataagcactgacatttaggggatgagagactttttttctcattataaaagccatgcctcaatgtttaaggatcagaatcatgcgtaagagatgtttatatgagctcgcctttaaaatcagagccaggcacttttgctcagtcctgactttctttccaagtcttatcttcaggatgtgtggacctgcacaatttgtggcaatggaagccaagtttctattgctgacttcagtgggcgttgctgcttatttccatgt

SEQ ID NO: 721952 - DNA, 1471 bp, Homo sapiens
gacagagtgagaccatatctaaaaaaaaaattaaagtawtaaaaataataaaagagtaaacacttattgatgccctattaggtgtctgtctaatttggggagacataaatgaatagtataccacttttattaaagatatagttaatataaaatatcattttatatatttaatataaaaataatacagtgaagatacaactaaagaaacctttgagtagttggagccagtaccataaaggaagtaagtggacataggtcatcatgggagcaaagataggagtgacttcaccagcctgggagagatcagaaggagcagttaaagccataagaggaaaacaaggagtgcccaggattccagaagccaagggaagaaaatgagaggaggaggccaagttgtcatgctgccaaaaaattgagtaagacaacacctgagatgtgaagtgaacagacagcatgggtcgctttgcttttgggtgtgtattcttgtcacatcttcatctctaaccaaggagaaatgataaatggcatgtctactgcctcctccagcctcaaggttaatttaccatcgctcaatctaactctcatttgtgagtgaacctcctttctcttggttataccttcacaacctcaatcactccattctacactctttccacatctcataacttccagctttctttccaaagaaacacatcccatgatgctttagagattttaagacatttgaagacagggagcttataatttaagctgcagaagagggtcaattcaaaggggatttaagtaactggtaaatggtaacttttgagcaagatcggtagtccttccctgctttttatcaatttgggcactaaagatggatgttcttactgccaagtcctttgcattaaaaaacactgggtccaaagggagtagcccagagcagaacctcatttccggtggggttcatgtcaacatacgctttactcaacagctacacagatataaatattatcaatataagaccatatgatcaagaacagcttagtccatgtttgtggtataatgtcatagataagcaatgcaagtgggaattttatttacttgtttgtttgtttatttatttagagacagagtcttgctctgttgcccaggctggagtccaggggtgcaatctcagctcactgcaacctccgcctcccagattcaattgattctcctgcctcagcctcccgagtagctgggattacaggcaaccgccaccacgcctagataatttttgtgtttttagtagagatggtgttttcaccatgttggccagactggtcttgaacccctggcctcaggtgatccacccacttcggcctcccaaagtgttgggattacaggcgtaagccactgtgcccagccagaattttattcttaaaacacagagatcagaagtaactcagcaaaatataaatctgctagcgaatgtgtgagccaaagaatg

SEQ ID NO: 721953 - DNA, 626 bp, Homo sapiens
ttgtgaggagatgattagttatcagctcttggatccataatcctttaaaatggtgtcatttgaaaagcagaacacaagacttacatggaacaataaggtctaaattcccatgcttctgaaaataaatcatggagacattgtataccagagggtactcataactattgggtggacaggaagaagattcacrcagcattggtttaattttaaaattattgtttaaagacattatttttatgataaaccatattgtggacttgaaattcaaaatttgcagacatccttgggaaaaactggcaacattcaatttggaactttcactgactcttgtgaactgcaagttgaagaacgaaagtgcgctcatttatcttctattttagggcagaagtttgagaaactctgagtatgaactgaatatcacctgttccacttgtaagacatagacatgcggtttttccttccaccattaatgtcatcctatatcttattgcaccattctgggagaccttttgtaattaaaataaatatcaaagtttgggtcctctcaacagagcactgatttcagagcagacaggttctcttggtttattattccaaagaacaaaaaccaaaatctcaaaaaaaaa

SEQ ID NO: 721954 - DNA, 626 bp, Homo sapiens
ttgtgaggagatgattagttatcagctcttggatccataatcctttaaaatggtgtcatttgaaaagcagaacacaagacttacatggaacaataaggtctaaattcccatgcttctgaaaataaatcatggagacattgtataccagagggtactcataactattgggtggacaggaagaagattcacacagcattggtttaatyttaaaattattgtttaaagacattatttttatgataaaccatattgtggacttgaaattcaaaatttgcagacatccttgggaaaaactggcaacattcaatttggaactttcactgactcttgtgaactgcaagttgaagaacgaaagtgcgctcatttatcttctattttagggcagaagtttgagaaactctgagtatgaactgaatatcacctgttccacttgtaagacatagacatgcggtttttccttccaccattaatgtcatcctatatcttattgcaccattctgggagaccttttgtaattaaaataaatatcaaagtttgggtcctctcaacagagcactgatttcagagcagacaggttctcttggtttattattccaaagaacaaaaaccaaaatctcaaaaaaaaa

SEQ ID NO: 721955 - DNA, 626 bp, Homo sapiens
ttgtgaggagatgattagttatcagctcttggatccataatcctttaaaatggtgtcatttgaaaagcagaacacaagacttacatggaacaataaggtctaaattcccatgcttctgaaaataaatcatggagacattgtataccagagggtactcataactattgggtggacaggaagaagattcacacagcattggtttaattttaaaattattgtttaaagacattatttttatgataaaccatattgtggacttgaaattcaaaatttgcagacatccttgggaaaaactggcaacattcaatttggaactttcactgactcttgtgaactgcaagttgaagaacgaaagtgcgctcatttatcttctattttagggcagaagtttgagaaactctgagtatgaactgaatatcacctgttccacttgtaagacatagacatgcggtttttccttccaccattaatgtcatsctatatcttattgcaccattctgggagaccttttgtaattaaaataaatatcaaagtttgggtcctctcaacagagcactgatttcagagcagacaggttctcttggtttattattccaaagaacaaaaaccaaaatctcaaaaaaaaa

SEQ ID NO: 721956 - DNA, 892 bp, Homo sapiens
ggatagataccccattctccacgatgtgcttatttcacattgcatgcctgtatcaaaacttctcatgtaccccataaatatatacacctgctctgtacccacaaaaattaagaataaaaaatccactattagtatggaacaggatatagctaagagttactatgtgaagccatacacatgaaattttataatgtgaaaatgttatagaacaaaataccttttcaaataattttataagcctgttatactctaagagaaaatgtaaactgataaattatattcatttcacttgattaatgtaatatcaattagatttaaaataattcccatcaagatactgcatatcagatggaaatatggagaagagaaacatasaaagactattcacatgaacatttcttcagaaaataggataacagcagttgtgtaagataaataaaatttcctatggtatatatagagaaaaacaagctattctttttaataagaatattaccatttacataataaagtcagatgacttaaaacacttttccttgcagtatctcactgtggtaaatctggtgtggaaaagttgaaacaaaagccaaaaaaattcatgcgaatgcaaagccatgactgttgagtagtcactagaattgagaataattacataatttctttcattttttttaagaaagcaagtaatttagataaaacatttaaaaacagtcaactgttactaggtttaaatactggggaaaaatacagagtgaagggaactcagaaaaagtgaatagtctgtctgatttcatgagatagtggtgcccaattttaagaatcttgttcaatagcatcatttcttatgtatgtgttctgcaccattttgtggatttaaaaaaaaaagaaaaca

SEQ ID NO: 721957 - DNA, 892 bp, Homo sapiens
ggatagataccccattctccacgatgtgcttatttcacattgcatgcctgtatcaaaacttctcatgtaccccataaatatatacacctgctctgtacccacaaaaattaagaataaaaaatccactattagtatggaacaggatatagctaagagttactatgtgaagccatacacatgaaattttataatgtgaaaatgttatagaacaaaataccttttcaaataattttataagcctgttatactctaagagaaaatgtaaactgataaattatattcatttcacttgattaatgtaatatcaattagatttaaaataattcccatcaagatactgcatatcagatggaaatatggagaagagaaacatacaaagactattcacatgaacatttcttcagaaaataggataacagcagttgtgtaagataaataaaatttcctatggtatatatagagaaaaacaagctattctttttaataagaatattaccatttacataataaagtcagatgacttaaaacacttttccttgcagtatctcactgtggtaaatctggtgtggaaaagttgaaacaaaagccaaaaaaattcatgcgaatgcaaagccatgactgttgagtagtcactagaattgagaataattacataatttctttcatttttttwaagaaagcaagtaatttagataaaacatttaaaaacagtcaactgttactaggtttaaatactggggaaaaatacagagtgaagggaactcagaaaaagtgaatagtctgtctgatttcatgagatagtggtgcccaattttaagaatcttgttcaatagcatcatttcttatgtatgtgttctgcaccattttgtggatttaaaaaaaaaagaaaaca

SEQ ID NO: 721958 - DNA, 1332 bp, Homo sapiens
tgggtgacagagtgagactccatctcaaaaaaaaaaaaaaaaaagcaaaaatccttagtgtacatctcaatgaatttttaatttttaaatttgcatawacctgtgtaatcactacccagttcaaggcatgaaacatttcagacatcactgaagcctcccatatattcctgttttcttaagcttttaagtgaaataattatataaaacagtacagtaccttggacacagcacatattcaactagttccctcctctttacttttttaaaattttacttatttatttattgagatggagtttcgctcttgttgcccaggctggagtgcaatggtgtgatctcggctcaccgcaacctccgcctcctgggttcaagtgattcttctgcctcagcctcccaagtagctggaattacaggcacctgccaccacacccggctaattttttgtgtttttagtagagacagggtttcaccatgttggccaggttggtcttgaactcctgacctcatgatccacccgccttggcctcctaaagtgctgggattacaggcatgagccaccgcacccggcctcctctttacttttttaaatttcaagagagacaggtattatagtaaaaaagtgactttttttttttgcaggataattctaaacaagtaaatgcctagagatactgcagttcttttcctaacctcatttaacctattctctagacgtattttgaaatagcagcactgaacagacccgaaaagaagggctcagagcaaatgagacgtaaggccaaactaaaactaaatttttggcttttgactctgagccaggcacaagcatacggggattaggaatctaacagtttcaagctaactccttggtaaagcattgtgaccaatgaaatttctctgcaatatgcactcaactcctagccagatacattcctgaaatgttgcttttggccaccacagcacccgttttcatgaggatttgcctcacatttaaaaacgctcttaatatcctgacctatgatgaattcatgtccctttccttgttttagaagagtagactggggtaagaagacaatcagaactctttagttattaggaaatgagccctgagtgtgtaaactatcaagaaataatacaaggaactgagtttacatttgtgatagtctgaaaagtaatttatgctgaaacctaactaccccttttctccaaagtttctgggtttggcagtacttcatggacagaattgctttcttttaattcagtatctatacttgggcttggttttttcttttctttcttttttttttttttttacacagggtctcactctgt

SEQ ID NO: 721959 - DNA, 1277 bp, Homo sapiens
ttgagtagattagaaaggatctttctggatcattacaataatgttttcccatgggaaaaataaatgttaagtattataatacagagtccaagaaaaaaaaaagagtaatgttttatttaaaggaataacttagtcatatgttgagtaaagaaatgtttggtattttagttgtttatttgttgcagaccatttggagtgtagattaactgaaaattcattttatacagtcaacttttaaagtacaattaataatttatgtttgaaaacattcactatacatggaaaacaaattagccgaagagctccccagcccgcacttcatctgctcagtgaagagcctgttggcatcagttcctgtggttggtttgcagaagaccatcctcctaaatcccagccatcactggatatcttccagaatcagctttcgtttaagcatgaaggagaattagtgcagaggttcccttcagctccaaagctctaagctatttaatcactgctttggctcagcccaggccaatcagtccatcagagcagtgactcattcctgggtgagctgagtctggtgtggacctgggtggtatgagagcttaatcatattccatctttttcgcagcaggaacaatgggtatatttagtcttctgtatttcctgatatcatatttgatctactgaccagaagatgaaaaacttccagtaagaattgctgaatcatataatacatagactttcctcttctctgcattttttaccttctctactggaggaaggaaagacctcatctcaaatgtctctgacatttttattttcatttcaagaaaataagatttttggggtgctggcttgattgtccttacatcttagatagctttaatcttcttttaagcatgaactgtttaaacttcctgattttaggtcaatactactgttgataatagagaccagctagttcaacccatgtatttggtagatactctgtttcctcaaggtttaataatgttggttcttggctatcctaaaamtttgggcattggctattaagaggtatttaataatttcccaaatgtagcacaatgatattttatactgactttgcaatcattctgatgttctctaatgagattgctatttaatctatagtaatttaaactttacctttgatttgtaataataatagcacctcatgtcccaggcactgttcttaacaacttacttatattatttaaatcctcagaaaaattcctatgggatcaattttggtcatctacattttataagtc

SEQ ID NO: 721960 - DNA, 1277 bp, Homo sapiens
ttgagtagattagaaaggatctttctggatcattacaataatgttttcccatgggaaaaataaatgttaagtattataatacagagtccaagaaaaaaaaaagagtaatgttttatttaaaggaataacttagtcatatgttgagtaaagaaatgtttggtattttagttgtttatttgttgcagaccatttggagtgtagattaactgaaaattcattttatacagtcaacttttaaagtacaattaataatttatgtttgaaaacattcactatacatggaaaacaaattagccgaagagctccccagcccgcacttcatctgctcagtgaagagcctgttggcatcagttcctgtggttggtttgcagaagaccatcctcctaaatcccagccatcactggatatcttccagaatcagctttcgtttaagcatgaaggagaattagtgcagaggttcccttcagctccaaagctctaagctatttaatcactgctttggctcagcccaggccaatcagtccatcagagcagtgactcattcctgggtgagctgagtctggtgtggacctgggtggtatgagagcttaatcatattccatctttttcgcagcaggaacaatgggtatatttagtcttctgtatttcctgatatcatatttgatctactgaccagaagatgaaaaacttccagtaagaattgctgaatcatataatacatagactttcctcttctctgcattttttaccttctctactggaggaaggaaagacctcatctcaaatgtctctgacatttttattttcatttcaagaaaataagatttttggggtgctggcttgattgtccttacatcttagatagctttaatcttcttttaagcatgaactgtttaaacttcctgattttaggtcaatactactgttgataatagagaccagctagttcaacccatgtatttggtagatactctgtttcctcaaggtttaataatgttggttcttggctatcctaaaactttgggcattggctattaagaggtatttaataatttcccaaatgtagcacaatgatattttatactgactttgcaatcattctgatgttctctaatgagattgctatttaatctatagtaatttaaactttacctttgatttgtaataataatagcacctcatgtcccaggcactgttcttaacaacttacttatattatttaaatcctcagaaaaattcctatgggatcaattttkgtcatctacattttataagtc

SEQ ID NO: 721961 - DNA, 646 bp, Homo sapiens
tttgtttccattttttgagattaattacattgagcaagcatctggaattgaggatatggggagtttagtttctaagtaaaaccagtttctttgatataatagattttgtttaggctatttcagagtaattatttttgcaaattgaaatctttgccatcctcctatctcagtgtcggcaaagaaggaaacctggaagctatttattctaataaatatataataactgtgttacaggaccttaatacctgtttaggatttggtaaaatagaatgtgattcctaaaaactcataattccagtctaataatgagaaaaacatcagacaaactcaagctaaaggaccttgtgcaaaatacctaacttgattaatactcaaaattgtcayggtcatgtaaaacaaaggctgaaactgtcacagaccagaggagactgaggagaggtaactaaatgcaaaatggtagcctgcgttgaatctggaacaaaaaggtataaaaactggtgaaatccaagtaaagtctagagtttaattagtagtaatgcaccagtgttggtttcctagttttgacaaatgtaccatggtgatgatgtagattctaatgttagggaagctgaaggaggggtatataggaactctctgtgttatcttg

SEQ ID NO: 721962 - DNA, 675 bp, Homo sapiens
tggaaggtctgtcagagctcatttagtccaagaacttgactttacagatggaagcaccagggtcagaggaggtcagtgagttgcgggcaggcaaggttggaccacaggagtcctaacttctcaccctgatgcctgtctctagtaaccaatgtcagagacaacccacgtacaacaatctccttggagagttatgcagtttgctcagagtaaaaaaattcaatgtctcatttgacagatgaataagcagatgcccatgacagtttatctcatataaaatccagtgaaaatagagtatgtgtatcacaaacttttttctttgtaaaataggattacaatccctggtacaaatayaattgtatgtaacagccactattaaaaaacagtggaagctgagtttgtctaaagaagcagggggtggttcctgactcccactctatagtgagcctcaagagggaatcatgaacgcacaactgtgctacccctgcaggaggaagaatattggtatcattttcagcttacatgtctctaagacgacctgaacttctttatctatttctaagccattcatcatttatatggctctccttcccaagccctaacatttatttttggcagtgttgttgggatggggaggtaacacccagggattgagcatttgctctgttccaggcacca

SEQ ID NO: 721963 - DNA, 675 bp, Homo sapiens
tggaaggtctgtcagagctcatttagtccaagaacttgactttacagatggaagcaccagggtcagaggaggtcagtgagttgcgggcaggcaaggttggaccacaggagtcctaacttctcaccctgatgcctgtctctagtaaccaatgtcagagacaacccacgtacaacaatctccttggagagttatgcagtttgctcagagtaaaaaaattcaatgtctcatttgacagatgaataagcagatgcccatgacagtttatctcatataaaatccagtgaaaatagagtatgtgtatcacaaacttttttctttgtaaaataggattacaatccctggtacaaatacaattgtatgtaacagccactattaaaaaacagtggaagctgagtttgtctaaagaagcagggggtggttcctgactcccactctatagtgagcctcaagagggaatcatgaacgcacaactgtgctacccytgcaggaggaagaatattggtatcattttcagcttacatgtctctaagacgacctgaacttctttatctatttctaagccattcatcatttatatggctctccttcccaagccctaacatttatttttggcagtgttgttgggatggggaggtaacacccagggattgagcatttgctctgttccaggcacca

SEQ ID NO: 721964 - DNA, 1144 bp, Homo sapiens
tatagctgccattttgtcttccatttgagtgcatgtctaggtagttaaatagttggcttgttcccacagctctcattcattctctctctctccacccccccaacctctccttctcccttttcctctctccctctctctttctccctctccctctgttcyttctctttctctctctctttttctctctgtcaccctcttggtgttggtgagagagggagcatcttaaatactttgagtcaaaagctggtgaaaataaaaatttatttcttggctcaagacccatttagccatctttccctattgcgaaactcccaaactacagtcagcatcttcccactctcattgttccattcactctaaatttcaacaacatatgttactggcataatggaaatagatcaaaatgagttcccaactccacctatggctcagactccagcattaaattagtcaagtcattgggcttcgcattggttcaaagagtgttttaatgtgtgtaaaagaaaaacagatcataattacatttgctgtttcctattatttcatgcaaatttatggtatttcaagtatattgtgtatcaagtttgcttttatgagctggtctggaaacaattacaatttataatatttttctatggaaattattttagatgttccaaacacaaaatttacaagtgaacttccaaaacacagcctgctcctaaggtggaggcagcctgtacaggagatcttaatggcagagattttatgttttatttcctctctgattgttgtatcaagaatagagcaattttcatttttaaacttaattgtgtagaaattttctccgtgcagctgtactttcactgaaagtgaaaaatattatacagatgaggattcttagggtgaggtaacattgtaagtatttgaactaaaatggacacctggtatcatttagaagaagtaacaggttcattatttcaaaaaaatgcggatgatttctagtagataatacaatatgaggcatttattctgctccacacacataaatgatttttcagtaggggaaaaaagaaagcttaaaagacagacctagaattcaaaccaagataaacacattcctggacagaaatacaaatctgggatttgggtccccaaacaggca

SEQ ID NO: 721965 - DNA, 596 bp, Homo sapiens
gacatgatgtccaactaatttatttaaactaatttttatatgcagatatcagcattcatacattaaagtttttaaagtagaacttacctgtaggcaaggtaatatttctttaagttttcatatccataaggaagagataataatatatgcttcatagaattgttgtagaattaacatatatacattttatatatagtgcttagcatactgtttaaaacctatataaccattaaacacttastaactattcacggctatttctattattctcccctttattaccttcattatgtgagatataagaataacatattcttgatgataggactagattaagatgaaatccagaaaatacaaaggaagtttaataatgtaataaaatgcattaaaatgtcatcattttaagtattgttctgcctcttaacaacatagcacatgttgacagatttaatttgaaaatcaatctagaacagtatttgaggctcctgaataaatatctcttcaaacattataatattcaagttttcaggtatttcctattaggaaattcatttattacatatagcatattaaattttatttcttgaagcaaacct

SEQ ID NO: 721966 - DNA, 596 bp, Homo sapiens
gacatgatgtccaactaatttatttaaactaatttttatatgcagatatcagcattcatacattaaagtttttaaagtagaacttacctgtaggcaaggtaatatttctttaagttttcatatccataaggaagagataataatatatgcttcatagaattgttgtagaattaacatatatacattttatatatagtgcttagcatactgtttaaaacctatataaccattaaacacttagtaactattcacrgctatttctattattctcccctttattaccttcattatgtgagatataagaataacatattcttgatgataggactagattaagatgaaatccagaaaatacaaaggaagtttaataatgtaataaaatgcattaaaatgtcatcattttaagtattgttctgcctcttaacaacatagcacatgttgacagatttaatttgaaaatcaatctagaacagtatttgaggctcctgaataaatatctcttcaaacattataatattcaagttttcaggtatttcctattaggaaattcatttattacatatagcatattaaattttatttcttgaagcaaacct

SEQ ID NO: 721967 - DNA, 596 bp, Homo sapiens
gacatgatgtccaactaatttatttaaactaatttttatatgcagatatcagcattcatacattaaagtttttaaagtagaacttacctgtaggcaaggtaatatttctttaagttttcatatccataaggaagagataataatatatgcttcatagaattgttgtagaattaacatatatacattttatatatagtgcttagcatactgtttaaaacctatataaccattaaacacttagtaactattcacggctatttctattattctcccctttattaccttcattatgtgagatataagaataacatattcttgatgataggactagattaagatgaaatccagaaaatacaaaggaagtttaataatgtaataaaatgcattaaaatgtcatcattttaagtattgttctgcctcttaacaacatagcacatgttgacagatttaatttgaaaatcaatctagarcagtatttgaggctcctgaataaatatctcttcaaacattataatattcaagttttcaggtatttcctattaggaaattcatttattacatatagcatattaaattttatttcttgaagcaaacct

SEQ ID NO: 721968 - DNA, 568 bp, Homo sapiens
ggagtgtaaatggtatgcccaagaatttagaggctatctgcctgcctttagtttctttgtactttcacgtctttcaaaaatatgtcccactatggtcaaacctgagatgttgtattagtctgttctcatactgctaataaagacatacccaagactgsgtaatgtataaagaaaggaggtttaattgactcacagttccgcatggctggggaggcctcacaatcatggtgggaggcaaaggaggagcaaagtcatgccttacatggcggcaggcaagagggcatgtgcaggggaactgccctttataaaaccatcagatctcttgagacatattcactatcacaagaacaccaatggaaagacctgccctcgtgattcaattacctcccaccaggtccctcccatgacacacggggattataggagctacagatcaagataagatttgagtggggacacagccaaaccacatcagaagtgctcctccctgtgtcttctgtttcaatcctgggaaaattccccaggagcccagtgtagtttcattctgtggaatccaagtcaacaaata

SEQ ID NO: 721969 - DNA, 1495 bp, Homo sapiens
ggtttacaaagaagtttactaagtgcaaaattagaattgtgagcatgatactgtgatagaataaaaaaatcarttggatcagattaagacctgaacctttaggtaaaccagaaataaacaaagcaaggcaatgccagaagaatattataaggcagaacttaattaaatctacagaatgtttacaacataaaactattaataaaaagatttctaataaaatagattacgaagactttacttttcaaaggtttttaaaattttttccaaaaggacattttcccagtgtaattatttgacaaatctataatccaaatacatcaagaaatactcaatgtaggaagtaatattatattttatgtctagtaaactatttggaaattaagaaaatgtttcttcaaaattggatgagagatgtaaatatttcttatttaatgggagcattaaatagaatctttatttgcataacacagtgaagagtttgactattaactgtcaatcatttagtcatttataaaataaatattagtagcctactgttttagcactagaaaatatcaattagtaataactataattatattatattacactatcttgcatgtttgaatgtttatatgtattttgtgcacaagtattttacatattatatgtagtatgtgtttcctggaatataaattttatagataatccaatattttttctttattcataggtatgactagaaaaatcattcctttataatttcttcatctaccacatcacctcctactagcaatatattttggcatgcttcttgaaatgtcaacagtattgagccaaaagaagactgtgtggaacattttccatattggttatgatatttttaatttgtgttggatatgccagatctgaattgtggtatcatatttactgtattgatgattaaatgaggtcttttctccactatctctgaaatatagaactgtatatcagttgccaaaacattaaaatttcaaacaaagttgtagctagtgttttggggttttttttttccattcctcatacttagagagaccagaccactattactagaataaatcagcttgaacatcactgaaataactttatatacatttgaggcccttaatttcaaggttgactctcatatcacatgtatttgaatgttacatacttatgggtctcaacaacaactgtatcctaagcacttactggccctcattctaacatctctctagtttgtccctgcttccatctatctatcccatacaactttctccagagttctcaagtctccagtctgtgcctggccagttaataatctgcaatatcattccataaaaagtggtttaatcactaacaaagtacagctttgaaggccttccctcagggtttagacttctttcaacaaacattgagtacctatgatacgccaggcatttttcaatatgttgttttatagctgaaaacaaaaacaatatcttggctttatggccaa

SEQ ID NO: 721970 - DNA, 1841 bp, Homo sapiens
tccctgctttgaatttcaaaaccaaaaatccctcagaatggtagttgggagtggcagtaatgcgcttaatataaaaagtcacagatctattttggaggcattaattaatttgatccttatccagttaggtttatcatgatcttttaaaagaaaattaccaagaaaggaaataccaactaatacagcgatggggggttagcatttgtgaagtaaaagattctgttctaaccttgagctacttttcagcaagccaacaataacaaagaccatggtaacaaataatttcaagaatatcacccataatatttggccttatctgtcttcttttctcaatttagccttcaaatattacaaagtgttatctctgcatcctggctaacactgtgaaaccctgcctctactaaaaatacaaaaaattagccaggcatggtggcacgtgcctgtagtcccagctactcggaaggctgagaggcaggagaattgcttgaacccgggaggtggaggttgcagtgagccgagatcgcgccactgcactccagcctgggtgacagagcaagactccatctaaaaaaaaaaaaaaaaaaaaaaaaagtgttatctctggtctcaaaaattttactggggttccatcataatgaaagtaattcatttcactaaattatcaagcaaagtactatttgccaaaccctgtatcaggcagtaggaacacactattattaagacagttaaggtcactgtctcatagtggaatagagatattaatttttaagttaaaatatcccattcagtggtaagttgagactaacagtgattaaatgctaagtatcaagggtgcaccaaggtagaagcaactgcacaataggggtaagatcagggcaggctgcaagaaggaaacggcacttgctttgaaaagtgaatagaggtgaggaatatgcagaacttgaaaactgatgtgaacacagggtcaaggtctcaaagtttactctgaggtttgaagtctagatgatggggaagttagaaatgctgttttgtatcacaccataaagcctgttaaacactatgtataaaatgaacgcttcaattcaaaacagtatccaggtcctgtatagattacagtgcaatatatacatgccctaaaagggcttaaaaacacttaatagatgactagctgtttacgtgtgtgtgataggtcatcccttcagaacactggaaaactaagtttctaaattttcagggaaaattatgaagagcaaaattyggcattttgtgactatgttatcaaaaaggcaaatgtctttgaaaaatgaagcttaccgatacttttcatagtcagcagactgaacaagatagcaccctgcatacttaagacaggtggaatctcatttttctgtaatcctttgcaggtgctcatattgactgtgctttatcttacttcctagttattttagacactgattccaaatttaacttcagcctattcttttttctcattaattattataaatgactttgccactcactaaccttgtcacttgacccttaattttcttcagttgcaaaaatgaggataaaaaactatgaccaaaactttcagaactgctgtgaggatcaaaggaaatcaagtttgcagaaggcctggaagagcccaaggcagacactaacaaaacactccttaaactcccgctgcagagaattggtcttttatctccaaaaacgaaactaacattataagatgtttttaacacaacagagtcaacaataaaatattacagaatagcagtgtacattatttagaattttatttgataattggatagaacaagagtaaatgtgtcacttaa

SEQ ID NO: 721971 - DNA, 600 bp, Homo sapiens
cctagagtaaaacactcagagaaacttctttttaaatttaaagttgtctccttctagaacttttatttttagcaacaagaactcactctcttcctatatgataaaagaaaatgattttgaatgcttctgtaactagcaagaaagttaggactactcaagtcagagactaaaggaagatcgattcccagaggaaaaagcagagcagagagcccagcagttgtcatttactttgcaggcattggctgaaccaggcaaactctagcattggtttctagagccttaagggcctaagggacaaaaaacaaaattgaagtcctgcccaagatggaaagtctaactasagtcttcctttgaaggtgaaatatcaaaggactataacctctgtgtaacagtaaagtagaaagggccaggtgcagtggctcatgcctgcaatcccagcactttgggaggccgaggcgggcggatcacctgaggtcaagagttcgagaccagccggaccacatggagaaaccccatctctacccaaaaaaaatacaaaattagccaggcatggtggcgcacacctgtaatcacagctactctggaggctgaggcaggaga

SEQ ID NO: 721972 - DNA, 643 bp, Homo sapiens
taggcaggttgtagtggatcttttttttttttttcctgtgaacaatccatatggagaaaatagagaattgaatgtataaagtcactctataaagatatgcgttgttctgtttgggataccatacagaaaatcagaatttggtttaaactgtcatttctaaactcccttctgtttatagatctgctgagatttagacatgaattaaaatctggagataaatattttaaagcagtttccagaatgctttacttatgggattgtgcaatccwatgttgtcaacctattttgccaggtttgtctggcattgttttttttgggggggaggggtggtaataaatccaaactatcttttaacatacacttgccttttagtgcgggcagtctctcgtgtagtcttattttatgttccagcccacattctcttgactattttactgtcctgcgtttatggtgccttccaatttagtgtcattttcgaattgcatttgcatgttatttattccattttgcatgttagtaatgaagatactaaaattcgagacctaaatcaaccttggtgacagctcattcctccccccaattctatctgttgccatttatcattaccccttgtttatagctctttaaatggttttcccaccat

SEQ ID NO: 721973 - DNA, 643 bp, Homo sapiens
taggcaggttgtagtggatcttttttttttttttcctgtgaacaatccatatggagaaaatagagaattgaatgtataaagtcactctataaagatatgcgttgttctgtttgggataccatacagaaaatcagaatttggtttaaactgtcatttctaaactcccttctgtttatagatctgctgagatttagacatgaattaaaatctggagataaatattttaaagcagtttccagaatgctttacttatgggattgtgcaatcctatgttgtcaacctattttgccaggtttgtctggcattgttttttttgggggggaggggtggtaataaatccaaactatcttttaacatacacttgccttttagtgcgggcagtctctcgtgtagtctyattttatgttccagcccacattctcttgactattttactgtcctgcgtttatggtgccttccaatttagtgtcattttcgaattgcatttgcatgttatttattccattttgcatgttagtaatgaagatactaaaattcgagacctaaatcaaccttggtgacagctcattcctccccccaattctatctgttgccatttatcattaccccttgtttatagctctttaaatggttttcccaccat

SEQ ID NO: 721974 - DNA, 912 bp, Homo sapiens
tttccatatttctatttttcaatatgttaaagataactctaagctgggctcagtggctcatgcctataatcccagcactttgggagtccaaggcgggagattgtttgaatccaggagttcaagaccagccaaggcaacatagcaagtcctcaattctacttaaaaaataaatacataaataacactaaaaactacatattaggattgcaaaaatttgcttctataaaactatggcctgccactgaaaaggagaaaaaaaagaaagaacaaaattgccaacttaatttaaacctgtacaagcatacaaacagactcaagttctgaaatagataatcaaaaatgttcacctaaccaatgcatcaagtgaattttatctgaatgtgctgtggcataatagtgtttggaggtatttagaagatggtaaatcccagaatctttctaattattctttgagaaaaaataacttgcacattttgaaaataaatatttcaatatataaataaactttcagtgtataaaaacaaatttataaaacaagtttatctacctctttcattatatatgaaaggtttttacaaagasctttttaataaagattctaaattaatcttaaattaaggttcacctcaacgttcttaaatatgaactaatgttcaagcatataattatatttctagttatagtctccttgacagcactgaaatcattccagataacatgattcctattataatatacctagggaaaataacccaaactaaaaattattagggggttggttatttaaatacattattttgaaaatggcatcgagtatagcctgaatttttaattctaaaacccaaaactcaggcaaataaacttattaatagagctttgattggccccttggctaatgatccgtggctcaga

SEQ ID NO: 721975 - DNA, 643 bp, Homo sapiens
agggagtgtttgggatgagttgacatgcatcctcccacagcatgcctctgcatttttccgtggtgactacaagatggattttgggacttgaatggcccaccgggataacacacaagtatatgggccacagggaaatatctgcaccattttgctcctagtggaccagagaaagctgaatgtgwaagaagccttgttttgaaatgtgttttcaaaataaagggtttcataacaatcacgattgcagaaataactgctgatgggaataacttcctggaaagcagaggcctccatgacagttgggatttaaaaggctagaccatgttacaaaacaggtttacctaattgaaactcagcattgctgttcacacacacacacgcacacgcacccctctcttaggctgaggctttattgttagcctctgatgccctttcattggtagcctctgatactctgccaaggaccactgggcctttgtttcaaggtttagggcaacatagggtgctgaagtggactttccattctccttctgcctccatgtccctggtctaaacaaagtggctggaggtagctgcttgtgtattggttgccttgagattaactgtatgtctctgcctcctggccacaactgattggatcaggcat

SEQ ID NO: 721976 - DNA, 643 bp, Homo sapiens
agggagtgtttgggatgagttgacatgcatcctcccacagcatgcctctgcatttttccgtggtgactacaagatggattttgggacttgaatggcccaccgggataacacacaagtatatgggccacagggaaatatctgcaccattttgctcctagtggaccagagaaagctgaatgtgaaagaagccttgttttgaaatgtgttttcaaaataaagggtttcataacaatcacgattgcagaaataactgctgatgggaataacttcctggaaagcagaggcctccatgacagttgggatttaaaaggctagaccatgttacaaaacaggtttacctaattgaaactcagcattgctgttcacacacacacacgcacacgcacccctctcttaggctgaggctttaytgttagcctctgatgccctttcattggtagcctctgatactctgccaaggaccactgggcctttgtttcaaggtttagggcaacatagggtgctgaagtggactttccattctccttctgcctccatgtccctggtctaaacaaagtggctggaggtagctgcttgtgtattggttgccttgagattaactgtatgtctctgcctcctggccacaactgattggatcaggcat

SEQ ID NO: 721977 - DNA, 643 bp, Homo sapiens
agggagtgtttgggatgagttgacatgcatcctcccacagcatgcctctgcatttttccgtggtgactacaagatggattttgggacttgaatggcccaccgggataacacacaagtatatgggccacagggaaatatctgcaccattttgctcctagtggaccagagaaagctgaatgtgaaagaagccttgttttgaaatgtgttttcaaaataaagggtttcataacaatcacgattgcagaaataactgctgatgggaataacttcctggaaagcagaggcctccatgacagttgggatttaaaaggctagaccatgttacaaaacaggtttacctaattgaaactcagcattgctgttcacacacacacacgcacacgcacccctctcttaggctgaggctttattgttagcctctgatgccctttcattggtagcctctgatactctgccaaggaccactgggcctttgtttcaaggtttagggcaacatagggtgctgaagtggactttccattctcctyctgcctccatgtccctggtctaaacaaagtggctggaggtagctgcttgtgtattggttgccttgagattaactgtatgtctctgcctcctggccacaactgattggatcaggcat

SEQ ID NO: 721978 - DNA, 678 bp, Homo sapiens
aaagacaagatttgatttactgacatgtgtaaagaaagtgtttctaagaatagaagctgaccagcccttaacttgaaacagaaattgtcagagatgttggagataatgatgccacaatctgccccaggaagtacatgctttgctgggccaccatgatccattctttctacctggctgagatattctactgtctaagcggtgtgtggccaatggtaactcccaatccattcatttcttaattcactcactcattcttgtattcttactgaacttatgttttatgctaactcacttccagacaggtggtgcatacttattgaatcatgaataaattctgcgaccccttcttctgatgccctggtcatgatgaagtgatcttctgccaaggcatcttcctcttcacacagaatgccccagcttgaccttgggcagttctgtctcatgtacagttacggttttcattgcatctggtttttcatatcagttcttgcggcctttgccaatgtgacctggcatcttygaagatgacactgagcatctggatcctctaaacataaaaagaagtcagtgatggtggagataaggtcagtggcatgtggtggggacctatctggatggccagttcttcacaggtcataatctctatgaattgttccaagccttcttaactatgtacag

SEQ ID NO: 721979 - DNA, 836 bp, Homo sapiens
atgctcattacctgggtaatggaatcaatcatatcccaaaactcagcatcatgcagtacacccatgtaacaaatctctacatgtacccccttgaatctaaaataaaaattgaaatgactttaaaaaatcttttaaaataaaagaacactctggctgctataaggaaagtggattttgacagggcaacagtggtgatggagagactgggtaagtaggctatggtctcagtccaatagagagatgatggtagtttggataggatggtggcagttgggtggaaggagagcattggtaaaggaaatattgtgaaagaggaactgataggacttgctacatatctgatatctaacttcctaagaaagagaatcagagtagtgaatctgtcattcaaatattgatagaacatttcctattcccaatacagagcatgatgccatcttataggccaccggttttccttgtgtctagtcaataaatgagtactctaggatctggagctcaaatgagtcatggatcaagctgtagctcacatgggacaaagcaaattaattgatacaaaatgaaaaactttatatggaggcagtttataggtgtgatagctagtcagactttcttagattcttttttaatgatcatttttgtaataacaattgttttattaaatgacagaactcagatgaaggtgtgtgcaaataagttttaattacattcagataaaacatgcatatttctaaggaggccaagtgtctttgtccatttcctgctgatgcaatgaaatrctacagactgggtaatttataaatagtagaaatttatttggcatatggttctggagg

SEQ ID NO: 721980 - DNA, 598 bp, Homo sapiens
tggtctccacaatctgtatcttaacctgaacattctctttctatgaatcccaggtctttagacaaactcaaccaattgttatctagaaaatgtttaaattcacctatggcctggaatcacctgctttgaattcttctgcctttctgcaccaaaccaatgtatttcttaaatgtatttgattgatgtcttatgcatctctaaaatgtgtaaaacyaagctgcgccctgcctaccttgggcacatgttgtcatgttctcaggacctcctgagggctgtgtcatgggccatggtcattcatatttggctcagaataaatctcttcaaatatttcacagagtttgactcttttcgtcgacacctggaaacctctctactttcccccatgactttagtatcctgtgtgtaatggacgttagtcacagagccattttctgaggcttgtgttttgagatgagggctgggaaagctctaaagatcataatagctgcggcctttaaatatctgaagtgtgccatgaagttgtggaaaggatactatgtagtcaatgtgagtccaaaaagcaaacataaagtcactatggatgcaacaggaaaacatg

SEQ ID NO: 721981 - DNA, 615 bp, Homo sapiens
cctcctgataaagagtcctgctgattattgagatgtaggttgttagggtgacaggaaaggccctgaattgggcaggggtgatgaatggatgctgaaatgtcttgggaaagcttttgcctctgagctgggttcaaaatttctctttgactctgctcataatgctggcgaccgttttgaggtcaacaaagtcttacggagccacactggcctgtgattctcctgcatttacctgggggctccaggcagagagggctgtgttcattgtcttaagacctcccatcatcctttcctctttctatcacttttttcccctctttcctcagctctctctaggatggggtacctacccaggagagtgtatattccagcttcccattccctgttctttggttgcartttcagatatcccgcagcgtccagatgcggggagcctgctaagggagcctcccgaatcagccctgagtaaggagtgtttttctcaacccctctgcaaacatcaccagtcctgagaggtggattattctgtgtgagtgtgccacgtatatttagtcctttccattctgcatcctagcaggaggatggggcactttggcaacctctgcctctctgactagt

SEQ ID NO: 721982 - DNA, 574 bp, Homo sapiens
tttcttcaaagtaaaatggactatgcatataattttgggagtggggtattccattacatagtcaaatgcctgatttctacaatgtaattatatcgtttctaatttatatttggggttattttaacagraactagaccagcaacagaccttcattcaacttgctattagcactcactgacttggcttattgtttgcgatgaagcatagtaattaggtaaattcactgtattcctgataatcatcaaaatattggtgggctttgatttcctgctcagaaaagcaaggaaggtacaaatctcccacatatgactaaggaaattgtgtaaactgtattatttattcatacatatatatgtatgtatatgtgtgtatgtttttatataataatggagaatggaatgaaatttaaaatgtaggaagactctagataattaaatttatatagtaaaagatattgtgacaatcaaaaggaaaaatatcattcatgatatagaaaagataggttgaaacatacaattagctagagggaaaagcaagcagtttttgtctatctttttagcttcatgtcatttta

SEQ ID NO: 721983 - DNA, 661 bp, Homo sapiens
taaaaacccttcaaagtctacaacctcttgtcagtagcatgctgatttttaatatgctytcttacatgtaaattaccataattcaaaaatgagagacatcctgttaaaggtggaaggacccctatcagtgagtctgaaaggtgagtgttaggttgttgtcaaaagaatagcagatgccagttgaagtgtagcagaccattgaggataatttgctataacttgcaagaatgttgattaataagctttaaatatagatgaaggggagtgtggcataatgaatgaggggtctctggagtcacactgccaattaccagttgtgcaaccttgagaatatttcttaacttttttgattgcaatttcctcatctaaaatatggttaataattatcatgaggatcaaatgagctagtttatgttaaatcttaggacactgccgggcatacaataaatacttgataagtattagccatttttattacgatctggaggaagtagactaagagaaaacagaccctgagaagttaacaggcaggaagaagcctttcactagagctgttgaatttgcatgttattttttctctccagagtagctgtgtagactgaagaaaaagagatttaaatagttgatggcttagtatattaagcctatcaattcttcagaa

SEQ ID NO: 721984 - DNA, 1521 bp, Homo sapiens
ggaatttaacattttaattttgtgtggaaggaactatctgttatctcatcttgccagcttttctaatagtttaattcttcctggcactcccatcccagtctcttaccatatggaattatcaaaattttgagtatctgagcaaccaggtcaatagtacatttactttctgcaccctttttactggttgttactgttttcattcttgacctgactggctgaagccaaatcaatcaggtaatacagacttcgctttcctatagttccagagaacaaatctgttttctattggaaaactgttttgggtcctatgaaataaatcaacaaaatgttgtgcaaaagactctcagctttacttggattccaaacatcttcttgccttccattctcagaaggatatgctattgatgtttttttattgagtttccttagccaaaaagtccaccagttaaatcatgaatgtcaaacatgttgttattatggaggawgtgtagttctcaaacttcagcgctaaaagcacccaaaatgtttgttaaaacacagaatgttgggtcctatccccagagtttctgattcagtagttctattatgcagcccaataatttgtatttgtaacaagttaccagggaatgctgatgctactggttccaggaccacacattgagaaccgctagtgattatgtagagcttggaggatggagctggatttacctgtcctttagtcctggctctgtcccttaacagctgtgtgaccttgggaaagttattaacctctcaaaacctcagtttgctcagctgtaaaatgaaggtaatacccaactcatagggttgtggtgagattaaataagatgatgcatgcaaaatgctaagcccagtgcctgacaaaaatagctattcaataaacgtcagcatcttgctcttgatctgtttaggaaacagaatgcaatgtgggccatttctgtatttctatattacattctactgcgatctaagggagggagagaaagcacagacaagtaatgcaagaatatataaaaatagactctccaagagttaaaacaagttattcctttgagaacatgtggctcaaaaagtagttgttttgtatccttgccactggaatcccatcccaggattttttttccatacccaatattagattttatgttgattttactctgctgcttggttttggaaatctctagacatgaattaatgtgtgtttattaaatccaaaccatcttcagattcactcagtaaattatattagttgcaaatttgaaaatataaaaataatgagtgttcatatatatacactattgtagtagtattgatattaatttataccagtaattttttctcaataacatcgaaactcttcattagcatgaataatcaaaatttctgtgtcattctaaaataaacttgtgggactagaagaaatctttattttttgattgacagaagaaatcttattgattgattttctaatataaactctgaataagtcgcatgcctcataaa

SEQ ID NO: 721985 - DNA, 1020 bp, Homo sapiens
gaaaatacaaataccaacaaaaagatattttccaactattaagccagcaagagtcttcttaaatgtaaattcagtgtgggcagaagaacgggtagatgacctttgcatatactatttttgggattgataagaatttttagaaaagcaatttttacatatataaagatggtattgaatttaatagtgaaaaattagcagttgtatttattggggttggttaaataaataatgcaagagccacacaatggaactctatgcagccactaaaaatgatgcatatttacccttagcaatataaaagcacgtgtgagaaaagtaatatataaaagagtaaatgtatgaaattaataatcattacatatagatgtatctgaatctcaaggatatattaacaatactcatctctagattaactggtgactttaattttaattcttatgtttatamtgagaaatgaaatacttataatgaaaaataataattgcatgtgcagatattatctatcatctgcaactcccactctgttctactaacagcactggtcttgagtccagattgacatctaatttacaagattactagttttacctggaactgcatatatccagctttaagaaagaagtcaggaaatgaaacagctgtatgcaaaacaacaccgaaaaagaggcctagtgactaccagacagtttccaatatcttgatcactttgcattcaaattgtgtgtgatcactatagacaaggctcactgtgtgtagataatcagaaatctcttcagcttttacacctagctagccatgtggcttccccaaggtatataactagcacttgttctctagtgttgccccatcttatcaataccagccactcattactaaatacacatctggacaatgatgtacaggtgtgtttcatctgacaactcttagacagattctcattcatcttgaatccaatacaggtaaacagctaacaacttcttgaattaatattgccaaggagactcaaaccctcacatattc

SEQ ID NO: 721986 - DNA, 1020 bp, Homo sapiens
gaaaatacaaataccaacaaaaagatattttccaactattaagccagcaagagtcttcttaaatgtaaattcagtgtgggcagaagaacgggtagatgacctttgcatatactatttttgggattgataagaatttttagaaaagcaatttttacatatataaagatggtattgaatttaatagtgaaaaattagcagttgtatttattggggttggttaaataaataatgcaagagccacacaatggaactctatgcagccactaaaaatgatgcatatttacccttagcaatataaaagcacgtgtgagaaaagtaatatataaaagagtaaatgtatgaaattaataatcattacatatagatgtatctgaatctcaaggatatattaacaatactcatctctagattaactggtgactttaattttaattcttatgtttatactgagaaatgaaatayttataatgaaaaataataattgcatgtgcagatattatctatcatctgcaactcccactctgttctactaacagcactggtcttgagtccagattgacatctaatttacaagattactagttttacctggaactgcatatatccagctttaagaaagaagtcaggaaatgaaacagctgtatgcaaaacaacaccgaaaaagaggcctagtgactaccagacagtttccaatatcttgatcactttgcattcaaattgtgtgtgatcactatagacaaggctcactgtgtgtagataatcagaaatctcttcagcttttacacctagctagccatgtggcttccccaaggtatataactagcacttgttctctagtgttgccccatcttatcaataccagccactcattactaaatacacatctggacaatgatgtacaggtgtgtttcatctgacaactcttagacagattctcattcatcttgaatccaatacaggtaaacagctaacaacttcttgaattaatattgccaaggagactcaaaccctcacatattc

SEQ ID NO: 721987 - DNA, 1020 bp, Homo sapiens
gaaaatacaaataccaacaaaaagatattttccaactattaagccagcaagagtcttcttaaatgtaaattcagtgtgggcagaagaacgggtagatgacctttgcatatactatttttgggattgataagaatttttagaaaagcaatttttacatatataaagatggtattgaatttaatagtgaaaaattagcagttgtatttattggggttggttaaataaataatgcaagagccacacaatggaactctatgcagccactaaaaatgatgcatatttacccttagcaatataaaagcacgtgtgagaaaagtaatatataaaagagtaaatgtatgaaattaataatcattacatatagatgtatctgaatctcaaggatatattaacaatactcatctctagattaactggtgactttaattttaattcttatgtttatactgagaaatgaaatacttataatgaaaaataataattgcatgtgcagatattatctatcatctgcaactcccactctgttctactaacagcactggtcttgagtccagattgacatctaatttacaagattactagttttacctggaactgcatatatccagctttaagaaagaagtcaggaaatgaaacagctgtatgcaaaacaacaccgaaaaagaggcctagtgactaccagacagtttccaatatcttgawcactttgcattcaaattgtgtgtgatcactatagacaaggctcactgtgtgtagataatcagaaatctcttcagcttttacacctagctagccatgtggcttccccaaggtatataactagcacttgttctctagtgttgccccatcttatcaataccagccactcattactaaatacacatctggacaatgatgtacaggtgtgtttcatctgacaactcttagacagattctcattcatcttgaatccaatacaggtaaacagctaacaacttcttgaattaatattgccaaggagactcaaaccctcacatattc

SEQ ID NO: 721988 - DNA, 610 bp, Homo sapiens
tgctcttgttaccattgttttccccagcatcaacatcatcatcatctcttggctacttctgagaaagaaaatataataaagaaatgttcaaatgaaaacccactttaagacactgctaagaatactacagggaactgagatgggttgtcagctaatttgatagccattatccgaactaaatgaaataatggcataagcaacccagttcagcctgctcaagtcaacataaaattgagttaagaatcaaattcttggttcttatcttgaatttgcaaaccaatattrggcccaaactgtgccctcctgcacagttagaagcaaaaccacttagaatgctctagccattcatagagagatgcactgattcccaaacacatttctgcaagcactcagcatggcactgcagatagatagacgtgagtactaggtcttctcccttgattagctcagagagtagatgggaaaatagacatatggaggaaatgcaaaaagtattgtaagaaagttttaaatgtgggtacatatataaagctttatgggagcacaaaaggctacagaaattagctctgtggaggttctgagaacttcaataaataaataccagagaaaa

SEQ ID NO: 721989 - DNA, 610 bp, Homo sapiens
tgctcttgttaccattgttttccccagcatcaacatcatcatcatctcttggctacttctgagaaagaaaatataataaagaaatgttcaaatgaaaacccactttaagacactgctaagaatactacagggaactgagatgggttgtcagctaatttgatagccattatccgaactaaatgaaataatggcataagcaacccagttcagcctgctcaagtcaacataaaattgagttaagaatcaaattcttggttcttatcttgaatttgcaaaccaatattgggcccaaactgtgccctcctgcacagttagaagcaaaaccacttagaatgctctagccattcatagagagatgcactgattcccaaacacatttctgcaagcactcagcatggcactgcagatagatagacgtgagtactaggtcttctccyttgattagctcagagagtagatgggaaaatagacatatggaggaaatgcaaaaagtattgtaagaaagttttaaatgtgggtacatatataaagctttatgggagcacaaaaggctacagaaattagctctgtggaggttctgagaacttcaataaataaataccagagaaaa

SEQ ID NO: 721990 - DNA, 1985 bp, Homo sapiens
tgaaacaaagaaggaagtgagtaagttcccaactgatacttacctctcaagtaagcagccagaatattttaagatgctatgtagtctaatggaaagggcaaaggctttgcaaacaggctaacttggattgaaattccagccctgccacttgttatgtgaatagtcttgggcaactctctgaaactctccatgttctcacatctacaatggtggtaataacaatgaactaaaagccttggtgaggaatagactgtagtcaaaggacctcctggcacagcaactgacccatatactggccctcaataaacaatagctactatcagtagcagtcgtatttcttcactttagcctgccacatttaaacactcacatacacacacacacataagtactaaaaagacttctcctgaaatctgtgcatcaagttttatggataatctctcattaaatggtctcttgtaaaacttcagtatctctccctgactggtcagaggccatgtgggcctcactacttcactacatgattttcctgccagactaaattggctcagattccctcaaaacagttagttcccttaacccaatactactctagactgggaagggggtctgaaatattcatgtatttagtgacatttatgtaaaaactccaaacagaacattttaagttaaatatatatccccttaccaggggactatagcaatcactgatatgtgcacatatataaccagatataatctccaragcgagctgcattctgtaaatttataatatcagtgttaatatgagttaagcacttccctaactcctcccccaaagcagtcactagacccattgctttgaaagcaggatcaaggcaaatacattttcagcccctacacgtaatgggtacacaggatttcattatactctttgctgatgtgtatgtttgaaactttccagagaatgggccagtctaaaggggtgcagactgcgtgcttagcgcagtgcctggcctgtgatgagagctctaccactgggccagttttgttactgtcgttatagggcaggagtgggtttatctctgcactcacactttttatattctggttgactctgtctacaactggctcccaaacaccaatctagcagaacacccaacctggtggtcatggcagacatcttcacacataatggaaattaaagcacagggctcctcaggaaacaataaaaatctgccacccattctatctcccaataaccatgaggaagaagagaaactgtcaggaaggtggaggaccaggtatgaaggataaggaagagcaaagtctccaggatgacatcctagggtctggatccttcttcaaagacaaactcagcatctgaagttcctcctctgctctaattaacaatgggtcagggaaatgagggcctgtggcatagtgtcatgggagagtttggacagaacttgtaaacacccacctcctgacctttctccaaggacagtggccttaggcagtggtaaacaaagatcacccccgaagagctacttttagtcctatttacaacagtaaaagccaaagtactttcccttcctgtgttgtgacaagacaacacaaggcttcctgcaccccgtcattcaactttacccagtctccaggcacaggctgagatctacaaagagaagtgttgctctatgccagagaaatcctatcctgtgtgaaatttcccagagaagggaggtggcataaaagcaaattcaggaactcttcattcacttactctcattcattcatccagcaatttattcatttatttattcatttattcatttccttgacaaacgtttatgtaagcacctcctacctaacgagccagggcagaagaagaatgagatgaacatgctgttgttgtaggggccatgggcagaaaagccagaaaagacaataaattacaaaaataactatagagttacaaccatgataaatgcaatgaggggcacttg

SEQ ID NO: 721991 - DNA, 1408 bp, Homo sapiens
cagggttgggtagggttaaggccttgccccttggcctacattgccaggtttttcagtgggagcacttcctggaggtagtctttccttctcccacactttggggacttacagctttttttgtcaggctcatggtgtagactgcagcctcctgggttttttttttttttttttttttttaaraatctgtggattatttcagttttccagttaagtttttgcatggcttcttggaaaaaagttcacagtgtgaatctctacacactatttgtctttctaagtgggagaggcatgctaacaccacctccaatccaccatcttggaaaaaaaaagaaacatctgttttctttctcctcccatttattcattctaaatctctccaaagggtttacttaaaattttagagatagagacgcatatgacttctatatacagcttttgaaagaagagtaaaatcttgtttaataatagggagatcactataaaactttgtactttaaagctttttacacattctccatctagaaaaaaatacaggtagcaccgaggtctctgcaataaaatgaagggaacgcaccaatatttagaatctattttgtttgtctcaaattatgaagcatttctctgcagtcttacttggtcttccagcatgttgaatgttgctcatgaggagagtgatctcacttgtatgtttgagaaaccaagtcatgttgcttttactgatatcaatagacaaagacatggcaaacagcatgaggattcgatgtagttttgcatcaactattgcatagatcatacagctgttccctactctttttctcagggaagaaagtaaaacttagctagggaaagaaaacaaaacaaacaacaactagaagaaacattgtcgtgtaacaatggttttccctgatgacttttaaaatacatttatttcaaaggatttaaaacgacagcaatgtaattttctttttagaaatactaaaggtagtaatctaaaactagtttcaaaatgtggttcactgatctctccttttccccaagattatcatatctttcttagatatattattctagtttgatgaatgagagcactggaatatgtcaatgctaaagagcagttcttatcataactaataggtcatactgaggcaggatagaattattccctcctgggcctgcctatcctaaaactaacctagtcattgaagttgattgaagtagtaagtgaaatatataaaaacagcaagcatcctacatattatgcttttattttatttacacctttaggaaatgtgcaggtattccttcctccaatgaattcttcccccagtactacattgaattttatagggagatacactcttttttttggtgggagggagagtttgcaatatgagttccttaaatttta

SEQ ID NO: 721992 - DNA, 922 bp, Homo sapiens
tcatagctccagagatacactgttgcttttattccccaattttgcagctcagtaagaggttagagtgagtagataattcgttcagtcatatagacagaatggtagaactagaatttgaacgcatacagggtttatccagagtccacgttgttaaccaccatctccttaccacagttcatggcttcagccctcactgagttacttaagtcaaaactgcagcatcactctctctacctctatctcctttacccatcccctccataaccaatgtggctacatgccctgtccatctcctgaattcctctggaagccatttacttctgtctrccaccactaccaccactctactctaaataatgaccaactcctacttaggcagtaactgccataggcttccagtccccatttagaccttgttttaaagtgatcataaacaaaatgacaacatgagcaatgaaatcatgtggcagtattttgtcagaaggtggtcatccagataatctagaatatgtgtatttaaagaaactagactactactgtgaacaatttcagaatcctttcttaattcctcagtagatctgtgatgccccaggcgctgagttaacccagactcattcttcagacggcagctccaaagtcattcatcagggaagaagcattgcctgaccctcagaaaaggttggatgttaacagcagttgatacgtcttcataatgctcaccacattgtaaccaggtgattcatgtctctgccctcctagatagaaagcttcataagggcaaggactgaaatgtgtgcctttcccatcctggtctcaattacctagtagtgtttggcaaatagtgagttttcaaatatttgtaggataaatggaatttttctataattagaatggccttaatattttctaactctgaagataa

SEQ ID NO: 721993 - DNA, 647 bp, Homo sapiens
aaactattctaaataaaaaatatagttctcatttttttaaaaatttcactgtgagtttagtaaacaagttattagaaatatagctgatgcyggagatcaacaccatcctggctaacacggtgaaaccccgtctctactgaaaaaaaaaaaaaatacaaaaaattagccaggcgtgatgacaggcccctgtagtcccagctactcgggaggctgaggcaggagaatggcatgaacctgggaggcggagcttgcagtgagctgagatcgtgccacagcactccagcctggacaacagagcgagactccatctcaaaagaaataaaaaaataaaaaaagacatatagctgatgcccccagagtgcatctccctaattccatacattccttacccactgaaggtaagatgaattctctatttcttatttcctgcttttctttattatttttctctctaggtttgtatttgtaagtaatgtatactcaatatttattgtcttcaaacttagatatatgccagtgtctaaattaatccatattcctagtttaattgtgagaaaccatcagacaaacccatattgtgggacattctataaaatgcctgaccaatgtttttcaaaagggtcaaataaaaatatacaaataagcga

SEQ ID NO: 721994 - DNA, 1996 bp, Homo sapiens
  misc_feature 3, 4, 5, 6, 7, 8, 9, 10, 11, 12, 13, 14, 15, 16, 17, 18,19, 20, 21, 22, 23, 24, 25, 26, 27, 28, 29, 30, 31, 32,33, 34, 35, 36, 37, 38, 39, 40, 41, 42, 43, 44, 45, 46,47, 48, 49, 50, 51, 52, 53, 54, 55, 56, 57, 58, 59, 60,61, 62: n = A,T,C or G
  misc_feature 63, 64, 65, 66, 67, 68, 69, 70, 71, 72, 73, 74, 75, 76, 77,78, 79, 80, 81, 82, 83, 84, 85, 86, 87, 88, 89, 90, 91,92, 93, 94, 95, 96, 97, 98, 99, 100, 101, 102: n = A,T,C or G
ttnnnnnnnnnnnnnnnnnnnnnnnnnnnnnnnnnnnnnnnnnnnnnnnnnnnnnnnnnnnnnnnnnnnnnnnnnnnnnnnnnnnnnnnnnnnnnnnnnnnnttaaaaattatgcatgrtaaattgtatttgtaatgtatggtaagttgaattaaaaatgtagtctatttaaaactcaaaatcataaatcttattatctcatgtttaatatctttaaggaagatatataagtgtgtgtatgtttaatatatacataactggaatgtgtaaataacaaggaaagaatgataacaatgtcaccaagcaatttgctagaaattgtgcagtatatattttcataatgtctgaattacaatttttttttttttttttttagatggagtctcactctgtcacccaggctggagtgtaatgctgctatctggtctcgctgcaacgtttgcctcctgggttcaagcgattctcctgcctcagtagctaggaatcctgagtaactaggactataggtgcatgctaccacaccctgctaatttttgtatttttagtagagacgggttttcaccatgttggccaggctggtctcgaactcctgacctcaaatgatctgcctgcactggcctcccaaagtgctgagattacaagcgtgagccaccatgcccggccctgaattacattttgtaacatacattccctaaacttgctcactccaccacaaacacataaggctgcaaaattaatatatttagatgccagaaaaacaaaatcccaatggtcctagtattgtttaaattcaattttcaaattatttaaaaaataatttagacttatgcaatattttcaagaggtctggtaaatcaaaatatctaagtaaggaaacataaaaatgcttaaactttgtgaggtaatattcaaaatgaatatacagaatttaataaccttcaacttaattagtcaagaaaatattgagtaatatacataataatatttaactgaatccattttgcttgtgaggaaggtcagagattcatttacagtaccattatctctcaaatatgaaatgttacatagatagtctcttagttctgacagctacagaatgtgccacagcaaccagaaaaggttgaaaacaaaaatcaatgcagtcaaaagtagaatggctaaagttaaaccatgttttggaaataggtttgcagtttctattgcaaaaactatgaattagtccactaaatatttttaaaccaaacatgcacatacttcttttcaattaaaaaaaatgctatgtttcactagtaatttacttaatgactgcattactaagcaattcttcatgaggtttgatcaataatctggttgatatattgaataaaaaccagtactttcatcattttacaataacgaaaaattaatcaggtcttaatatattaaattaactctttttgttggatactgtaacagcaatatggcatttacttctaattcaaaactcacactctacaacttcattctgaatgttagttataagaattagataatcatagaaagagggaatagaaaatagcttagagattcttctcaagtttctgttaatagttgcatgcagaaatagcactctgatattctgagccctattttttcatagatattttaaaagtttagtataaacaatggcatttcaatattagcaaatattattctaaatttgtccgagttaacctatgactatgacttgatcacaatcatcatgaattcccaaatgttttcgtgttttcaagtacacaaataaattccaaaagcccatatttttttttctgattgactacagaaatctattacctctaattatgctttttatcagctttcctgagttttaagtggcatacaagcatgtgaatatgtttaaagtgtaaatttgtaaatatttcttgaaactatcactacattcaatgtaatgaatatatttatctcctacaacagttttccattacctttttgtaaa

SEQ ID NO: 721995 - DNA, 774 bp, Homo sapiens
tgggacttcagattttactggaatgtccctagatgtcattagcctctgaatacaaatgaagttccccaagtttaggctctggctattcaacatgtagtttgtgaaccagcagcacaagtatcatctaggagcttgttagatatgcagtctcaggcttcaccccagaatcggcagtttaaagagattttcaggtgattcaggtttacattaaagtatgaaaagatgttatagactatgtccctgaatttttccattttagaaaattactgacagcaacaccattcatgggtttgagtcatgaatacaaacatctagatccatcracacctgcagctgtcatagtcactgtgttaaacataggtgcaagcaactggccaatgtgtctcctggtgatgtcacatccaaatatttacacattaaaatatatattattttatgctcagttattttatttttatttctcttttacattactgttcaggcattaattttattttcaagctgtgtaagtcagccaactatatttcctatggatttcattcggggagagtaaatgaaatattatagagtatttgttacaaaaagggagcattgggtctaagagaattgacaaccaacggttatgagaagccatccaacaagtttatagcaggaaagtaacatggtcagatttgtttcaagtagattattctggtggctatttggaagatggatttaggatcacaaggctggtggtagagaagtcaatgtgggagaatactactatagtccaag

SEQ ID NO: 721996 - DNA, 1436 bp, Homo sapiens
cggaagttttcaaaccctcaaggatatgtgtgtgtgttctgaacacagttctggaaactgcttcaagccaccttattctgatacggaaaaaaagtgtccgtagttaaaatatcaaacataaggtttatgaattgtatttcagtagtacagaaaaatgttttaaccaatcaaccgaatttcttagtgctatgcagttatgaaagaagacaacttctggttactatcgaaagcaaaaactatcagcaattttgtatgttgaattctatctccctaagtcacaaaatgaggaatatacatctataatattataaaaatttttctgagaattatatgtcttaaatatcctgatattttaaaggcctttttcactgattttccactggcaaataagcactggactcataattatctgaatctacagcattttaacatacgagttgaacaaacatatcataggcccttaaaagtggatcaactctgtcctcagaagttatccagttcaactttacagaggacaaaacagagcctgtagaggtgaaatgacagattttcccaaggtcatatacaattcaaagaagagtcaagactaaaaccttggtctcctggctcctcgtctttagtactctttttagtatcttataatatgcttattttttttctttatgtaatgcagattaatctgattttccttttcttcttttcaaactgaagttctgaatcagctaatcttgataattattgggacaggaagcaaaagactgaaatgactctgtaatcaaagaagctccctgactatgaggggtaattttagtggaagcctgtatcctaatgctggaactacatatctgttctgttttccccattccttttaatttctgtggctctcttttgttctggtaggatagctttagactgatcaaccagatgttgccttgccctttagtatttagctgtttgggaattcttatccacctacttgtttctgacccatggcctgtatccacttaggtcttggtttgtgtttgttaatctgggttctcattggtggcttcaccttctaaccacgagccctggctttgctatattctcagttctctcagtaacagattatactaaactctaaaatcctgagctacctgggaaataatgtgcatttcgtccagaaaatccttaggaatgcttagcatctatttgaaactccagattcaatctacaacctcagtgattasagtttgagataacagtcacatgggtcacaaaggaagcttcctagatacaagtgaatctcattgtatcaaatggttatgccttccaaaattatatgtgagtctgaggggcaattttcaaaataggctttatttattatagcgattttaggttcggagtgaaattaagcagaaagtatagagttccaggaaatttttttacagcgacta

SEQ ID NO: 721997 - DNA, 1436 bp, Homo sapiens
cggaagttttcaaaccctcaaggatatgtgtgtgtgttctgaacacagttctggaaactgcttcaagccaccttattctgatacggaaaaaaagtgtccgtagttaaaatatcaaacataaggtttatgaattgtatttcagtagtacagaaaaatgttttaaccaatcaaccgaatttcttagtgctatgcagttatgaaagaagacaacttctggttactatcgaaagcaaaaactatcagcaattttgtatgttgaattctatctccctaagtcacaaaatgaggaatatacatctataatattataaaaatttttctgagaattatatgtcttaaatatcctgatattttaaaggcctttttcactgattttccactggcaaataagcactggactcataattatctgaatctacagcattttaacatacgagttgaacaaacatatcataggcccttaaaagtggatcaactctgtcctcagaagttatccagttcaactttacagaggacaaaacagagcctgtagaggtgaaatgacagattttcccaaggtcatatacaattcaaagaagagtcaagactaaaaccttggtctcctggctcctcgtctttagtactctttttagtatcttataatatgcttattttttttctttatgtaatgcagattaatctgattttccttttcttcttttcaaactgaagttctgaatcagctaatcttgataattattgggacaggaagcaaaagactgaaatgactctgtaatcaaagaagctccctgactatgaggggtaattttagtggaagcctgtatcctaatgctggaactacatatctgttctgttttccccattccttttaatttctgtggctctcttttgttctggtaggatagctttagactgatcaaccagatgttgccttgccctttagtatttagctgtttgggaattcttatccacctacttgtttctgacccatggcctgtatccacttaggtcttggtttgtgtttgttaatctgggttctcattggtggcttcaccttctaaccacgagccctggctttgctatattctcagttctctcagtaacagattatactaaactctaaaatcctgagctacctgggaaataatgtgcatttcgtccagaaaatccttaggaatgcttagcatctatttgaaactccagattcaatctacaacctcagtgattagagtttgagataacagtcacatgggtcacaaaggaagcttcctagatacaagtgaatctcattgtatcaaatggttatgccttccaaaattatatgtgagtctgaggggcaattttcaaaataggctttatttattatagcgattttaggttcrgagtgaaattaagcagaaagtatagagttccaggaaatttttttacagcgacta

SEQ ID NO: 721998 - DNA, 1228 bp, Homo sapiens
tttaaattcaacaatcctgaaaaagcagagtttaaagcctgggaattttttaaaaaatcattcttctgtgctcaccattttttctactcttagctctttagatcagtatactattagaataaaagatgctggagaacagattttataatgtcatgattcattgccctgataagaacctacaaattcccacactgggagaatggttcagatctgaaatggggaggtactctgaattctctcctgtgcaagagcttctggagtcttctgaaataagaatggttacagtcctttaacctgcattctgtttatgacagtctactggtttttgttttagactatttctcctcttcttggttctctgcaggaaacatgtaatttgggtattatgagatcccctgagggggtgggggaacacccaagtgccaatgttctaccaaagccatgtcttttggtatttattggtatgatgttacaagaagctaagaattcacaaagtggcagatccctccccagaaagatctctaaggtaaggctgaaggtcacagcagaggtatcctgatatccttgaaaatgctccccactcctcaattgcacaaagtgtctggtgtgcagattaggagttggcaaaattagagagaattttgaaacgctagacgaggggagagatatgtcttctttttatgtgagtcttgctaaaatctccattttggaagtgaggctagaaccatccttgtaatggattctgtggaactctaaactaggcatcatgcagcaacaacatctcctaaacctcaataatgcagagaaatttttctgtgatttaagctasacaaagagccacatctagagaaagggtggtatgggaaccaatattatataaggtccatctagcaaggaaattttgtttcttacaatagctcccagggatcatttatagagaggtgttatcttttgattttatcatgacaacaatttcagaaatagagagatgctcctgaaaaacatcaatatcatctaacaacttaggaatcaaaactttctttgagtcttaaaactatgaaaactgtaactattatattcaacttgagttttaaagcatagaagaaaaagtgatttaaggagctgggcaactgcaagggtaaaattagcatcgaatacaaaccaaaatattattccagtaaattggtcataacagacaaattgctggaaagaagaattaggaggaaga

SEQ ID NO: 721999 - DNA, 971 bp, Homo sapiens
cagtagctccatccatggcacaccaatagcttatagtttatgaccctcctttctttgactacctgcattcctggacttctttcatgaggttctgcccctggatctttaccaatatatttgggcatttagtacatgcctggaaagttctgccttgccttattgcttggtaaatccttcctatccatcctttaaagactcagttttagcattgccttctcagcctttctccctctccctctcctccagatacagctaggtgtaccttctaaggcattatttgtgtattcttaacacagcatttcccatattaatctgcattgtttatctttktatccttagtacattgtgtcatgtctaacacataagagggtatcattgatcactcttaggtgactggaagtttcttctggtctctggtccaagaataacaaagttgtacatgggaaccgggccaacagttttcttttcaggatggtaaaggccaaactaagtacctccctaaggacagttccattcactgttcatccattaattcatcctacaatttatgtatcaagaattattagctttgcaagcctcaaactgaagtcaagactaagggtatttaactagtcctttgggacatttgttgagacagagattttaaatgcactgattgttagactttttgaaggattcttataatgttccaatgatagaagaatcagaaagtcagcatatgataagagttgaatttatagcttgtctctttacttccacatgaggtttacagaaaaacaaaagaagcactcattatcccctatctcctcttactattatacttctgatttgtattgaatgcaagaggtttattttcacagtcccacattttgttcattttaataaagttaaaccagtaaaagtataataaatactgtagaaataaaaactgtagaaactattcaccatatagattttggagccaaaataat

SEQ ID NO: 722000 - DNA, 971 bp, Homo sapiens
cagtagctccatccatggcacaccaatagcttatagtttatgaccctcctttctttgactacctgcattcctggacttctttcatgaggttctgcccctggatctttaccaatatatttgggcatttagtacatgcctggaaagttctgccttgccttattgcttggtaaatccttcctatccatcctttaaagactcagttttagcattgccttctcagcctttctccctctccctctcctccagatacagctaggtgtaccttctaaggcattatttgtgtattcttaacacagcatttcccatattaatctgcattgtttatctttgtatccttagtacattgtgtcatgtctaacacataagagggtatcattgatcactcttaggtgactggaagtttcttctggtctctggtccaagaataacaaagttgtacatgggaaccgggccaacagttttcttttcaggatggtaaaggccaaactaagtacctccctaaggacagttccattcactkttcatccattaattcatcctacaatttatgtatcaagaattattagctttgcaagcctcaaactgaagtcaagactaagggtatttaactagtcctttgggacatttgttgagacagagattttaaatgcactgattgttagactttttgaaggattcttataatgttccaatgatagaagaatcagaaagtcagcatatgataagagttgaatttatagcttgtctctttacttccacatgaggtttacagaaaaacaaaagaagcactcattatcccctatctcctcttactattatacttctgatttgtattgaatgcaagaggtttattttcacagtcccacattttgttcattttaataaagttaaaccagtaaaagtataataaatactgtagaaataaaaactgtagaaactattcaccatatagattttggagccaaaataat

SEQ ID NO: 722001 - DNA, 876 bp, Homo sapiens
cagcctaaagcgggcctctcctaaaccatcgtgtttacatctatgctgtttaatatggacaatgaacagatccacagaccaattaatagtcatttaaaagcatttactcagtccccacaacagtttatagaaagtacatttagaaagcaatccgggttattgctattctaaagtgcttggggatcccagatgaaaggcccttgtaactggaaagtatttataactcaagaagaacccctccacacccatgttatacaacaccaacaccatctcctggcacgcctgacctgtcggcccatgcagcaagtctgtttgaattacactgtaacttctatagggtggagaccttgtttttatggtttgtaaaacatcatgaataaccatggcactctgtaaataaatagaaaccacatgaaacagaaaatagatgctgttcaatggccacctccccagmacattcaggaatgtatcccttgttccaaagtgcttggagtaaatgaatgccactctggagaggcggcctatgtgatactgtcagaacctttatccctctttaaaaggaagtgtaatcgtgttttctagtattttattcatctttaggggcactctacgaggagagtccttggtgttgctcttgttaatgaaagagtaaagatcagtgcacagagagatgaaatgatttgcataaagccatagagcaaaccagaggtgaaatgggaccttgtccaaatttggttccaatttcagcctgttgttcttcctgtaatacttctggaatagagtagtagcagttcttcataagaagccccatcatggctctcagagagcagctatgactttggcccccgctacccgcttcagccatgaagtggtgac

SEQ ID NO: 722002 - DNA, 1469 bp, Homo sapiens
tcttcctggttaagccttttgagaactctacaattatttattattactcccatttcacaggtgtagaagctgaggttctatgataggtcatgcagctggctcaagacaggctggaggccgcacttcagactcctgcagcacatgctcctccatcctcccagcagctccctaagaaagcctgctgtggtcctaaaagtaacatgcccagcaggggggctgtgcatgagagtggagggcaggatggctggaaggttttccaaggaaaagataacctaagatcacttgtccagcatctgtcggtttccagttgaagaaactgaggctcaggggttaagtaactcctatggtctgtaagacatcaagtgtagtagttaggacttgagtgcagacagcctgactgcaggacctgtacttcagccaccggagaaagcgcctctcacatgttggtttcaatgctgtagtttgtgttcacaaagtgtttgtgactcttcctcctcctctcccagtcttataataccacactgctgccagtgctctaaatacagctcagtcttatcagtggtttgcttgaaattctttactgtgtccccattggccctctggttaaattccaagcatcaaagatgtatttattttacaaatagaaaaatataacatgtgcaatttttcttaaactccgaactgtaacatgcaagatctggcctgtgtctaatttacactgtccacacactgcccccgcaccaaactatcccctaaccagcacatgctgcttcctctgcttggaattgttctaccttcccttcactgcaagatttagcactgtgtctgctggtaaacaaccttcccagcctaatttagcttcacctcccatgaggccctgcagaaacctgtcataatctgccacaacatttatcacgctgcattgcaaactgacttgtcatttccccacaagccagtgagcatcctacgaatacatctttcatctttgtgcccccggtgcctatctcggtacctggcacacagcagacactcaataaatgttcattagctgaatgaacagaggaagagcaaacaacctggccaaaataacagaactgggatttgaatttacagtccctccatttgttttgctcactcaccaagtattattacctgtttccatcactctgttttaatcatgcatttgtaactcagactaaaagtgacatcacattttatttaggtttagtttctttaattcaaattttgaatctgaaatatattcagaaggttttttttttcaaatttaagtagaaaacagtatgccttccagctgctcagctcccttcccttgaacaactggagttgctagtttcctgtgtccccttcctrgaatgtataatgcatatatataagcaaatacagatagatacatacacagatagatattatatgcaaatcttagcatattatacacattgttcagagtc

SEQ ID NO: 722003 - DNA, 975 bp, Homo sapiens
tggaacttactacaacttatataccttttttctttgtttgtttattgtctgtcaccccatccaggcccccagcacagagcctggcacatattagatgctcaaaaaaaatttgttaaatgaatgaatgcacgagcttcaaaaattgtttgagttttcttgataggatggctgtgacaatcaaaactaattgcatccaatatacatcaaagatacaaaaaattgcatctttcaagaactacaagatgccactttctgcagaaatgccaatacataattacaggaaagaaaaaactcatgattggtgcaagaaaaaactgaccaagcgttatcatgtaatattttaatgatccgtttatatgtctgctaccccagtggattctgtgctttctgagagctggaactgggttttgtttctattttatgtccaaatcatagcacagtgcctggcatataccacttgttcaatatctgtttgttagggggaaagaagggaagaaaggagagaaagagagggaaaagagaaagaaggaagggagagatgcagggaaaaaaggaagaaagaaggaaggaaggagagaaggaaggaaggaagggagggaaggaaaataagtttcaagtaagaatgtagcagtaagcctaagaaatgcccaacagattctttacaactgacaattattgagtcgtaggatctctgagctgggaatgacctttatttgtctaattccccagttgaagatttgaagagaaatttcaatgcagagagactaagtggcacatagctagttaaaacataaccaagataagaactcaggtttcctaacyccaaatctataccatgcaggttccttctggcagagaactaataggctgaaactacagtcacacaaatctgattatttggggcaagtacaagagggtttctagtaactttgcagttgcaaaccctgatgcagctgaagcctcttgatgaagccc

SEQ ID NO: 722004 - DNA, 618 bp, Homo sapiens
atcacctttaaccaaataataaaatttaacatcacttacagtggaagaaactgacatttttcatcccttgatatgatgggctgagagggacacaacatcacctctgtgatattcctgccaaaaaggtttgatctgaatctcattatgaggaaatagaaaaatccaaatcgaaggtaattctgcaaagcaactggcccatcttcttcaaaaatgtcgatgtcatgaaaaacaagactgggggactcttctagatgaaaagattctaaagagtgggaccactaaatgtaatgcatgatcctgagttgaattctaggttgaacaaaagctataaaggaacattatcggtataaatagagaaatgtgactatgaattagaaattagaaagtactattacaccagtgtttgctttcttgagtgtggtaattgtatgtggctaggagggagaatattcctggacttaggagatacgtgcygataagggattaatggtacaatgtctgcaacttactctcagatggttaagcaataaaataaaaatatatatgtgtggatgcatacataaaagctggcttcatttctgtggtattagaggtgaagtaatccaggcctaggcaagt

SEQ ID NO: 722005 - DNA, 1423 bp, Homo sapiens
caagctattaaccaccacactgttgttagagtgtccagatagtagagcacagaaaggtaagaaggtaagggaaagactcttaaatatctacccttgagaagtaggaagtagggacctcaaaggatggaaatgtactcataatcacaccagccttcctaatcaaaagacaagtttccactcacacaaaaatgtgaacccatagaaattattattatatagaaacactaagttatggcttaatgtacatctctgaaagacatagcttactgggaatattagtctgttttcctgctgctgataaagacatacccaaaactgtgtaacttataagaaaaacaggcttaattgactcagttctatgtgggtggggaggctcacaatcatggcagaaggtaaaaggcatgtcttacatggtggcagacaagagagaaaaggagagccaagtgaaagtggaaaccccttataaaaccatcagatctcctgagacttattcactaccctgagaacagtatgggggaaaccaactccatggttcaattatctcccacagaatygctctcacaacacatgagaattatgggagctataattcaacatgagatttgggtggggacacagccaaaccatatcgttggactagcataagcagagccatctgattttaaaaaacttcacatttcttttattcaggcatatgaaatagcaaacattttttcttgacttaaaagtttatgttgggttcccaaagaattcgtcttttcaaaattaggtgactttatcatcaccataaatcaatgacagataaatcaaaaacagaagaaaaatataaaattaaagaagttgctttcagatgtaagaacaattccagaccattggctcttggcaacaccatcgacttcaaaggaacacattgattttggacttctgattctcatacaaaacagtaatgagaacaagccagaaaaacttcattatactattttttacacccaccagatagccgaggtcaaagagaacctgaatgaattaaactccagaaaatgatgaactcttctagaagagaagaaacttgcactgctatcatcaaaatcacctgcactggggcaaggagcaaccagctaaattttaatgaactttcaatggctatatgtggcctgtatcgattaatggaaatcctaaggagcccaagccatttggagtttacactcacttattaactttttttgagtctttagtgaatgcatgaatagttttaatgcaacgaaatctgagagagttgagagcgtgcccccatcccctaaggcaaataggccttcttccacaagtaaggctacatcttgctgaagactgagggtagtaatgcaggattgctagaagtcatgaagcactccaagctgtcatgcaacacacttgtaaaggcctt

SEQ ID NO: 722006 - DNA, 2026 bp, Homo sapiens
cattttcttctagtatcattttgtggtaggcatggctgggaatgtgcagctttgctttttttttttgaggagtttcgcttttgttgcccaggctggagtgcaatggctcgatttcagctcactgcaacctctgcctcccgggttcaagcgattctcctgcctcagcctcccgagtagctgggattacaggcatgtgccaccatgcctggctaattttgtgcttttagtagagacggggtttctccattttggtcaggctggtcttgaactcccgacctcaggtgagccaccttcctcagcctcccgaagtgctgggattacgggcgtgagccaccatgcctggcactgtttttttgagatggaatctcgttctgtcaccccggctggagggcagtggcgcgatctcagctcactgtaacatctgccgtgggttcaagcgattctcctgcctcagcctcccaagtagctgggattacaggcacgctccaccacacccagctaatttttttgtatttttagtagagatggggtttcaccatattggccaggctggtctcgaactcctgacctcaagtgatccgcctgccttggcctcccaaagtgctgggattacaggcatcagccaccacacccagccaacttaacttttaattttttctcaggtaaatttgttcaatttcttttttttttttttgagataatctctgtcacccccaggccagagtgcagtggtgcaatctcaactcattgcaacctccacctgccgggtcccagtgattctcccacctcagcctcccgagtagctgggattacaggtgtgggctaccacactggctaatttttgtatttttagtagagacggggtttcaccacattgctcaggctggtctcgaactcctagcctgaagtgatcctcctgcctcagcctcctaaagtgctggcattacaggcgtgacgaccgtgcccagccgaatagctcatttagatggctgcatgtggtcactgcccctgcacgggtggcacccaacttccagtcgaatcctgcttcttggtgccctgatatggcagaatcccccagacaccacccctactccagctcctgaaataaaccactccagacaattttatttttccaattaaatcttttctttttttttaatgaaaaaagatcacacagaatttgccaacaaacaaaattccaaaagaaacattaaaaaaaaaaaaaacaataattcccccaaaaaacaaacccaaagtctggctattccttccctcaagattgtctggtcgaggccttggtttccctggaaggcctggggcctggttaagtgctttctggggcccaagcagggaccctgggctcgggccggctcctgctctccctaacacttctctatcctggggggtgagtacrgtacacttggcggggtgggcggggggtgtgctggagaccgggaggctggtgaagccggtgctagacactacaatctaataggaaataaaaaataatattctgcacatcagaatgtgttttttttataattttatagctatttttcacagttttaaaaagtttatatatatttatatatatttatctttatatatataattaaaaagttgactccatttaaaggcttaggatacaggggcagggcgagtctcttggtacaataaaactgtacaggttaagaagtgccacctccctcctgggtggggaggggccgggcgtggcaggcgagggtttcagcaccattggggttttctgtagtgtgagggtttggaccagggtgggcctgtgccgggccctctccacctggtgcctttgatactccgggctgcaaccccaccctgctgtgttccccaagtctaggccatcctgagagggtgggggcaaggcctggcacagtcagtaggccagctgcatcgggcaccccatcccatgcacggtgggaggccttggggtgggctccatgctaagggtgcccgggaagcccagagtgagcgtcagtttggttccttagaa

SEQ ID NO: 722007 - DNA, 2026 bp, Homo sapiens
cattttcttctagtatcattttgtggtaggcatggctgggaatgtgcagctttgctttttttttttgaggagtttcgcttttgttgcccaggctggagtgcaatggctcgatttcagctcactgcaacctctgcctcccgggttcaagcgattctcctgcctcagcctcccgagtagctgggattacaggcatgtgccaccatgcctggctaattttgtgcttttagtagagacggggtttctccattttggtcaggctggtcttgaactcccgacctcaggtgagccaccttcctcagcctcccgaagtgctgggattacgggcgtgagccaccatgcctggcactgtttttttgagatggaatctcgttctgtcaccccggctggagggcagtggcgcgatctcagctcactgtaacatctgccgtgggttcaagcgattctcctgcctcagcctcccaagtagctgggattacaggcacgctccaccacacccagctaatttttttgtatttttagtagagatggggtttcaccatattggccaggctggtctcgaactcctgacctcaagtgatccgcctgccttggcctcccaaagtgctgggattacaggcatcagccaccacacccagccaacttaacttttaattttttctcaggtaaatttgttcaatttcttttttttttttttgagataatctctgtcacccccaggccagagtgcagtggtgcaatctcaactcattgcaacctccacctgccgggtcccagtgattctcccacctcagcctcccgagtagctgggattacaggtgtgggctaccacactggctaatttttgtatttttagtagagacggggtttcaccacattgctcaggctggtctcgaactcctagcctgaagtgatcctcctgcctcagcctcctaaagtgctggcattacaggcgtgacgaccgtgcccagccgaatagctcatttagatggctgcatgtggtcactgcccctgcacgggtggcacccaacttccagtcgaatcctgcttcttggtgccctgatatggcagaatcccccagacaccacccctactccagctcctgaaataaaccactccagacaattttatttttccaattaaatcttttctttttttttaatgaaaaaagatcacacagaatttgccaacaaacaaaattccaaaagaaacattaaaaaaaaaaaaaacaataattcccccaaaaaacaaacccaaagtctggctattccttccctcaagattgtctggtcgaggccttggtttccctggaaggcctggggcctggttaagtgctttctggggcccaagcagggaccctgggctcgggccggctcctgctctccctaacacttctctatcctggggggtgagtacagtacacttggcggggtgggcggggggtgtgctggagaccgggaggctggtgaagccggtgctagacactacaatctaataggaaataaaaaataatattctgcacatcagaatgtgttttttttataattttatagctatttttcacagttttaaaaagtttatatatatttatatatatttatctttatatatataattaaaaagttgactccatttaaaggcttakgatacaggggcagggcgagtctcttggtacaataaaactgtacaggttaagaagtgccacctccctcctgggtggggaggggccgggcgtggcaggcgagggtttcagcaccattggggttttctgtagtgtgagggtttggaccagggtgggcctgtgccgggccctctccacctggtgcctttgatactccgggctgcaaccccaccctgctgtgttccccaagtctaggccatcctgagagggtgggggcaaggcctggcacagtcagtaggccagctgcatcgggcaccccatcccatgcacggtgggaggccttggggtgggctccatgctaagggtgcccgggaagcccagagtgagcgtcagtttggttccttagaa

SEQ ID NO: 722008 - DNA, 2026 bp, Homo sapiens
cattttcttctagtatcattttgtggtaggcatggctgggaatgtgcagctttgctttttttttttgaggagtttcgcttttgttgcccaggctggagtgcaatggctcgatttcagctcactgcaacctctgcctcccgggttcaagcgattctcctgcctcagcctcccgagtagctgggattacaggcatgtgccaccatgcctggctaattttgtgcttttagtagagacggggtttctccattttggtcaggctggtcttgaactcccgacctcaggtgagccaccttcctcagcctcccgaagtgctgggattacgggcgtgagccaccatgcctggcactgtttttttgagatggaatctcgttctgtcaccccggctggagggcagtggcgcgatctcagctcactgtaacatctgccgtgggttcaagcgattctcctgcctcagcctcccaagtagctgggattacaggcacgctccaccacacccagctaatttttttgtatttttagtagagatggggtttcaccatattggccaggctggtctcgaactcctgacctcaagtgatccgcctgccttggcctcccaaagtgctgggattacaggcatcagccaccacacccagccaacttaacttttaattttttctcaggtaaatttgttcaatttcttttttttttttttgagataatctctgtcacccccaggccagagtgcagtggtgcaatctcaactcattgcaacctccacctgccgggtcccagtgattctcccacctcagcctcccgagtagctgggattacaggtgtgggctaccacactggctaatttttgtatttttagtagagacggggtttcaccacattgctcaggctggtctcgaactcctagcctgaagtgatcctcctgcctcagcctcctaaagtgctggcattacaggcgtgacgaccgtgcccagccgaatagctcatttagatggctgcatgtggtcactgcccctgcacgggtggcacccaacttccagtcgaatcctgcttcttggtgccctgatatggcagaatcccccagacaccacccctactccagctcctgaaataaaccactccagacaattttatttttccaattaaatcttttctttttttttaatgaaaaaagatcacacagaatttgccaacaaacaaaattccaaaagaaacattaaaaaaaaaaaaaacaataattcccccaaaaaacaaacccaaagtctggctattccttccctcaagattgtctggtcgaggccttggtttccctggaaggcctggggcctggttaagtgctttctggggcccaagcagggaccctgggctcgggccggctcctgctctccctaacacttctctatcctggggggtgagtacagtacacttggcggggtgggcggggggtgtgctggagaccgggaggctggtgaagccggtgctagacactacaatctaataggaaataaaaaataatattctgcacatcagaatgtgttttttttataattttatagctatttttcacagttttaaaaagtttatatatatttatatatatttatctttatatatataattaaaaagttgactccatttaaaggcttaggatacaggggcagggcgagtctcttggtacaataaaactgtacaggttaagaagtgccacctccctcctgggtggggaggggccgggcgtggcaggcgagggtttcagcaccattggggttttctgtagtgtgagggtttggaccagggtgggcctgtgccgggccctctccacctggtgcctttgatacyccgggctgcaaccccaccctgctgtgttccccaagtctaggccatcctgagagggtgggggcaaggcctggcacagtcagtaggccagctgcatcgggcaccccatcccatgcacggtgggaggccttggggtgggctccatgctaagggtgcccgggaagcccagagtgagcgtcagtttggttccttagaa

SEQ ID NO: 722009 - DNA, 588 bp, Homo sapiens
tgagagatgragagcaaatgagagacagaagacaaggatagacagaacaagagatccaaagacgcaggagagacagagaccgagactgagatcgagagacccagagagacacagagactgaaagatagaggttgggagagacccagagagagtcagagggcaagaatggccagagactcagagacagacactgggagagcagaggagacccagagacagagatagacgcagagaccgggagagacagagaacaggagccaggcactgagagtggcaggtcagaggctgagggagaccatgggggacagagcagcagatgctgagctgagccctgtctgagctgcccggaagacggcagcatccccaacccacccaccaccaccaccacctacctccatgaagtccttcctctggctggagacctgcagggccgccgggagtctgcggctggacttctggtcccagtgctgtgtgggggagagaggaggggcttgggtgcacccaggggctgcagcacctgaccccaggccccaggacagggctgacccactgggcagggctgctgatgctccagcacccagaatgcct

SEQ ID NO: 722010 - DNA, 575 bp, Homo sapiens
tttgggaggccgaagtgggtggatcacctgaggtcaggagttcgagaccagcctggccaacatggtgaaaccccgtctctactaaaaatataacaattagccaggcgtggtggtgggcacctgtaatcccagctacttgggaggctgaggcaggagaattgcttgaacccaggagacggaggttgcagtgagccaacacgatgccactgcactgcagcttcggcgacagagtgagactctgtctcaaaaccaaaagaaaggacacttgtgaaactgcccaggtcatcaagggtgtgcttatatgaaaagccacgaagtgtctgaacgatgtcactttacagagacagtgtgtacctgtattagttcgttttcacactgccataaacaactgccccagactcggtaatttataaaggaaagtgactcacacagttcagcatggctggggaagcckcaggaaacttacgttcatggcagaaggcgaaggggaagcaaggacttattcaacaagatggcaggaagagaagtgccaagtgaagggggaagagccccttataaaacgatcagatctcgtg

SEQ ID NO: 722011 - DNA, 646 bp, Homo sapiens
tgctagtcaaagaaatttgatgatgtgtaactgattttcatatttggaatttatcttgagatacacttctttgaaaagtaatgtcctaggtgacgaattggcaatgcttgagtacaagtagacraccattccatataattcaactgaaatattcatggtcaatctttttaaaattcataaattgcggcctgggtgacagagagagactccatctcaaaacaaaaaaaaaaaaggaaaaaaaatcataaattgccaagattagccttccgcagtctctgtatccagttccaaaggatccatggccctcttgtgccacaggctggcattcactgtgagaccatggcaatccccacacagaaaacagccctgctccagatacacaatgggtagatcagaatattgttggatgatgaaagaagaaacttagagtgactacatttttgctaatttgcttatttaatagctcttcaaaaccataagatatcaaagaagtagcctggtgccttttcattagactctgcctggccaatcgctgactcctgagcccttgaattcgcttcttcagttcactatccttataaatacagctaagtgagtgattggtgaacagatgtgactggtgtcccaaaatgattatcatcagctg

SEQ ID NO: 722012 - DNA, 646 bp, Homo sapiens
tgctagtcaaagaaatttgatgatgtgtaactgattttcatatttggaatttatcttgagatacacttctttgaaaagtaatgtcctaggtgacgaattggcaatgcttgagtacaagtagacaaccattccatataattcaactgaaatattcatggtcaatctttttaaaattcataaattgcggcctgggtgacagagagagactccatctcaaaacaaaaaaaaaaaaggaaaaaaaatcataaattgccaagattagccttccgcagtctctgtatccagttccaaaggatccatggccctcttgtgccacaggctggcattcactgtgagaccatggcaatccccacacagaaaacagccctgctccagatacacaatgggtagatcagaatattgttggatgatgaaagaagaaacttagagtgactacatttttgctaatttgcttatttaatagctcttcaaaaccataagatatcaragaagtagcctggtgccttttcattagactctgcctggccaatcgctgactcctgagcccttgaattcgcttcttcagttcactatccttataaatacagctaagtgagtgattggtgaacagatgtgactggtgtcccaaaatgattatcatcagctg

SEQ ID NO: 722013 - DNA, 600 bp, Homo sapiens
ttcattggtaagctcttcctgaactaagccaaatgcagctgtacgtcatctacgtcaaggctttcccatgtgccgtccccttggggtcacttccttagggcttctctactcctctcctttgcctgaagattagcatgcggtaaacaaaaagcacccagcataggatttgggacatggcaagagctcaaaaatatgcttctttccaattattatacttcatcctttcctcaaccaccctattgccatctgaaaaccagcatccttgttctacatttttagcatatttctagaatgtcaaatctccagaactggcgggaacaatggcatggaagagagaaggaaagctttggcatgggagagacctgcctccattgtacactggatgtatcaccagttcagtccttgggcragctacgtactaatgaagcccttcgagcaataatctcctcctctctgagggagaggcagtgatggcatcctcacatttgtgtgtgtgtgaggataaaagtgcaatgatcttgtgaagcatctagcatcatgcctggtgcatgcttagtaactcttctctcacttctaccctccttccccgcccactaagcg

SEQ ID NO: 722014 - DNA, 1044 bp, Homo sapiens
tgaatagtaatatctgtaactgcaattgaggcaggagaatcacgagagggaatgaatgctggagatctcagagtgggacctagtgagaattgatccagtatggatggggccagaggaagaagccacagaggatggggcaggggagaggggactgatgggaaccctggcaaaaccattagcaatgtagagaatttgggagagagctcagttttcagaagatagtcttactatgattttggaaatgttgtgttagttatagaggaatgggaagtggcatttttacttcccagcttggcagtacagaaagacaaactaaaacagaaacttcccaactttttaactcatccacagcaaaacaaaaacagaaacaaacaaacaaacaaacaaaaaaacatgtgacaatacttgctcttcctctacataatgtactctgacttttcctatcctattctactgaatttcatggtgggggcgtgggtggagaaggagaacgccggctgcctctcgtagaattgatttcatgactcacaaatggrgaagggcccaaagtttggctaagacttcaccagaagcagggtggagtggagcagccagtcctcatggtcaccacacacggactttatgaaagacagaaccaagagaggaattgatattggcaagaatgggaaattgagaatacttaatgttcaggggaatcaaggagggcagggcttctaaaaggccccttatttttacaatgagggcatcagggaccttccaaggaactgtttcagtcagtgagggaggtggaagcaagattggaaaataggagtaggcataaggagatgaaagagggaggggtgttaaaggcttgcctgcatgcagaggggagggagccagcaaagaggaagtgattgaaggtgtcccacagtgagctgtgtgggtgcgagcggaggtggtaatggatggagccaagtccacgtggagatggaaaatcctggaatgagctgggacaaagagcactctgggaaggaggccgggtgcttctttctctcagataggaaa

SEQ ID NO: 722015 - DNA, 1044 bp, Homo sapiens
tgaatagtaatatctgtaactgcaattgaggcaggagaatcacgagagggaatgaatgctggagatctcagagtgggacctagtgagaattgatccagtatggatggggccagaggaagaagccacagaggatggggcaggggagaggggactgatgggaaccctggcaaaaccattagcaatgtagagaatttgggagagagctcagttttcagaagatagtcttactatgattttggaaatgttgtgttagttatagaggaatgggaagtggcatttttacttcccagcttggcagtacagaaagacaaactaaaacagaaacttcccaactttttaactcatccacagcaaaacaaaaacagaaacaaacaaacaaacaaacaaaaaaacatgtgacaatacttgctcttcctctacataatgtactctgacttttcctatcctattctactgaatttcatggtgggggcgtgggtggagaaggagaacgccggctgcctctcgtagaattgatttcatgactcacaaatggggaagggcccaaagtttggctaagacttcaccagaagcagggtggagtggagcagccagtcctcatggtcaccacacacggactttatgaaagacagaaccaagagaggaattgatattggcaagaatgggaaattgagaatacttaatgtkcaggggaatcaaggagggcagggcttctaaaaggccccttatttttacaatgagggcatcagggaccttccaaggaactgtttcagtcagtgagggaggtggaagcaagattggaaaataggagtaggcataaggagatgaaagagggaggggtgttaaaggcttgcctgcatgcagaggggagggagccagcaaagaggaagtgattgaaggtgtcccacagtgagctgtgtgggtgcgagcggaggtggtaatggatggagccaagtccacgtggagatggaaaatcctggaatgagctgggacaaagagcactctgggaaggaggccgggtgcttctttctctcagataggaaa

SEQ ID NO: 722016 - DNA, 897 bp, Homo sapiens
tttgtttgttttttgagactgagtctcgctctgtcacccaggctggagtccagtggcgccatctcggctcactgcaagctctgcctcccaggttcacgccattctcctgcctccgcctcccgagtagctgggactacaggtgcccgccaccaagcctggctaatttctttgtatttttagtagagacggggtttcaccatgttagccgggatggtctcgatctcctgacctcgtgatccacccgccttggcctcccaaagtgctgggattacaggcgtgagccaccgcgccggccgggtgtttttatttttatcatagcatttatttatttgtttatctttgttttgttttcttgtttgttgtttttctgagacggaatttcgttcttgttgctcaggcaaaatctcagctcactgcaacctccacctcaccggttcaagtgattcttgtgcctcagcctccagagtagctggaattacaggcacccaccaccatgcctggctaatttttgtatgtttagtagagacagggtttcaccttgctggccaggctggtctcaaactcctgacctcaggtgatacaactgcctcagcctcccaaagtgctgggattacaggtgtgagcctctgcacccggcctatcayagcttttaattctacaaatatttaatcccccataagatgtcattgttattgctctttgcaaccaatattctattgcatttataccagatttactctttgagttgcccttcattttttcctgcattttccacaaacaactagtaaactctgggtgatgtctccactcactaagaagtgaacaagggctctaacggcccctggagggcaaagctgggatgtagcaggagtcacagtgaaatagaaccataagtcc

SEQ ID NO: 722017 - DNA, 589 bp, Homo sapiens
ccagagggtctggaagaaactttgtgggttcagaagcttccttatcttccaacacatgcayagccactagctcatgtttctatggtgggagggaagagtaggcattgttttcctgatctttagaagtgagaaactggaggccaggcatggtcgctcatgcctgtaatcccagcattttgggaggccgaggtgggcacatcacttgaggtcaggagtttgagacctgtctggccaacatggcaaaaccctgtctctactaaaaatacaataattagctgggcatggtggcaggcacctgtaatcccagctactcaggaggctgaggcaagagaatcatttgaacctgggaggtggaggttgcagtgagctgagatcacgccactgcactccagcctggacaacagagtaagactccatcgcagaaaaaaagaagaagaagaagaaacaaggacccagagaggtgaggggacatgttcaaggtggaaggcaaatccctaagctgatatttcctattcttagactagaaaatatcagtgaatacatctgcacctttcaggagaaataaattcttccttttttcacccccttt

SEQ ID NO: 722018 - DNA, 653 bp, Homo sapiens
atatattatatattatattataaatatattatatctataatatctataatatatattatatacataccatggaatactatgcagcataaaaaaagaatgaaatcatgtcttttgcagcaacatgaaaggagctggaagtaattattctaagtgaaacaattcagaagcagaaaataaaatagcacatgttcttacttataagtgggaactaaacaatgagtacatatggacaaaaagatagaaataatagacagtgggggctccaaaataggagagggtagaaggaggtgagggttgaaaaattacctattgggtacaatgttcactatttgggtgatgggtatactaggagcccaaaccttgccattatgcaatatatccatgcaacaaaccaacacatgtaccccctgaatccataatttwaaaaaaaatgaaaaacaaaaatgtaaaaagttttaaaaagatagaagtgagtactatcaagctgaccataatgaagatactagttgatgtttcaatgaaaatgtgtatttactgatctgagtcaagacaggtaaacctcagacacctcagctccaaccccaacaagtatctgaactctgctcttggccttcctcctgccctttggacttggactttgttttgctttccct

SEQ ID NO: 722019 - DNA, 1083 bp, Homo sapiens
ggtgtcttaatgaaggctttctgcaagtagaaagttggctggataataggccattagaccatgaacagagattttaaatttatatttccttttcatcttctttccattaagccttgatggataaaaaattatgtagcaattgactgcagcctacatcagaccattttctgtggagaaaatcatgataatggtagttggaccctaaaactgtttgaaagttattttcatagaaagagatcttttttttcttcataaatcagttgtgttttatgaaaacataaatggttcccctgttttggaatgctgctgcaaattctttttgcatctgacgtataacttttaagcttcaaagaaatactataaactagatgaaataaaatataattggatatagcggatttgtttagtatctttttagtagggcaagaactttctgattagatagatggggatgatactccagaaagatttagtgcatattgtgatgaacattaattatgggctgaattctcctatatagaataactttaatgttagtgctttaaaactattaaatggactttcataattatactccaataagttttgtatgtcaggaagtttttagtaccattaccaacctgaaatataggccatagaggctgatattgagcacactgatgttactctattttatctcctttctagtagaggaaaagctgacatatccatcatgctatcaaccagagagatttgctaatttcattttttgcattttcacttacccataataattaatatgcctaatgacaaaaggcattttaatcacttaaagtgccttatgattcatcaaaaatgtaatattctgtttgggataaatgttattgtatagtattataaaactttaactcatcagtaatttgagcrcagtttaattttgttctcccccaagataaaacccctcccctcccaaagccttgatggccttgaggggtaatcagcctggctgggagaaagagaagtgggttaaatcaaatggcagcacaccctagtttcctctgcaatctcatataggaagatgagcttggggttgcggggcatgaa

SEQ ID NO: 722020 - DNA, 1188 bp, Homo sapiens
cagtcacattgcacctggtctggaccccagcaagtgctgccctgtgggactccctgcttctccccttgctccacactgtctattctctgtagcctttaagaacaagtcaggtcatttcactgtcctgctcaaaaccatcaaatcgtttcccgtttccttcagaatgacattcacagtcctttccgtcacagctctgcgtggcctgtggtgcctctgtatcctcatctctgacttagtttactccaccccattctcctccttcaccagactcccaggcactccttcacgagcagcatgcacctgccccagagccttggcaccagctgctttccctacccagaacactctccttcccacatcttcacagccagctgtttcattccctccaagtcccttatcagagaggctttttcagtcactttgagtaaaacagaaacctaccttttcatcattcttgaccccttaactaaacttgcttgagtttttgttgttgttgtttgctcgttttttacttattaccacttgacatcacttttgtgggaacccccttgcttttatggaaatatgtaagagtaaagaacttcatcttattttccgattatccccaggtcctagaacagtgcyggcatttggaagctgttcagtatttgctgaataaatgaaatgaattatgctgtgattcattgtgtgtttggaggtgtttggagggactggcatgggaggattggattctacggtggtaatagtgacatggcatgatgaaggcatggagtagaggggcggccacagaaatgcaaaggaaggatgactgagggagaggcctctagctcggttgttgcaggacagggatgcttgactggcagtgccttggatgactcgttataagagctgtactccagactcaggatatgctttaaccataggttttcagatttctcctggggtccagtcaactcccatgccagtcccttgttccatgatcccaggccctgctccaattccttaactctcattctgtaaccgtaacccaaatggctaagcctgaggatgcaggctgacctttagagaaaaagttgaactttctctttaaagctaagtgggaaaaaaacaatgatggataaaatgtaaagatgtacaaaggtaccagtttgtacctgggtgtttgaatttctttacattttgctgtca

SEQ ID NO: 722021 - DNA, 1188 bp, Homo sapiens
cagtcacattgcacctggtctggaccccagcaagtgctgccctgtgggactccctgcttctccccttgctccacactgtctattctctgtagcctttaagaacaagtcaggtcatttcactgtcctgctcaaaaccatcaaatcgtttcccgtttccttcagaatgacattcacagtcctttccgtcacagctctgcgtggcctgtggtgcctctgtatcctcatctctgacttagtttactccaccccattctcctccttcaccagactcccaggcactccttcacgagcagcatgcacctgccccagagccttggcaccagctgctttccctacccagaacactctccttcccacatcttcacagccagctgtttcattccctccaagtcccttatcagagaggctttttcagtcactttgagtaaaacagaaacctaccttttcatcattcttgaccccttaactaaacttgcttgagtttttgttgttgttgtttgctcgttttttacttattaccacttgacatcacttttgtgggaacccccttgcttttatggaaatatgtaagagtaaagaacttcatcttattttccgattatccccaggtcctagaacagtgctggcatttggaagctgttcagtatttgctgaataaatgaaatgaattatgctgtgattcattgtgtgtttggaggtgtttggagggactggcatgggaggattggattctacggtggtaatagtgacatggcatgatgaaggcatggagtagaggggcggccacagaaatgcaaaggaaggatgactgagggagaggcctctagctcggttgttgcaggacagggatgcttgactggcagtgccttggatgactcgttataagagctgtactccagactcaggatatgctttaaccataggttttcagatttctcctggggtccagtcaactcccatgccagtcccttgttccatgatcccaggccctgctccaattccttaactctcattctgtaaccgtaacccaaatggctaagcctgaggwtgcaggctgacctttagagaaaaagttgaactttctctttaaagctaagtgggaaaaaaacaatgatggataaaatgtaaagatgtacaaaggtaccagtttgtacctgggtgtttgaatttctttacattttgctgtca

SEQ ID NO: 722022 - DNA, 1112 bp, Homo sapiens
ggtcaaccacagcagacactaaaatgcagtggggccgtggtgagggggatggaggggatgtgggaggtgagtgggagctgagggaagaggagtggctcagaatgcagyggggggtctgcgagaggaccagagagggaggaagcctctccttgggaagagttgggggcaggtcaggagaggttccaggtagagtcagaggtggctgggctggggtggtgaaagccacccttatcctccctgtgactcttagggtcattgcactgcttttctgcttccagatgagatggagtagcagggacggcgtttatcctttcacctgacataattaacacaggacaaaatagatgaggaaaaaaacaacaaagcgaaactcttgccatcagacagcgcagagctgtggtccctgagagggagagacagacaagaggagtgctaggatttccccagagggcgtggcctggacactttccaagctgtggcccatggatgtggctgctgtcgtggtggggtccctccggggaaatcactttgtcagtgaacagcaacatccttttctgatttttctagtaccacgcattgttttctcccattgtccaacaaaggaggcaagaatgcagtgtgccgcattcctcctgcagcagcgctccggtggcgtaccttaacctcgcttttgttttttcatgtgttggctgagtcagtgagtgtgctgtggtggacctctgccatttgtagctcctcaaatcttcagcaccctcttcacagtttgatagttccccacagtgtacctcctgccttctaatgagtctccaaatattccatttcacaaccatccttgtttttgaggtgcaaacatatgatttaggtccagggatcataggcacccactcaaggctttgatcccaaacagttcccatggctggggcagattgcggtggaggggcaggggcaggggctgacagctgtggcagaggcgtcctgattcagctgcctccagatggggccagagcggctgcccctcactgcattagatctatggtatggcactgggggtctctttcttcagcattcgatttggtatgttatcttttttttttctttgatcagcttttcat

SEQ ID NO: 722023 - DNA, 1112 bp, Homo sapiens
ggtcaaccacagcagacactaaaatgcagtggggccgtggtgagggggatggaggggatgtgggaggtgagtgggagctgagggaagaggagtggctcagaatgcagcggggggtctgcgagaggaccagagagggaggaagcctctccttgggaagagttgggggcaggtcaggagaggttccaggtagagtcagaggtggctgggctggggtggtgaaagccacccttatcctccctgtgactcttagggtcattscactgcttttctgcttccagatgagatggagtagcagggacggcgtttatcctttcacctgacataattaacacaggacaaaatagatgaggaaaaaaacaacaaagcgaaactcttgccatcagacagcgcagagctgtggtccctgagagggagagacagacaagaggagtgctaggatttccccagagggcgtggcctggacactttccaagctgtggcccatggatgtggctgctgtcgtggtggggtccctccggggaaatcactttgtcagtgaacagcaacatccttttctgatttttctagtaccacgcattgttttctcccattgtccaacaaaggaggcaagaatgcagtgtgccgcattcctcctgcagcagcgctccggtggcgtaccttaacctcgcttttgttttttcatgtgttggctgagtcagtgagtgtgctgtggtggacctctgccatttgtagctcctcaaatcttcagcaccctcttcacagtttgatagttccccacagtgtacctcctgccttctaatgagtctccaaatattccatttcacaaccatccttgtttttgaggtgcaaacatatgatttaggtccagggatcataggcacccactcaaggctttgatcccaaacagttcccatggctggggcagattgcggtggaggggcaggggcaggggctgacagctgtggcagaggcgtcctgattcagctgcctccagatggggccagagcggctgcccctcactgcattagatctatggtatggcactgggggtctctttcttcagcattcgatttggtatgttatcttttttttttctttgatcagcttttcat

SEQ ID NO: 722024 - DNA, 1073 bp, Homo sapiens
ttaaatattgggaatttcctttttaaaaaatattagtacttagtaaggattcagttgcttttgaggcattgcttctctgatgacaagactgagagattttatttcctggtaaaagctacatggatttatgcaacactatttataatatggaaaagttagaaacatcaaaaaagtctaaaagtagttaattaaatttgattatggtttatttatatattcttacacagtggagctaccaaaatcacgttatacaagaattttttgtggctgggtgcagtggctcatgcctataatcctagcaactttgggagactgaagcaggaggatcatttgagcccaggaggttgagatcagcctgggcaacatagggagaccccatctctacaaaaaataaaaaattagccaggtgtggtgacacacacatgtagtcccagcaacttgggaggctgaggtgggtggatcctttgaccccaggaggttgaggctgttgcatcactgcacttcagcctgggtgacagagtgagagaccctgtctccaaaaaaaacaacaacaacaaaaaagaaacaacttttttttgtgagtgaagcttgcttgtaataggtcatttaaaaggttaaaaatattgtgtagagtaacatctccatttcatttggaaaaaatatgtgtaggtaaaggaaaaattcagagaaaaagccaaaacgttaacaccagttatctttgggtgtgacattccaagtgattgttaygtcttgatattcaatatttgaaattatctctgttgaacttatatttcataatcagggaaaatatttgtatttacagattttttttttttttgagacagcgtctcgctctgtctcccaggctggagtgcagtggcgcgatctcggctcactgcgagctccgcaccccgggttcacgccattcttctgcctcagcctcccgagcagctgggaccacaggcgcccgccaccacgcccggctaactttttgtattttttagtagagacggggtttcaccatgttagccgggatggtctcgatctcctgacctcgtgatccgcccgccttg

SEQ ID NO: 722025 - DNA, 1073 bp, Homo sapiens
ttaaatattgggaatttcctttttaaaaaatattagtacttagtaaggattcagttgcttttgaggcattgcttctctgatgacaagactgagagattttatttcctggtaaaagctacatggatttatgcaacactatttataatatggaaaagttagaaacatcaaaaaagtctaaaagtagttaattaaatttgattatggtttatttatatattcttacacagtggagctaccaaaatcacgttatacaagaattttttgtggctgggtgcagtggctcatgcctataatcctagcaactttgggagactgaagcaggaggatcatttgagcccaggaggttgagatcagcctgggcaacatagggagaccccatctctacaaaaaataaaaaattagccaggtgtggtgacacacacatgtagtcccagcaacttgggaggctgaggtgggtggatcctttgaccccaggaggttgaggctgttgcatcactgcacttcagcctgggtgacagagtgagagaccctgtctccaaaaaaaacaacaacaacaaaaaagaaacaacttttttttgtgagtgaagcttgcttgtaataggtcatttaaaaggttaaaaatattgtgtagagtaacatctccatttcatttggaaaaaatatgtgtaggtaaaggaaaaattcagagaaaaagccaaaacgttaacaccagttatctttgggtgtgacattccaagtgattgttatgtcttgatattcaatatttgaaattatctctgttgaacttatatttcataatcagggaaaatatttgtatttacagattttttttttytttgagacagcgtctcgctctgtctcccaggctggagtgcagtggcgcgatctcggctcactgcgagctccgcaccccgggttcacgccattcttctgcctcagcctcccgagcagctgggaccacaggcgcccgccaccacgcccggctaactttttgtattttttagtagagacggggtttcaccatgttagccgggatggtctcgatctcctgacctcgtgatccgcccgccttg

SEQ ID NO: 722026 - DNA, 1073 bp, Homo sapiens
ttaaatattgggaatttcctttttaaaaaatattagtacttagtaaggattcagttgcttttgaggcattgcttctctgatgacaagactgagagattttatttcctggtaaaagctacatggatttatgcaacactatttataatatggaaaagttagaaacatcaaaaaagtctaaaagtagttaattaaatttgattatggtttatttatatattcttacacagtggagctaccaaaatcacgttatacaagaattttttgtggctgggtgcagtggctcatgcctataatcctagcaactttgggagactgaagcaggaggatcatttgagcccaggaggttgagatcagcctgggcaacatagggagaccccatctctacaaaaaataaaaaattagccaggtgtggtgacacacacatgtagtcccagcaacttgggaggctgaggtgggtggatcctttgaccccaggaggttgaggctgttgcatcactgcacttcagcctgggtgacagagtgagagaccctgtctccaaaaaaaacaacaacaacaaaaaagaaacaacttttttttgtgagtgaagcttgcttgtaataggtcatttaaaaggttaaaaatattgtgtagagtaacatctccatttcatttggaaaaaatatgtgtaggtaaaggaaaaattcagagaaaaagccaaaacgttaacaccagttatctttgggtgtgacattccaagtgattgttatgtcttgatattcaatatttgaaattatctctgttgaacttatatttcataatcagggaaaatatttgtatttacagattttttttttttytgagacagcgtctcgctctgtctcccaggctggagtgcagtggcgcgatctcggctcactgcgagctccgcaccccgggttcacgccattcttctgcctcagcctcccgagcagctgggaccacaggcgcccgccaccacgcccggctaactttttgtattttttagtagagacggggtttcaccatgttagccgggatggtctcgatctcctgacctcgtgatccgcccgccttg

SEQ ID NO: 722027 - DNA, 1073 bp, Homo sapiens
ttaaatattgggaatttcctttttaaaaaatattagtacttagtaaggattcagttgcttttgaggcattgcttctctgatgacaagactgagagattttatttcctggtaaaagctacatggatttatgcaacactatttataatatggaaaagttagaaacatcaaaaaagtctaaaagtagttaattaaatttgattatggtttatttatatattcttacacagtggagctaccaaaatcacgttatacaagaattttttgtggctgggtgcagtggctcatgcctataatcctagcaactttgggagactgaagcaggaggatcatttgagcccaggaggttgagatcagcctgggcaacatagggagaccccatctctacaaaaaataaaaaattagccaggtgtggtgacacacacatgtagtcccagcaacttgggaggctgaggtgggtggatcctttgaccccaggaggttgaggctgttgcatcactgcacttcagcctgggtgacagagtgagagaccctgtctccaaaaaaaacaacaacaacaaaaaagaaacaacttttttttgtgagtgaagcttgcttgtaataggtcatttaaaaggttaaaaatattgtgtagagtaacatctccatttcatttggaaaaaatatgtgtaggtaaaggaaaaattcagagaaaaagccaaaacgttaacaccagttatctttgggtgtgacattccaagtgattgttatgtcttgatattcaatatttgaaattatctctgttgaacttatatttcataatcagggaaaatatttgtatttacagattttttttttttttgagacagcgtctcgctctgtctcccaggctggagtgcagtggcgcgatctcggctcactgcgagctccgcaccccgggttcacgccattcttctgcctcagcctcccgagcagctgggaccacaggcgcccgccaccacgcccggctaactttttgtattttttagtagagacggggtttcaccatgttagccgggatggtctcsatctcctgacctcgtgatccgcccgccttg

SEQ ID NO: 722028 - DNA, 1500 bp, Homo sapiens
  misc_feature 1399, 1400, 1401, 1402, 1403, 1404, 1405, 1406, 1407, 1408,1409, 1410, 1411, 1412, 1413, 1414, 1415, 1416, 1417, 1418,1419, 1420, 1421, 1422, 1423, 1424, 1425, 1426, 1427, 1428,1429, 1430, 1431, 1432, 1433, 1434, 1435, 1436, 1437: n = A,T,C or G
  misc_feature 1438, 1439, 1440, 1441, 1442, 1443, 1444, 1445, 1446, 1447,1448, 1449, 1450, 1451, 1452, 1453, 1454, 1455, 1456, 1457,1458, 1459, 1460, 1461, 1462, 1463, 1464, 1465, 1466, 1467,1468, 1469, 1470, 1471, 1472, 1473, 1474, 1475, 1476: n = A,T,C or G
  misc_feature 1477, 1478, 1479, 1480, 1481, 1482, 1483, 1484, 1485, 1486,1487, 1488, 1489, 1490, 1491, 1492, 1493, 1494, 1495, 1496,1497, 1498: n = A,T,C or G
gacttgggtggatatcaagggaattattctgagtaaaaaaatctttgagggttatatgctgcatgattccatttatgtagcattattgaagtgacaaatttatggaggtcgagaacagatttgtagctgccagtttagggaagagggtagggagagggatggctgtggctatgaaagaaatagcatgaggattccttgtactgtgttatctgtggtggtggtggtcatacaaatctacacataataaaactgcatagacacacacacatactggagtgcatgtaaaagtggtgaaatatcaatagacgaaaggattgtatcaatggcaattttgtggttgaggccagacactacccagagacttcagtgaccctcccctgctggtgatattgtactatatagtcctgcaagttttcaccattggggaaactgggtgaagggtgtatgggagtctctctagtgtttcttataactgtatgtgtcagtctacaatgaattcaaaagaaaaaagttttaaaaagcaaagcaaagcattttgctattttgtactttcttcctctgcagactgccctactcacttccccggtgcaaagaggaaatggacagtctaatgtggcttctgcttaatagtctcttgtgtgcatagagaacctgttttttcccaattgtgtaagagttggttgttcttttctccatgagctattgtttgggctttgagtgagtgaggggagatttggtcctattctggagttacaagagggagaatctgacttatgtaggcaccattggtttccactgctgtccttaatgcccttctgaataatccaggtgattttctctgcacagtcctgaggctacatccactgagactggctctgtacaaagatgytaaacgccagacactccccagatacctctgtgccccctcccctattgatggagagcagaagagatatgagtctttcacggaggctgacatcacatgcagactttggcctcaagtctttgtcacgtgccaaggacagaagaaataccgtgaactagaaagcttttgtgagtataaggaggagaaaaaaattagccagagttgcaagatgctttatgttgtttcaagtttgttctcatctctaaaggtaaactatagaacccaccttctggggcaggtagatgagataatcctgcattagtgaactgtagcatctgactttcatagagaatggttttcttagtagaaattggggcgcaaaaaaatgaatgcagttatgggaactttgcgatgagatgcaaaatatctgggtagaaagcagataaattaccctcatgtatgtattttagtgtaaagtggacatgattactaggtaaaatgttcagaatttctcagttttcattgatggtatgnnnnnnnnnnnnnnnnnnnnnnnnnnnnnnnnnnnnnnnnnnnnnnnnnnnnnnnnnnnnnnnnnnnnnnnnnnnnnnnnnnnnnnnnnnnnnnnnnnnnac

SEQ ID NO: 722029 - DNA, 1293 bp, Homo sapiens
tgaaggtcctgactgccccaagcagcccctactgcccattccagcttccctttcacccaaagacataagatagaggatgttgggcaggcaagtccatccttatccacaggtaagagttaaggacacagctgtagaggctttttatttaaattttttttctgcagcttgtgacgtaatgagaagcaaccaatctatttcagagaggggggaacccgggcagcccttggaagcaggaaaaggccaccacttgggaacctttgtacactagcgtggatatctgtggggtgctcgtgggcgctgagaggcagccagcccagttacaccgtccagagtggccacctctcccacctcacctctgcttctttcccctggtggctggaggtagcatgcgctaaggatacagaggggatcagattctgtgtcctcccccacagcttaattggggtgatcctcacacagtgagacattcccccccaatttgatcagcatgaggatgggagaccacagaagagaggccttcaaccccacatgcgggaggcaacgaagtcttcctggtttggattttcacatgctctggcttctactccaaatcctggcccacactctgacccatctgcccacaggcaccctggcctcccatcaagtgggtgtgcacagatcatcaggctgagagatgaaagacccccaccttattgcttcctctgggatgtcaggagaccccctgagctgagacatgccccttaccatgagctgtggagtcagctagttactagacaaagggtgagaaaatggccttattcaaggaagactgggcggcacacggcgaggttctgtagggtttcaacctgagtctcctgctaggtccttcagaagacctgcaagggaggaacgcagatgtcagcgtctactggggaaagaaccaccactctgagtgtatgtgtaaattgtatggtttctttaattatgtctatggaagcgatgatacctatttctatctatctaagtagaaaagatgggcatagggaattagtaagttaggaaccatgatgtaactggcataagatcctcaccagcgtctgcctctcctcccagtcctgggcacatgaggtagagcagtgtgactacttygggccaacaggctttaacaggaaatgatgtgtgctattttggggccaaaacacttaacagccaaatgtttttctgcagcacttccctttgagccacggctctaaggaggctgcaggttctggatggtgagagccataccctcaggattttttgaggccccaaaaa

SEQ ID NO: 722030 - DNA, 977 bp, Homo sapiens
tccaaaaaatagtgatgaaagaaatcaaagaactaaacaaatagatatactatgttcatgaattgtaataaacaacatagtaaagttgccaattctcccagatagatgtacaggtttaaataatttctattgaaatcctagaaagatatttttaaatataaataaggttattctacracttatatggaaaatcaaataaactagaatagctaaaacaatttcaaaaaataaaatgggaggagtcccttggcccaattttaagagttattgtatagttcagtaatgaagactgtgtgatattggcaggaaaataaatgcacagaccaatgaaacagaagagaaagccaactgatttttgataatggttcaaaagcaattctatggaagaagagtagtcttttcaataaatgatgctggagtaaggggatgttcaatggcaaaaggaaggaaggaagagggaaggaaggaaggaaggaaggaaagaaggaaggaaggaaaattttttacttacacctcattttttacacaaaaattaactcaaaaagagatcatatatttgaatataaaatgtaaactatgggccaggcatggtggctcatgcctgtaatcccagcactttgggaggctgaggtaggtggattccctgaggtcaggagttcaagaccagcctggccaacatggcaacaccccatctctactaaaaatacaaaaattagccaggtgtgatggtgtgtgactgtagtcccagctactctactcaggaggctgaggcaggaaaattgcttgaactcgagagccagaggttgcagtgagcagagatcgtgccactgcactccaacctgggtaacagagcgagactccatctcaaaaaaataaataaataaaaaataaaataaaataaataaaatgtaaattatgaaacctttagaagaatacctgggggagatcttcagaacacagggcttggtaaacagtcc

SEQ ID NO: 722031 - DNA, 865 bp, Homo sapiens
ttccatggatcgactctcccctctagaatctgcttgcttttgtcctccagtgtcttgaggtcaggagttggtgaattaagcccacctgatttttagaaagaaaattttattggaatatggccatgcccatttgtttacttattgtctgtagctgttttttgttacaaatgcatagatcagtagttgctggtatttactatttgacccttttagaaatagtttaccgacccctgccatagatagtttggattttatattttgtctagggtttayacttgttgtatgagttgatctgataggaatttattcatctattatttgaggaagtagaactcctaggtttgtttttatttgtttagttcttccagttttgttaatcactgatatgaaagaggtgaggaagaattgttttaaatgactcgctcatttgttaccataattttaactctagcatattcagatgtcagagattttagtttttttgaaagtgctctttgaaatgtatattgtaggatgaaatactttttctttcactccttcattcagcacatactcattaatcctctgtaaatgcaaggcacgtgctaaactctgtaatacattaaagatacatcagacatatagagtgttctcaaaaaactttagtttattaaatgcactaagttcagcttactgagattaaacatgtgtacaagtaactgtaattccaaagtggaaagtataaattcatgtcagagagtggtcttttttgcggcctggtgtggtgactcgtgcctgtaatcccagcactttgggaagccaaggtgggcacatcactcgaggtcagagttcgagaccagcctggccagtgtggtgaaaccctgtc

SEQ ID NO: 722032 - DNA, 865 bp, Homo sapiens
ttccatggatcgactctcccctctagaatctgcttgcttttgtcctccagtgtcttgaggtcaggagttggtgaattaagcccacctgatttttagaaagaaaattttattggaatatggccatgcccatttgtttacttattgtctgtagctgttttttgttacaaatgcatagatcagtagttgctggtatttactatttgacccttttagaaatagtttaccgacccctgccatagatagtttggattttatattttgtctagggtttatacttgktgtatgagttgatctgataggaatttattcatctattatttgaggaagtagaactcctaggtttgtttttatttgtttagttcttccagttttgttaatcactgatatgaaagaggtgaggaagaattgttttaaatgactcgctcatttgttaccataattttaactctagcatattcagatgtcagagattttagtttttttgaaagtgctctttgaaatgtatattgtaggatgaaatactttttctttcactccttcattcagcacatactcattaatcctctgtaaatgcaaggcacgtgctaaactctgtaatacattaaagatacatcagacatatagagtgttctcaaaaaactttagtttattaaatgcactaagttcagcttactgagattaaacatgtgtacaagtaactgtaattccaaagtggaaagtataaattcatgtcagagagtggtcttttttgcggcctggtgtggtgactcgtgcctgtaatcccagcactttgggaagccaaggtgggcacatcactcgaggtcagagttcgagaccagcctggccagtgtggtgaaaccctgtc

SEQ ID NO: 722033 - DNA, 865 bp, Homo sapiens
ttccatggatcgactctcccctctagaatctgcttgcttttgtcctccagtgtcttgaggtcaggagttggtgaattaagcccacctgatttttagaaagaaaattttattggaatatggccatgcccatttgtttacttattgtctgtagctgttttttgttacaaatgcatagatcagtagttgctggtatttactatttgacccttttagaaatagtttaccgacccctgccatagatagtttggattttatattttgtctagggtttatacttgttgtatgagttgatctgataggaatttattcatctattatttgaggaagtagaactcctaggtttgtttttatttgtttagttcttccagttttgttaatcactgatatgaaagaggtgaggaagaattgttttaaatgactcgctcatttgttaccataattttaactctagcatattcagatgtcagagattttagtttttttgaaagtgctctttgaaatgtatattgtaggatgaaatactttttctttcactccttcattcagcacatactcatkaatcctctgtaaatgcaaggcacgtgctaaactctgtaatacattaaagatacatcagacatatagagtgttctcaaaaaactttagtttattaaatgcactaagttcagcttactgagattaaacatgtgtacaagtaactgtaattccaaagtggaaagtataaattcatgtcagagagtggtcttttttgcggcctggtgtggtgactcgtgcctgtaatcccagcactttgggaagccaaggtgggcacatcactcgaggtcagagttcgagaccagcctggccagtgtggtgaaaccctgtc

SEQ ID NO: 722034 - DNA, 1289 bp, Homo sapiens
ccatgcctggctaacctttatattttttggagagaaggggtctcgctacattgtctaggctggccttaaattcttggtctcaagtaatcctcctgccttgccctcccaaagtgctgggattacaggtgtgagcaatcatgcctggcctcctttaattttttttttttttttttttttttttttttttgagacggagtctcgctcttttgcccaggctggagtgcagtggcacaattgtatttttagtagagacggggtttcaccatgttagccaggatggtctcgatctcctgacctcgtgatctgcctgccttggcctcccaaagtgctgggattacaggcgtgagccaccrcgcccggccggcctcctttaatttcttaaccataaatatcctccccccacttttattatggacgttctgaagcacataaaaatagggagcatagtataataaatttgtacatatttaacactcagcttctataattagaaacaaatggcccatctggtttcatctaggcctctttgctatcctttcatctccaactggattattttaaagcaaattctagatgacattctgctgagcatttctgccagaattacacctctctttgctaatgtgaaaaaatgcccatgataactgtaaaatacgtgtgtcctatttaggtgtctaaacactttaatgtcacagtattaaggccttaaaatatagcttagatatatttttctaaattaaaagacttcattttttagatatacagaaaattgagcagaaaacagtgagttcccatataccttcttcatcccaacagtttccccctcattaacatattgtgttagtgtggtacatttattacaaaggagtgaatattgatatattattattaactaattttatagtttactttgtgttatgtattctatggactttaacatgtgtaatgacatgtttcccctattaccagtatcatacaggatagtttcacttccctaaaaatcttttatgttctacccactccttcctcgttccctctccccactcctccctccccccatcttaagcccatggcaacccctgatctttttactgtctccatcgttttgccttttccagaatgccatgtagttggagtcatatagtatgtagccttttcagttggcttctttcacttaccagtgtgccttgaaggtttctccatgtctttttgtaatttgagaagctcattttttaaaaattttattcttttagattgttgaacagataaatacgaaactgccatcatca

SEQ ID NO: 722035 - DNA, 2048 bp, Homo sapiens
ttactttgggatttctattgtttagctgtaagttaaaaaatccattatctaaatactagtttaaataactttaatctggtaaccaaaaatacttcccttatagaaattgctaggatatattgggagcattaatttaaacacactaatgttacatgtaagtttttgacccttgagccagagacctgccaggaaaattaaaaggtgaaaataaccttagctttagtgacctgaattctccatgatctaacacttttctgattcacttgacagagtttttatgtttttatacaaaaattaaaaagtaaattrtatactttcttagaaatcccatgaattttaaaagtgtatacataaattaatttgggtacagtcagcaaatacttcttcagataaaatttgatgtctaaccagcacctattatgctcaaatgttacagttaaaattttcacagataccataagtgtaatttactttttatatttttcatactgctgctattatacttgagagaaaaatttccttaaaaaatctgttcatctttctagagaatactcctgatttctcagcaagtcttctactatttatgaatcttttatctgttagtgatcttcccttctctctctctacatgtcaaaatcaataatctccaatttctccctgatggaataaatactcataaactataaaccaatgtctggaacattggttttcacagctattgtcattcctaagagatgatactatctatcatctataacaaatgatgatccacagaggcttaaaaattgtccaattttttttaaagtgcatgtgaagttgtaattcactggggcaaaaaatgctatatgaatgtcaacatagtcttctttaattctttcaaattttatgtatttttttttaccgttttcttcaatcttctcctttagaaaactttcagatatctttctttctgatacagataggatactctgcaactaactcagactccatagagcaaagtgagagaaacaacctttttcatttttccaagtttttttgccttctctctatggccttctctattatgacaaatcaatttttttatatcaaactaaaaatcttgggaaaagattttgaaagaaaattattacatttaaaactccatcttttgctaaaatattaagctgtttaaaactataaataccacatggagatattctgcagatggatacatgaatttcataagtagtgggtggaccaaattaagaaagcccaatatctgcatttgacactagatctctagatcacatcaagatattatggaagccccacattgcaaagaatcaatgctgagaggtaaacagacactagaaaaggcattatttaagaatgagggcgtaagaacacgagtgttcggcttaaggagataagactaggtacaggacagaatttctccactcagtagaacagaaactcagttctcagaaccagagcacagatcaataatataaatttaaaactaaaagaaaagcacagaatccagataagagctaaatccatgcaatcccacatttcccaaaccaggactgagattgatcctggacagtacccaagatagttcagtttccctatctacagggattggctggggacatcaggacaagttagctgacaaaaaaaaactgacttttttttttaatctttaagttctaggatacatgtgcacaatgtgcaggtttgttacatatgcatacatgtgccatgttggtgtgctgcacccattaactcgtcatttacattaggtgtatctcctaatgctatccctccctcctctccccaccccacgacaggccccggtgtgtgatgttccccttcctgtgtccaaatgttctcattacaaattgactttttaaatttaaaactgttttttttttctttctgaattctgccaatttttctttctgctatagcatccctccacttcattcaactcctacaaggaaccaaaacttggctgggcgtggtggctcacgcttgtaatcccagcactttggtaggccgaggcgggc

SEQ ID NO: 722036 - DNA, 610 bp, Homo sapiens
gtagattacaataggaataacttttatttgtttatacaagttttgaatttcatctattttttatgtaaatagctcgatcttcaaaaatatccttcagctctgacaacctcttcacataactttcctgtaagatcttttaaatatccaaacctgtaaaagtccacattcagttgttctttgttccttagtttgcttcaacaacatcaatgcaaggttaatagaagctatttacttaccatatggtaggtggctcagaaccttctatttctaagtaatcatatttctcttccatttgaaaatcagtaaatatgagtgaaattgtgtccccaggctctgctacaatggtccaagtgcaatcagcattgttatggtactcattaggaaaactagggctggatatgatgccactggatcctctcattgttcctccacaagcatcttcagctgttaaaaatgacaaaatattcagttgtaagttattgagataaatgcaattgttcakttgtaagtaaagcaagtcaatatgtttggataaaaataacagttcaaatgtgataccaagtgcataatatactaatagagattaaataaaatgagaattttatgaaaa

SEQ ID NO: 722037 - DNA, 2771 bp, Homo sapiens
ttccagaaataaacaattcataggtttaaactacaggccacactaagcagcatgataaaatctatgagcactctattctgttctgccccacccatccctttgccaagctgtatatgctacctgcctattagatacttatttgtggtctcagttatcagactgagaaaacatactactgtatatatggtttggtactatccacaatttcaggcatccactggaagccttggagtgtatccctcacagataaaggacaatgggactattctactgtcaatgagtatttaagaaatatagcctaccctgatttaatggatctcatttgtagtgttttctgatatctgacagaatttcactaaactattacattgtattatatgttgattaatcttttgtatttaggataaactatcaggtatagctaatacagagaaatatttctacttagaaacattcataatgatgttttatattttaactgaattattttcctgtcttataaattggtagcaattgcctagagctaaataaaatataagaataagtgaaagtaacaggtttttgaaacttaagaagcaaaagaaatcatagaaaatgtaaagaatttgatagcggtctttattaaatatttttgtaatttgacaaaataaaagtatactttacatttctaaataaagcataaagtttttacattttgaaaatcataatttcaatataaaaattttaaatgtatagaatgattccaagcacacagaattgttaaattattaatatattgatttttttgctattaatggatactatatggaatttaagatgaaatatttgcctaaagaatataaatttaatgtatcaagggatctagaaaattaattttaaacaatattttaaattgatctgcactctagtatgaaagtagagactgtataactcattctggataatttagcaacactaaaggaaaaggtgagaactggttcgtggaccagtgtgctttggtaaacaatttcttacttgtccacgatgaagtatagaaatcaagagtaagcatttaagtactttcaagcaaattgacatcrgtgcaacatttcctccattagcttttattttacaaaagtattggtgtgcaattacagatacctattggtctttcatcatagacagtttgaaaaatgtagagagtgaataagtagaacttctcctactttaccttctcctctgcaagttaaatcaatttcaatacgctaaattgtcttgaaagatctcatagtagttacagcacattaccttaactgagaataatgtgtttgttcattagcttgatgacctttactcacctaataatgatttttaaagaaatatatttgtaacattaagtcattaatcacattcagctacacacacacacacacagagagaaagagagagagaaagaaaaaaaggaaggaagcagggagggagggagggagggaggcagagaaataaagagagagagagagaatgtgtgattacttcaacagctcttgctaaaagaacagaccataaaaatagcctttttaaaaaagcatattaactccattatagaaatttgtacaaatatactgtatgtccccatagaattgaaatgcttatatataaagtactcttttaatcaccatcatgatactatcaatattgtaattcatatgtatagactgtttattatgttagatcctattctaggcactctatattatttttttcctcacaacactatgaagtagggagaattattatctcaattttacagatgaagacaatgagatttagatacattaagtatcttctccagaataattctctttgcagtataccagttgaacaaatatctttcttagcttttattatacaccagattagtttggtctggtttagtcctctttccaggagagaaagatagaatttacaatctcagtaggcataagaatcagtgagtctcttattacaatgcatattccagggctccacggcagagtctgactcagaatatgtaagtggggccaagaattctagattttaatacagtctccagataaagctgatgcatgtggttcagtgttgacaatttgagaaacacagataaatgaataacattagtaataaatacggtctcataaatactaatacacaaggacaaagtcttaggaaagttttttaaaaatagtaaatgattatatagaggaggatgaaataaaaagaaatgagatttacacattaggattagcttgaaaaatatttttaaaaatacaggtaagagaccaggagcagtggctcttgcttgtaatcccagtgctttgagagatagaggcaggaaaatcgctagaagcctggggtttaggacaagccagggcaacacagtgagactcctatctcaaaaatataaaaattaaattaaatttaaaaatacaggcataatacttgagaagatgtccaggttagtagatctattttactgtatcatacacagggcaagagttgtaatttgaggtaactgcagaaaaaaaactggatccaaatgcaggggagtgggagacagattttgtaattccaagataagatttccgagcttcacaatatgccagttggccctggcagtatcactggctacagttaaatatagaaatgctaccagctactccctctggatcatgttacatagacttaagcatgaaattgtaggccaaataatgcccctctacctccccaaaaatgtatctctggaacttgcacat

SEQ ID NO: 722038 - DNA, 601 bp, Homo sapiens
taacttaaaataccaggaagattagagagataactataagtaaaaatcatctaggttatgataaataagctgttgaattacatgacttgtttctaggatttttctctaaacatgtattaaatcaaactttctccaatttggagtgaagttaacgatatcttttaaagcttctctatagaagcagagagtagaatggtgattaccaaaggctgggaagaggggatgggagttggggagatgttggtcaaaggatacaaaatttcagtcaaataagaagaataaattcaagaaatgtattgtaccacatgatgactatagttaataataatgtagtattcttgaaaatggttgagtagattttaaatgttcttgccacaaaaaatgataaaactatgtcagataatgcaatgttaattacccaaatgyaaccattgcactatacatatacatatataaacatcatattgcacttaataaattttttttatttaaataagtaaataattttttaagaaaaactctccaggtgattctaatgttcaaccaaatatgagaaagtataagttaaaatattaacacctttcaataaaacattttttaa

SEQ ID NO: 722039 - DNA, 1643 bp, Homo sapiens
tcctatgatctccccttttccttcatatccaatcggccactaattcgtataaatcatagatccttaagatttcttacctatcttccttattatctattcctcctgccattgccttagtttagaaatgcatctcttcttgtttgggccacttcaacagcttcctaactgacctccctgactttggtctttctacctttccattcaaccccacaatgcaaccagagtgatctatcaagtggtaaatctgattatrccattcatgaaatttgtatttatttaagagatcccaggagcatttagaataaagggcgaaatggtaaatagaaaaccttttttatctggctcacacctaattttctagccctatcacttctcaatagctatacttcctgttagccatatcaaacttatttcaccaagtatgtcgctaaatacttactcaacatcactaatgactatggcatgaaatgcccacacccacctttttaaactagtagtaactcctcattttcctaaaagcaagtttaatagtcaccttcacaaagagaatgtagggaagtaaggggtttgcattatggatctaaagtatctgctgaagtgcgtgccagcccagtggcttgtaccatgtcctagaagtccaggttggctttcaactcaccaactttgtcttcctccactctctgtgacaggtctgcctgtaacaattctctacaggttcttctgtctataatttatcccctctactttacaatctggatccatgtcatggaaacaaagagcagtagagtaaaacggcttgctccttgggtccctacatccccttgctccaattcatgcccttttctattggaacttcagttcacttcaggtaagctaaactgaggacacaaaataaatttatttatttatatatataataggtatatattatatatatatgagacagacatagattaatatggacataaatataaagtatattagatagaatacatatatgaagccatctaagatatctgtggaactaagccaggtactgtatcacgcagtcttatgtctttaatctgcactcagcttcaaaatttggtagatttttggcttttccattattatatccccaatcccaaggacagtataggtacatagcacataattatttactaaactaataattgaatgaatgttcctgccaaaaaaataagctgctctgactgagtcacaggtaagaagttggaggggctgatttgtggggaaggaccaaggcagaagtaggaagtgaagaaaggtatttggtgaggacaggagaagcaatgctgtagccagaaagccgactgtaagttgtgataattgttaacttggggaattttggcaaaaaatcttagtactactttataactttggatgacttaagaatgtagggacttgagaataagttttcatgtttatcagagaaataaaaatcacataggccgggtgcaggggctcacacctgtaatctcagcactttgggaggccgaggtgggcgaatcacaaggtcaggagattgaggccatcctgaccaacatggtgaaaccccgtctctactaaaaatacaaaaattagttgggcgtggtgggacatgcctctaatcccagctactggag

SEQ ID NO: 722040 - DNA, 1911 bp, Homo sapiens
tgagtggctctgcctgatttcattacaaaagcctctttgtttctattctgtgatctttcagtgagaatttagaacagaatactttctctaaataagaacaaaatttgagacaatttaaaacagtctttcactcttcctggccaggagtatgtcaagagggttccttaaatcagaactaaggttcacacccagagaatatatcaaatgaatttccatgaaaaacaaaaaccatcctctgtttttactattgctgtacaaggtatgctctgcaaatcaaaactccattsctagtttgcagcgttcaggtgactaaagctacctctggagaagacactgaaaaatgtacttcactttccccctcaacagaacattcaagctcattaggctgctattcaaaaatggtatagttaagatccccagcatgcagctctggcaaacaagcaaagttgccatttgtagaatatcgatattctggatttcccttccatttatgtttctaaaatacaataagtattggttggttcatgaaaattaatcagccacttaaatttgtgactgtaattaaagctactgggaaaaaaataagttttcttactgtctacagttttaatttttaagtgaatttaggcacttagaaactaaaaaaataaaaataaaaataccagaagcatctgttttaatcatttttcactatccagctctatgaaatgaaataattcctgttgttaagactgcaactttttctttgggctattcagctggccatcgaaagttattttttgtctgttttgtaaagttatgtgaagaacctcaaagatttgcacagaataataaacatcataaagatgggaggagtattaataacatttgaaaaccttaaactgaactaattgagttgcagctatacactggttagaagctattttttgatatagaagtggagaaaaatgtttaacttggttatggctataaatactgcacctcttctgaattaaatcaattttcctgatgaaactaatttcttgcctgaaaggtattaaaataatttcattataaagaaagttttgctacagttctgttcatttccccactaaagcaaatgtttcaatgtatgtgtcatgacatgtaaaccacttttacaaaaaatgaggacattctgaaaacactggaagataagaaatagactaatataaaagattcattttcaactttctaaatcaacctgatctttattcccactgagtttattttctcttcttaaactatcctatcctattccaaacacgtatagtcactaataatcaaagaaatgcaaatgaaaactccaataagatatcacttttcaactacccaactgatacaattttaaaagaagatcattctgagtgctaataactgcagggggcggtgggggtgggtgcagggggaagcagatcctcatgtatagttagcgagagtgtaaacttgtacactttctgagggcaatttggcaaaatgggtgaatattttaactgtgcaagatttttagcccagcaattctacttctagtaatttatcttatataagtaacacttaagtgtatatgtacaaaaatactcatttgaagtatcattttccaaagcaaataacagaacacaatcctaatgtccatcaggggaattaagggtatataacaacaattttaagtgagtgaaggagtgtctttatacatagcaagaggatattaaacaaactgttaaagtgtttatctctgggaaaaaatgggattatgaaggtttttgctttctcctgaatattttaaaaaatagatttatattttataatcagaagaaggtaacaagaatttaaaaagaaccccatgaacctggaaccctagctcatttacctgatcctacaacacatattatttag

SEQ ID NO: 722041 - DNA, 1911 bp, Homo sapiens
tgagtggctctgcctgatttcattacaaaagcctctttgtttctattctgtgatctttcagtgagaatttagaacagaatactttctctaaataagaacaaaatttgagacaatttaaaacagtctttcactcttcctggccaggagtatgtcaagagggttccttaaatcagaactaaggttcacacccagagaatatatcaaatgaatttccatgaaaaacaaaaaccatcctctgtttttactattgctgtacaaggtatgctctgcaaatcaaaactccattcmtagtttgcagcgttcaggtgactaaagctacctctggagaagacactgaaaaatgtacttcactttccccctcaacagaacattcaagctcattaggctgctattcaaaaatggtatagttaagatccccagcatgcagctctggcaaacaagcaaagttgccatttgtagaatatcgatattctggatttcccttccatttatgtttctaaaatacaataagtattggttggttcatgaaaattaatcagccacttaaatttgtgactgtaattaaagctactgggaaaaaaataagttttcttactgtctacagttttaatttttaagtgaatttaggcacttagaaactaaaaaaataaaaataaaaataccagaagcatctgttttaatcatttttcactatccagctctatgaaatgaaataattcctgttgttaagactgcaactttttctttgggctattcagctggccatcgaaagttattttttgtctgttttgtaaagttatgtgaagaacctcaaagatttgcacagaataataaacatcataaagatgggaggagtattaataacatttgaaaaccttaaactgaactaattgagttgcagctatacactggttagaagctattttttgatatagaagtggagaaaaatgtttaacttggttatggctataaatactgcacctcttctgaattaaatcaattttcctgatgaaactaatttcttgcctgaaaggtattaaaataatttcattataaagaaagttttgctacagttctgttcatttccccactaaagcaaatgtttcaatgtatgtgtcatgacatgtaaaccacttttacaaaaaatgaggacattctgaaaacactggaagataagaaatagactaatataaaagattcattttcaactttctaaatcaacctgatctttattcccactgagtttattttctcttcttaaactatcctatcctattccaaacacgtatagtcactaataatcaaagaaatgcaaatgaaaactccaataagatatcacttttcaactacccaactgatacaattttaaaagaagatcattctgagtgctaataactgcagggggcggtgggggtgggtgcagggggaagcagatcctcatgtatagttagcgagagtgtaaacttgtacactttctgagggcaatttggcaaaatgggtgaatattttaactgtgcaagatttttagcccagcaattctacttctagtaatttatcttatataagtaacacttaagtgtatatgtacaaaaatactcatttgaagtatcattttccaaagcaaataacagaacacaatcctaatgtccatcaggggaattaagggtatataacaacaattttaagtgagtgaaggagtgtctttatacatagcaagaggatattaaacaaactgttaaagtgtttatctctgggaaaaaatgggattatgaaggtttttgctttctcctgaatattttaaaaaatagatttatattttataatcagaagaaggtaacaagaatttaaaaagaaccccatgaacctggaaccctagctcatttacctgatcctacaacacatattatttag

SEQ ID NO: 722042 - DNA, 1911 bp, Homo sapiens
tgagtggctctgcctgatttcattacaaaagcctctttgtttctattctgtgatctttcagtgagaatttagaacagaatactttctctaaataagaacaaaatttgagacaatttaaaacagtctttcactcttcctggccaggagtatgtcaagagggttccttaaatcagaactaaggttcacacccagagaatatatcaaatgaatttccatgaaaaacaaaaaccatcctctgtttttactattgctgtacaaggtatgctctgcaaatcaaaactccattcctagtttgcagcgttcaggtgactaaagctacctctggagaagacaytgaaaaatgtacttcactttccccctcaacagaacattcaagctcattaggctgctattcaaaaatggtatagttaagatccccagcatgcagctctggcaaacaagcaaagttgccatttgtagaatatcgatattctggatttcccttccatttatgtttctaaaatacaataagtattggttggttcatgaaaattaatcagccacttaaatttgtgactgtaattaaagctactgggaaaaaaataagttttcttactgtctacagttttaatttttaagtgaatttaggcacttagaaactaaaaaaataaaaataaaaataccagaagcatctgttttaatcatttttcactatccagctctatgaaatgaaataattcctgttgttaagactgcaactttttctttgggctattcagctggccatcgaaagttattttttgtctgttttgtaaagttatgtgaagaacctcaaagatttgcacagaataataaacatcataaagatgggaggagtattaataacatttgaaaaccttaaactgaactaattgagttgcagctatacactggttagaagctattttttgatatagaagtggagaaaaatgtttaacttggttatggctataaatactgcacctcttctgaattaaatcaattttcctgatgaaactaatttcttgcctgaaaggtattaaaataatttcattataaagaaagttttgctacagttctgttcatttccccactaaagcaaatgtttcaatgtatgtgtcatgacatgtaaaccacttttacaaaaaatgaggacattctgaaaacactggaagataagaaatagactaatataaaagattcattttcaactttctaaatcaacctgatctttattcccactgagtttattttctcttcttaaactatcctatcctattccaaacacgtatagtcactaataatcaaagaaatgcaaatgaaaactccaataagatatcacttttcaactacccaactgatacaattttaaaagaagatcattctgagtgctaataactgcagggggcggtgggggtgggtgcagggggaagcagatcctcatgtatagttagcgagagtgtaaacttgtacactttctgagggcaatttggcaaaatgggtgaatattttaactgtgcaagatttttagcccagcaattctacttctagtaatttatcttatataagtaacacttaagtgtatatgtacaaaaatactcatttgaagtatcattttccaaagcaaataacagaacacaatcctaatgtccatcaggggaattaagggtatataacaacaattttaagtgagtgaaggagtgtctttatacatagcaagaggatattaaacaaactgttaaagtgtttatctctgggaaaaaatgggattatgaaggtttttgctttctcctgaatattttaaaaaatagatttatattttataatcagaagaaggtaacaagaatttaaaaagaaccccatgaacctggaaccctagctcatttacctgatcctacaacacatattatttag

SEQ ID NO: 722043 - DNA, 1911 bp, Homo sapiens
tgagtggctctgcctgatttcattacaaaagcctctttgtttctattctgtgatctttcagtgagaatttagaacagaatactttctctaaataagaacaaaatttgagacaatttaaaacagtctttcactcttcctggccaggagtatgtcaagagggttccttaaatcagaactaaggttcacacccagagaatatatcaaatgaatttccatgaaaaacaaaaaccatcctctgtttttactattgctgtacaaggtatgctctgcaaatcaaaactccattcctagtttgcagcgttcaggtgactaaagctacctctggagaagacactgaaaaatgtacttcactttccccctcaacagaacattcaagctcattaggctgctattcaaaaatggtatagttaagatccccagcatgcagctctggcaaacaagcaaagttgccatttgtagaatatcgatattctggatttcccttccatttatgtttctaaaatacaataagtattggttggttcatgaaaattaatcagccacttaaatttgtgactgtaattaaagctactgggaaaaaaataagttttcttactgtctacagttttaatttttaagtgaatttaggcacttagaaactaaaaaaataaaaataaaaataccagaagcatctgttttaatcatttttcactatccagctctatgaaatgaaataattcctgttgttaagactgcaactttttctttgggctattcagctggccatcgaaagttattttttgtctgttttgtaaagttatgtgaagaacctcaaagatttgcacagaataataaacatcataaagatgggaggagtattaataacatttgaaaaccttaaactgaactaattgagttgcagctatacactggttagaagctattttttgatatagaagtggagaaaaatgtttaacytggttatggctataaatactgcacctcttctgaattaaatcaattttcctgatgaaactaatttcttgcctgaaaggtattaaaataatttcattataaagaaagttttgctacagttctgttcatttccccactaaagcaaatgtttcaatgtatgtgtcatgacatgtaaaccacttttacaaaaaatgaggacattctgaaaacactggaagataagaaatagactaatataaaagattcattttcaactttctaaatcaacctgatctttattcccactgagtttattttctcttcttaaactatcctatcctattccaaacacgtatagtcactaataatcaaagaaatgcaaatgaaaactccaataagatatcacttttcaactacccaactgatacaattttaaaagaagatcattctgagtgctaataactgcagggggcggtgggggtgggtgcagggggaagcagatcctcatgtatagttagcgagagtgtaaacttgtacactttctgagggcaatttggcaaaatgggtgaatattttaactgtgcaagatttttagcccagcaattctacttctagtaatttatcttatataagtaacacttaagtgtatatgtacaaaaatactcatttgaagtatcattttccaaagcaaataacagaacacaatcctaatgtccatcaggggaattaagggtatataacaacaattttaagtgagtgaaggagtgtctttatacatagcaagaggatattaaacaaactgttaaagtgtttatctctgggaaaaaatgggattatgaaggtttttgctttctcctgaatattttaaaaaatagatttatattttataatcagaagaaggtaacaagaatttaaaaagaaccccatgaacctggaaccctagctcatttacctgatcctacaacacatattatttag

SEQ ID NO: 722044 - DNA, 1896 bp, Homo sapiens
tgatcattaagcatttaaattgatagtactacctgatacttacaggctgatatggtacactctccagctttctttacccccgaaggctttataaaaaaccttgaggaaaatgatttaaatataaattcatggggttaactttggctaattttagtttaaatcacacatcacccaaacaacattatcatagtactttaactataggcaaaatatgtttttaaaataatgagcaagggccgggagcggtggctcacacctgtaatccaagcactttgggaggctgaggcgggtggatcatgaggtcaggagatcaagaccatcctagctaacacggtgaaaccccgtctctactaaaattacaaaaaattagctgggcgtggtggcgggtgcctgtagtcccagctacttgggaggctgaggcaggagaatggcgtgaacccggaaggcggaggttgcagtgagccgagatcgcaccactgcactccagcctgggctacacagcgagactccgtctcaaaaaataataataataatgagcaaatcttctaaagtctataatgctagacacaaattttcaactactttctctctgaaaaacttccatcagctacaattggatatgatcataccagatacaacaacacacaacagtaatccaaaagtagaactgacttccactagatatggagacctgtgttatttgccattctcaggtttaataatatttgcaaatacctgacatgtaatgaccattatcacaacaatacatcacctcaatataatacagccctgagattagaaagccttaaaatgagtagcacgggccaggcgcagtggctcatgcctataataccagcactttgggaggccgaggtgggtggattgcttgaagtcaggagttcgagaccaacctggccaatatggcaaaacctcatgtctacaaaaaattagctgggcatggtggagcctgcctgtagtcccatctactcaggagactgagacacgagaattgctcgagcctgggaagcggaggttgcagtgagtcgagatcgtgccaccacactccagcctggacagagcaagactctgttttttttttttttttttwaaaaaaaaaaaaaaaaaaaagatgggtagcacagagcagccacctatttatatctattaaatgccaggcactggagagagtaccaaaaacagaaagggttttatccttatgtagcttattttgtttatcgtctgtcatccctcagagagacacacacaagatcaaaccatgaagaaccacactaaggaatctgggttttattctaagtgtggccaaaacccatacttttaagcagagaactgccaagatctgacttaggttgttagaaggccaagaaggtaccaacaggtagataatggaagaaacccagcaaagaggctaatacaggaactcaagcaaaagagggctggcttacagtcaacactgtggaaacattaagtggacagattcagtgtcagaatttgtgtcagataatcttccctttgagccctttaccatttacatccttgggcaagttacttacatgctttgagcctcaatttccttacttagcaatgctcgtaaaactctatcacatagaaaatacacaagttattatgatagtattttggtaacaaaattcacttgaaggagttcaaataaattgacttccttttccctcacaccaacattagtaatgttgagcaggggttcaataccagttatatataagtaccacattttgcttcatcaagagacgagttcccgtttctcacagaacttacactaaaactgctcataaatatacaggaagaaaggtgtttttctcaaattaataaaagtctagttagcacattcaatctgtgttt

SEQ ID NO: 722045 - DNA, 592 bp, Homo sapiens
ttgtaactggctgccagttatatcctgtgtgcccagcagagagattagcccagaatagaagctcagtgtctgtagaatgaatgtttgagtgaaggggaaggcaagccaggatccagaacaacttgttttgcctgatgtcatactcaacayccacttctgtcctctgtaactccctccttgactaagagtgagagttcttaaggggagagagatacgggaagacagatcagaagtaaggtatatggtgagcttatcagacacagggtcacttgcattctttgaacatgggttttcagaaaacgttttttagagaagtttcaggcttacagaaaaattgatgggaaagtacagagagttcccatataggcctctccctccagtaaatctcccctattaatcacatggtatattagtgtaagtacatttgttacagttgatgagccaataatgagattaggttttactcttcatgttgtatagtctacgggctttgacaaatacactatggtatgtaaccaccattataatgtcatacggaatagtttcacagccccagaaatctcccaccctctgcctattcatccctccctcc

SEQ ID NO: 722046 - DNA, 592 bp, Homo sapiens
ttgtaactggctgccagttatatcctgtgtgcccagcagagagattagcccagaatagaagctcagtgtctgtagaatgaatgtttgagtgaaggggaaggcaagccaggatccagaacaacttgttttgcctgatgtcatactcaacacccacttctgtcctctgtaactccctccttgactaagagtgagagttcttaaggggagagagatacgggaagacagatcagaagtaaggtatatggtgagcttatcagacacagggtcacttgcattctttgaacatgggttttcagaaaacgttttttagagaagtttcaggcttacagaaaaattgatgggaaagtacagagagttcccatataggcctctccctccagtaaatctcccctattaatcacatggtatattagtgtaagtacatttgttacagttgatgagccaataatgagattaggttttactcttcatgttgtayagtctacgggctttgacaaatacactatggtatgtaaccaccattataatgtcatacggaatagtttcacagccccagaaatctcccaccctctgcctattcatccctccctcc

SEQ ID NO: 722047 - DNA, 591 bp, Homo sapiens
tcccccagaggatgtcataaggattagagatacctctctgtagagaagtgtacactaagtgtgcttagtacattggctctagttggcacatcaaatgtgctgaatacatcatcattgtcatgtctgagaaagtgtctttcctcaccaaaggtaatttctcttatcttctctaaaaccatcaaatgtcctacactcttgctcagcttttaataattcacaacgggctcctcctgggcttaccaacaggtacagattttttwtttttttgctgtacagtactatgacttttgacaaatgtacactgttatgtaaccaccactgcaaaaataaataaatacataaaaattcaatcactaccaccccaacctgcccaaaattcttctgcatcttccctcattcccagctcctgaaaattgctaatttgttttctgttcctatagttttgcctttgcaaatgatacatataaatagaatcatacactatataacctttaaagcctgacttcttttatttaataaaatgcatttgcgatgcatccatgttgttgcatgtatcagttgttctttttagtagtgttccactgaacagga

SEQ ID NO: 722048 - DNA, 698 bp, Homo sapiens
ttaatatttaccaagaatccaaaatgtacaactgagacggtgttatggagaatataaaagtgagcacaacacttgctttgcagaacaatcaagtgacagggagaaaaaaatctaacagaacgcctgctaggtgttgaagtagagccaccagccctctgggtggccttaggcaggtcatgtctcctctgggagccttcctttcacatctgtcatagagcttgtaggcaactgactttgtgaagttcctgccaggttaaacagactctgctccatttttcagactgttattagaaaatgctcaaatacatctgagtttgtgtaggattggaggcagttaatatatttaaggagtcagacatataattaagattttgttgttggggtgggatttctcccccttttaagtctcacttttgagaaactggaacctgaattgagctgttcagagatgaagactaatatatcataatgtgcacttactaattcactaaatgtctagatgttgatgttggggatttaaggaggggtgtttactaagrccaggcacgggactaggtcccaggaattccaaattgcataaaatgtggtccttgcatattagtcattcaacgggctcagaatggaaatggccatgcagaaaacagtgagcataaagagtttactgctgtatcaacctggacatacaaaggaagaactct

SEQ ID NO: 722049 - DNA, 651 bp, Homo sapiens
taaaaaaaagaagagtgtagtactatttcaattgagttcagtgtcctcgacttactgagatgtttttttgccatgtaaatttgcagcttgtgcgatggggagactctcaaggctttgtgactgctgttggcttcttggaatgttccagatcaatacagacagagttaatagtaccatacaagtctataaaactccacaaactagccatatttagaaatacagctagtgtacttgcagcaaacaatatgtccatttagtactttctaatacttactgtcatccaatttctaatacttaggtacttaactgttmcccttcccctaaatgtactacctcttgaactcttaaaatctctcagtatctattcacatgcaagcatatgagaaaaagggtggttgtacttctcaggagtggcccccaaatttctacatcagagtagcatatggaaatgaatttaattgaacaagggtaaggagaaggggttgaagctgggtttacagagcactttgcataagaatgagaaaatgccaacagacttcatcaaataattggaagaggagtgtggagaatgttgaagattatgggttagcttgggaagactttcctagccatggttaggtaacaccacccatacttctacactataatttt

SEQ ID NO: 722050 - DNA, 639 bp, Homo sapiens
ttgcatcaaaatataatgtgttcatatttcaaaatcccctctctatatattcgtttcatttttttaaaaaagatcacacttgttttaaatatattttccaaaggctaaggaacaaaaaagtcccattctctggcatgagccaggctgtatgtgtcccatcatctaccctaaagaaacattttgagctgtgatgctgagtgcatgcaggtggcttcctgttttcatgcacattcagtacagttgtgttttttctgatccctcagccttttacctaatggttgtcrtattcactattgacctagatggaaaagccattttctgttttcactgaggacacacgcattccctatttctttgtagagtcttagaaattctaaagacataaaattttcatgaggaatttctttgtagagtcttagaaattctaaggttataaaattgtaagttgtagtaataagaccaactatttattcttctctatttccttcttcaatcaagaaattgctcataactctcagtggggattagtgtcctgctgtcctcctctagtttttcattaaacttggcccaaggggagactccttctactgagctgtgaccaaagaaggggaaaaaataaccatactcctgggcatgacc

SEQ ID NO: 722051 - DNA, 899 bp, Homo sapiens
gaaaagaaaccatacttatctctttctaaggagaggaacgtgtaaaacaaatgtggtctgatgaatgagaacatttgctgctggtggtrtcaatgattaacgtctctttggaaatgacatgctgttagttatttcaagagccaaaatgtaaatgctatttgacccaaatatcccactcttgagattctgtcttaagtataaatctagtggaaataaaagaataataatatataatgaattccaaagtaatttggaatatgtagcaacattgacatttaaaaataatgttaagtgaaagaagtaaattattctgcatatattataattgaaacattgtcaaaatatattcagagttgagcaaggactggctgaaaaggaagaaggaaaagtaaggagaggttcagaaattgaggttctgaacagtggtcttcttcattgcttttgaaattcttttgaaaatttacataattgttgatttaatattattaagatttttatgtaattaaaaggactgaagaaactgcaaagacatccatatatagtatacatctttcagatgaaatgtgtccctatctgtggcataccatgctaaggaagtaagaagaaagcagaggaaattgagaaagataataacaacaacaaaaatcaattaaaattaattaaacattgtccatagtgtctacattcaacatgacaaaagaaacatactaaattttctcactaatacacaccaaaatatagtctgtgtctggtgtcattcctgattatgtctaggaacaaatgtaccataacaggataaaaaagagaagcaaatttcagctagaattaaatagaatggaacccaaaaatagaatcctcataaatttttaatatgtgatcaacgtcagtaatttcatcca

SEQ ID NO: 722052 - DNA, 899 bp, Homo sapiens
gaaaagaaaccatacttatctctttctaaggagaggaacgtgtaaaacaaatgtggtctgatgaatgagaacatttgctgctggtggtatcaatgattaacgtctctttggaaatgacatgctgktagttatttcaagagccaaaatgtaaatgctatttgacccaaatatcccactcttgagattctgtcttaagtataaatctagtggaaataaaagaataataatatataatgaattccaaagtaatttggaatatgtagcaacattgacatttaaaaataatgttaagtgaaagaagtaaattattctgcatatattataattgaaacattgtcaaaatatattcagagttgagcaaggactggctgaaaaggaagaaggaaaagtaaggagaggttcagaaattgaggttctgaacagtggtcttcttcattgcttttgaaattcttttgaaaatttacataattgttgatttaatattattaagatttttatgtaattaaaaggactgaagaaactgcaaagacatccatatatagtatacatctttcagatgaaatgtgtccctatctgtggcataccatgctaaggaagtaagaagaaagcagaggaaattgagaaagataataacaacaacaaaaatcaattaaaattaattaaacattgtccatagtgtctacattcaacatgacaaaagaaacatactaaattttctcactaatacacaccaaaatatagtctgtgtctggtgtcattcctgattatgtctaggaacaaatgtaccataacaggataaaaaagagaagcaaatttcagctagaattaaatagaatggaacccaaaaatagaatcctcataaatttttaatatgtgatcaacgtcagtaatttcatcca

SEQ ID NO: 722053 - DNA, 899 bp, Homo sapiens
gaaaagaaaccatacttatctctttctaaggagaggaacgtgtaaaacaaatgtggtctgatgaatgagaacatttgctgctggtggtatcaatgattaacgtctctttggaaatgacatgctgttagttatttcaagagccaaaatgtaaatgctayttgacccaaatatcccactcttgagattctgtcttaagtataaatctagtggaaataaaagaataataatatataatgaattccaaagtaatttggaatatgtagcaacattgacatttaaaaataatgttaagtgaaagaagtaaattattctgcatatattataattgaaacattgtcaaaatatattcagagttgagcaaggactggctgaaaaggaagaaggaaaagtaaggagaggttcagaaattgaggttctgaacagtggtcttcttcattgcttttgaaattcttttgaaaatttacataattgttgatttaatattattaagatttttatgtaattaaaaggactgaagaaactgcaaagacatccatatatagtatacatctttcagatgaaatgtgtccctatctgtggcataccatgctaaggaagtaagaagaaagcagaggaaattgagaaagataataacaacaacaaaaatcaattaaaattaattaaacattgtccatagtgtctacattcaacatgacaaaagaaacatactaaattttctcactaatacacaccaaaatatagtctgtgtctggtgtcattcctgattatgtctaggaacaaatgtaccataacaggataaaaaagagaagcaaatttcagctagaattaaatagaatggaacccaaaaatagaatcctcataaatttttaatatgtgatcaacgtcagtaatttcatcca

SEQ ID NO: 722054 - DNA, 743 bp, Homo sapiens
gatgtaatgaaatatgttgataaagtctacatattgaaccatctttgcatgcctagaataaatcctttgttacacttgtgttttgatatattaatgaattaactaggctattttatctataatttgtgtacatataatcataataaagatcattttatagcatttttttctgcttgttttacttatcatgattaggttttgataggggagttttctccaacctcctctactgtctaggatatttaataactacactggaattatctggttttttaaaggttatccaaattcagcataaagtcatctaaatayatcttcttttaacagacattaatcatattgccagtaacttctatgataatagtagtagttttctatttattctgaggtcattttgcagtacttttctgatagaaattcacatttttttcctaggtttgatctctgctccctctgaaacaagctacttcttgtctaaaaatgacttccaacatactatgcatcaatttagatcataagcattactttctactagtccttgaaggcaaatcttgcactatattctacagttcaagttatacatccttatagtacaatcccacagcatctacatactgttgtcacatattcgtcacatggtgctctgcccatctgctttcctgttccccaaactaaactcgcaaatccttgagagtggaaatatttatcattttataattccaggggctaccacatgataggta

SEQ ID NO: 722055 - DNA, 743 bp, Homo sapiens
gatgtaatgaaatatgttgataaagtctacatattgaaccatctttgcatgcctagaataaatcctttgttacacttgtgttttgatatattaatgaattaactaggctattttatctataatttgtgtacatataatcataataaagatcattttatagcatttttttctgcttgttttacttatcatgattaggttttgataggggagttttctccaacctcctctactgtctaggatatttaataactacactggaattatctggttttttaaaggttatccaaattcagcataaagtcatctaaatacatcttcttttaacagacattaatcatattgccagtaacttctatgataatagtagtagttttctatttattctgaggtcattttgcagtacttttctgatagaaattcacatttttttcctaggtttgatctctgctccctctgaaacaagctacttcttgtctaaaaatgacttccaacatactatgcatcaatttagatcataagcattactttctactagtccttgaaggcaaatcttgcactatattctacagttcaagttatacatccttatagtacaatcccacagcatctacatactgttgtcacatattcrtcacatggtgctctgcccatctgctttcctgttccccaaactaaactcgcaaatccttgagagtggaaatatttatcattttataattccaggggctaccacatgataggta

SEQ ID NO: 722056 - DNA, 595 bp, Homo sapiens
aatctgtggaaataatttgtacatatccttatgacaattataaatcccataaatctgtatgcattccattcagtagttttaaacattggttaaataccagaatcaccaaagaaacacattcgaaaatgctgatgtccaaattccatctcacagcaattcamtcagaatcttggggatagaagacagggagtgagggggtcaggcaccaggacacctataaaacctaagggattcgaacctgcagccaggattgagaaactttcatttggccacagactgcatgaaaaaatatttcatatctgttaattaaaaagaactgtcaagaagttttttactgcctttaaaggtcatatgtatgaaaacagtgctcacaatgagagcttaggcaatgaggcaaaaaaggtttaggttgctgttcacaacctaatttccaagttcaaatgttctatctgaatctatgttgtatgagtctgttctctcactgctataaataactgcctgagaatgggcaatttataaagaagaagaggtttaattgactcacagttctgcagccttgacaggaagcatagctagagggcctcaggaaagttac

SEQ ID NO: 722057 - DNA, 1188 bp, Homo sapiens
tgatgtcctcatattggttttctttccccttttaaaaagtgatgcaaagtcagaggaatgaccaggccaggagagagataggtgctgtatgtctcaaggagttgatgagtaaagctactgaaagatgttacttttcaaaggagtgagtaagcmcagagtaacatgagctatgcccagaattagtggaaaagtagagaaatgtctgaaattgtttattttaaagtcagcctccaaaagctcttgagcatctattcttgtgaaaacaattcaaagctcatatatgtgtatgatgaatagtggcttataatcttttttctttttttttgagacagagtcttgctctgttgaccagcctctgcctcctgggttcaagcgattctcctgtctcagcccaccgagtagctgggactttataagcacgccccaccaagaccggctaattttttgtatttttagtagagatggggtttcgccacacaggccagtctggtcttgaactcctgacttcgggtgatccgcccacctcggccccacgaagtgctaggattacaggtatgagccaccatgcccggcctcattttcctacttactaattttatgtgtttagtttaacaatgataatttgaaaatcaattcaagttttagcaaaactggcactggaatttttttttttttttttttttgggacagagtctcgctctgttgtccaggctggagtgcagtggtgtgatcttggctcactgcaagctctacctcctgggttcatgccattctcctgccttagcctcccaagtagctgggaccacaggcacccaccaccacacctggctaatttttttagttttttatttttagtagagacgaggtttcaccgtgttagccaggatggtctcgatctcctgacctcgtgatccgcctgcctcagcctcccaagtgctgggattacaggcgtgagccaccgcgcctggccggcactggaatttttgtcttgtgattccatgtaggactatcatggtctcaggtacagaacaacaggattttatttttagacataaggaactcaaacctacagtatggccacattcattcatgaactcacagaaataggcagctgaactggctttacgtgggttggaccaccttatcataaaagtctgtctttctgctgccggttagtgtgataaagga

SEQ ID NO: 722058 - DNA, 909 bp, Homo sapiens
tgatatctttatcaaatgatttgttcatcacattcttatagtaacatacctgtgtttcttttataacgttatcgctctctatgttacagtcatatctacttaattataaggtccctgttggtgtaaactgctgtgtccccatagcaccttttcagatattttaaaccatgactagaagaaaaactgtacttacaccaagatctaatgagcacatatgcatgtacacacatgcatagctgagaagtttcccccaataatctttatacgtagtacagggtttctaatatggtgtcaataaacgccaaatgaggtcaggcccattggctcacgcctgtaatcgcagtggttggggaggcgaaagcaaagaatcatttgagcccagtgccaacatggacaacatagcaagatcccatctctacaaaaaatagaaaattagccaggtgtggtggggcacaccaatagtcccagctactcgagaagctgtgacaggaggattgtttaagatcaggagtttgagcgtgcagtaagctatgactgcactagtgcactcaagcctgggtgacagcaaaatcctgtctctaaaataaacaaataaaaawatttttttttaaatgccaagtgaatgaatgagccatgaacaaaaatagatttaccgttttacaaccacatttgacaattacagttctctttgttccctaagtaaaaagaccctctgcaaaattctgaaaaaaaccaatattctctttatagggtaagtactgagagctggttttaccatatctagaataggttacagtcattttttgcccaaaaatattcaccaacattgcccttctgattctgtaatcagtatattatgatagagttcattttaaaatcaagtacccatacctactgttttcaatcaca

SEQ ID NO: 722059 - DNA, 909 bp, Homo sapiens
tgatatctttatcaaatgatttgttcatcacattcttatagtaacatacctgtgtttcttttataacgttatcgctctctatgttacagtcatatctacttaattataaggtccctgttggtgtaaactgctgtgtccccatagcaccttttcagatattttaaaccatgactagaagaaaaactgtacttacaccaagatctaatgagcacatatgcatgtacacacatgcatagctgagaagtttcccccaataatctttatacgtagtacagggtttctaatatggtgtcaataaacgccaaatgaggtcaggcccattggctcacgcctgtaatcgcagtggttggggaggcgaaagcaaagaatcatttgagcccagtgccaacatggacaacatagcaagatcccatctctacaaaaaatagaaaattagccaggtgtggtggggcacaccaatagtcccagctactcgagaagctgtgacaggaggattgtttaagatcaggagtttgagcgtgcagtaagctatgactgcactagtgcactcaagcctgggtgacagcaaaatcctgtctctaaaataaacaaataaaaaawtttttttttaaatgccaagtgaatgaatgagccatgaacaaaaatagatttaccgttttacaaccacatttgacaattacagttctctttgttccctaagtaaaaagaccctctgcaaaattctgaaaaaaaccaatattctctttatagggtaagtactgagagctggttttaccatatctagaataggttacagtcattttttgcccaaaaatattcaccaacattgcccttctgattctgtaatcagtatattatgatagagttcattttaaaatcaagtacccatacctactgttttcaatcaca

SEQ ID NO: 722060 - DNA, 683 bp, Homo sapiens
tgagccttaatttcctcacctgtaaaatggagacaacaatcctgcctagcttatcccatgggtgtttatgctgatcaagtgaaatactaaacgtaagagcattttgtaaatagcagagtgatatacatgtgaaggaagactattaataaaggaatttcaaaggaaagctataaatagtactttttaaagcccaggcagcaaaagaaaatgtaaatayagcagtgattttacaattttgtgatctagaggaagaaatggtgatcagaattgtgacaaacaatgatgtccaaaagagaagagaaaccagctcggctctgtcataattgtctcagttcctgtaccacacacaacaatggaaagattgcagggaggggcaggagcaggcctgtgactgtggcacaccaaagacacggagacacagctccaagaaaatgacgcttctacctctgtaataataacagtcagaatctcatgctgtgggtcctctatggatctgaaagtggcttatgcaagtgactttaccactttctcagttttatctcttggaaggaacacaattggacagagtgaggccaaactccaggtttgctcacctggatgaacagaaatgcaaaggcagatctcacccacagttagatttcaggacccagaggggataggcaggttcagacaagattcaggca

SEQ ID NO: 722061 - DNA, 621 bp, Homo sapiens
caaagcttttagactttcctttgcctgtgtttctctaaataatggtctttgtcaacccgaaaatctggtaagttggaaagttagtttattaaaactaaaatgatgcaaagattaaaatcagaaacaaatgaggtctcaattagtaaatcttatctcaaattgaaggatggagaatctttttccacggaaagaacttccatagtgaccaggttagccaagaactattgycacagttgcccactgaatccttgtgggaaataagccactgactctagatcacttaagacagtgatgccaacaggtaggcaggttaagcagtagaacctttctttaagtgaaacagtttataaaactctaaattttaacaagcgaatagcagagctgcttggtttgaagggcccagagtccccactgcccaccccacactcaatcattggagcttcatttctacccagaatcctagggcttctagagcataagtttaaaaattcactgatctaatctaatttcacccttaaattttctccagaagacacggaggcacaaagattaagtgtgatccacgaactagtgagtagcatggccaaaaatcctcccgaaagaaactatgttgcccttttc

SEQ ID NO: 722062 - DNA, 628 bp, Homo sapiens
aacttatattcttctaacatagttatgtatatgttcattatttattgtctgtctccactaaaactcacaagatgtctttactgattttatacactgcctggcacatcaaatgaacttaataaatattttgagagtgaattaatatatacagtaggaaagacacatacacacaaggcaggctgcagtaagtgctgtaaaagagacaatgagacagtagaggaattctgcaacagaagctgtggtgagaattaatctatgatgtgttagactctccagctatatatatgcctggaccgatgtcaccacttatctgcagttctcctgtgatgtttccagggtacatgattaagactcatttaacattccaggaatrttctgctgatgaataatcactgagctggagtcaagagaagaagctttagatactaaccgaccctgtgatcatgagcaagtcacttcccttctctgtgcctcaatttcctcacttataaagtgaaaacaaagggccaagtgagggtggaaggatccccctaccctggagatctgtgattctataacatatgggcaggaaagacttgataacacactcagggtctatgtgggctgttctgaaggcatctggccaccc

SEQ ID NO: 722063 - DNA, 599 bp, Homo sapiens
tcaataactttggccatgagtctractcctgggttagcaagccaagaaaacttgactgccagcaccataatgctacacacaatgagaggtagatgcttcttcagagggaattcagggttcgagcatcagaataaagggagaatagatgctgtgtggccccaacataatgtctactctaagagccagtagcaatgacccatgctcttctccacaaggaataatattttcttacgtgatatgtgctgttgatgaagcactgaatgtttcaggaaggagaatacttactttaaatgtattggccttctactgaagttcaaatgtcaaaatcatttcgattctctgataactttaatttatatttagaaagttcagcaaaagatgagatcttctgtgttctcataggccaacaaattaaattccagtgtcacatcctactgctgatggttaaaatttctttccaactaagcctatgaagtactaagttcatttcatataaaatgatgagattgatcccaacggaatgaaaggcctacaagatgccatgtcaggcttcagactatgaccagatgaattaatcagtgcaaagtcccgataagttg

SEQ ID NO: 722064 - DNA, 599 bp, Homo sapiens
tcaataactttggccatgagtctaactcctgggttagcaagccaagaaaacttgactgccagcaccataatgctacacacaatgagaggtagatgcttcttcagagggaattcagggttcgagcatcagaataaagggagaatagatgctgtgtggccccaacataatgtctactctaagagccagtagcaatgacccatgctcttctccacaaggaataatattttcttacgtgatatgtgctgttgatgaagcactgaatgtttcaggaaggagaatacttactttaaatgtattggccttctactgaagttcaaatgtcaaaatcatttygattctctgataactttaatttatatttagaaagttcagcaaaagatgagatcttctgtgttctcataggccaacaaattaaattccagtgtcacatcctactgctgatggttaaaatttctttccaactaagcctatgaagtactaagttcatttcatataaaatgatgagattgatcccaacggaatgaaaggcctacaagatgccatgtcaggcttcagactatgaccagatgaattaatcagtgcaaagtcccgataagttg

SEQ ID NO: 722065 - DNA, 2263 bp, Homo sapiens
tgtttcaaatactatagaaatatattttaaaagaaaagtataagccaggtgcagtggctcacatctctaatccccacactttgggaggctgaggcagaagaatctcttgggcctaggagtttgagaccagcatgggcaacatagggagatcctgtcttcactgaaataaaaataaaaaaattaaaaataaaaaaattcacccttgtgtggtggtgtgtgcctgtagtcccagctactcgggaggctgaggcaggactctggatcacttgagcctaggagatgcaggctgcagtgagccatgattgtgccactactctccagcctgggtgacagaaatgagaccctgtctctaaataaataaataataatataatttaaaaatatatatctctatgataagtagagaagtgaagcagttacagttgccccaaaatgtttatatttaataacgattacagtttaatcaaaacagtgttgagctatatgaattaaaaatttgacattagaagtacataattaaatataagtcataataggtcacatcaactcacaaaaatacaaagctgaaaataagttcctccttcaataaaaaaacataaatgtttgtaaatatttttaataaagcaacattctgcttaaggctactaaactgaagaaaaagatataatagccaaaatagtgtgagagactggttcaataaacttggctcaaaagacaaagagatttcacattctcttttctgaataagcaaacttttttggtgatatgattaggctttgtgtcccaacctaaatctcatgttgaattgtaagctccataatttacacgtgtcaagggggagaccaggtggaggtaactggatcatggatgtggcttcccccatgccgttctcgtgacagggagtgagtctcatgagatctgatggttttataagtgtctggcatttccccggctggcactcattctctctcctgccaccctgtgaagaggtgcctcccatcatgattataagtttcctgaggcttccccagccatgctgaactgtgagtcaattaaaccttttttctttgtaaattgcccattctcaggcagttctttacagcagtgtgagaatggactaatacatttggtaaggtgcaaagcacatggagaaaatgtcccttatctgcttacctttgccagtcagtttgaaaaaatattaatgaagcaccttgataatgcaaccccaccctaaaagtcctgagatggctgggaaggttcgctcatgaacttgtgtgttagtgtgtgtgtgcagggagtatggaggtagcatggagcagggtggggtgggttggggtggtggtcatcaaatcctaaaatcaagagatttcctgccttctctgcaatctccatcttcctttacctttgctccaaaattgatgcctttcctgctcttgcattccattagtgaaaagaatatcacacttgggagaatatctcactaggttagttttttctcccttcttcacctgaatacttcctttcaatcccctatatctcaacttaaatatgatttatccagagagacttacatgaacactagcctactttacattctccccctgatatggtttggctgtgtccccacccaatcttgaattgtagctcccataattcccacatgtcatgggagggacccagtgagaggtaattgaatcatgggggcaggtctttcctgcgctgttcttgtgatagtgaataagtctcacgatatctgatggttttataaaggggagttcccctgcacatgctctcttgctgccaccatgtaagatgtgactttgctcctcattcaccttccaccatgattgtgaggcatccccagccatgtggaactatgagtcaattaatcgtctttcctgtataaattacccagtctatggtatgtctttattagcagtgtgagaacagactaatacatccccgatgtccctacacacacacccaagagtttccatagctccctgtattttccctatcatgagattcatcacactgctattattccctgtttaatatttgtccaagaattctgttattatgggactgcatctgycatgttcactgtgtttagcaaagtgagtctttagcaaagtaaatggcatactttcagtgctcagtaaacatttgttgatgagatgagtgacttagtatatggcctgatgccagcaactgtttgactcacccaactcactttgttcaaagtccatgctcaccaataaat

SEQ ID NO: 722066 - DNA, 590 bp, Homo sapiens
tacccagataaattaacatagagtatcattataagatatgttttaactatgcacatcacccattgaccagaactcaatcacactgttattcctaacttctatgtagtcttcaaaatgtagtgtggctatgttcccaggaagaaaaggtacrgctttgacctgagtcagcaatctcctccataaagtgtatatgtaaaaatccatttcttggataattagtcattagttgttattattgtcatgttaagccttcagtgcccttggaagtgctgtacttttcaagtgatatgtatgattcaagagtataaacctttgtggagctagccaatactgaaacaaagagggcattttaatatagaaaaatgtaaaacaaaaagtgaactaccttgagtagacagctacatggcatttctccaaaacaaaatgtctctttttttttttctggctaaactaaggttacataaccatccagagagaatcccaaagcaggagggtgtgctacataaaaatctttgtctcttttattacaaactaccccatttgcattccaaatacctgcagctgatctaattaaggcctgaagagggaaa

SEQ ID NO: 722067 - DNA, 1058 bp, Homo sapiens
acataaatttggagtcagaaatctggcttttttacttacctggcaaaatcacttaacccctctgagtctcagttttctcatctgtaaaataaggataattgtaccttccctttctgcattgcagggttgatgcaacaatgtgtaaaatgtaaagtctgatgattatgatggtactggtggtgatttttagtttagagaaaagctggataatgatgtgattatttatacctctcttaatgagaagacagctttattccagaatctgtatgagcttactggcatattctgatgtgatgtagcttccttagctgttttgtcatcattatccttttactctgatcactgataacccttgttggtataattttctattactggtatttttaatcttccaggttcataaaactggctagttattcttctgtgagcatacaaatatgtgcaagttaagaaacatcataattaaaatgagaaaatgttggttctactaattttgagctgtgtgacattgcaaacatcatttaagctccctaaggctcagttttctcatctgtaaaatgtgaacactttccttgcataagggatggggtaaagagaaaataaaataattaatgtaaaagcatttttcaaactgtaaaatgaatattracattgatcaatcattctaggcaacaatttacctaataggttagatgatctttaaagataatttccagttctaacattccacactactttcaaaactcaaagagtgcccctacatctatagggtatccaagaaaatcagttagtagaaatgaaggactgaaagaatatcactacttggggacttaagagctaggccaaaagttcagctcagtctgagcttgagggggaactggacatgaagatctttattgcttcttcatgtcaggaaagctcagctaagcccaagtcaggagaatggatttgattaagtggatgtggatatccacaaatggtgatgccatttaagctgggcaggctgagccttgtaaccatgtaggctgggaagccgcctgtagatggctgtgttctca

SEQ ID NO: 722068 - DNA, 1058 bp, Homo sapiens
acataaatttggagtcagaaatctggcttttttacttacctggcaaaatcacttaacccctctgagtctcagttttctcatctgtaaaataaggataattgtaccttccctttctgcattgcagggttgatgcaacaatgtgtaaaatgtaaagtctgatgattatgatggtactggtggtgatttttagtttagagaaaagctggataatgatgtgattatttatacctctcttaatgagaagacagctttattccagaatctgtatgagcttactggcatattctgatgtgatgtagcttccttagctgttttgtcatcattatccttttactctgatcactgataacccttgttggtataattttctattactggtatttttaatcttccaggttcataaaactggctagttattcttctgtgagcatacaaatatgtgcaagttaagaaacatcataattaaaatgagaaaatgttggttctactaattttgagctgtgtgacattgcaaacatcatttaagctccctaaggctcagttttctcatctgtaaaatgtgaacactttccttgcataagggatggggtaaagagaaaataaaataattaatgtaaaagcatttttcaaactgtaaaatgaatattaacattgatcaatcattctaggcaacaatttacctaataggttagatgatctttaaagataatttccagttctaacattccacactactttcaaaactcaaagagtgcccctacatctatagggtatccaagaaaatcagttagtagaaatgaaggactgaaagaatatcactacttggggacttaagagctaggccaaaagttcagctcagtctgagcttgagggggaactggacatgaagatctttattgcttcttcakgtcaggaaagctcagctaagcccaagtcaggagaatggatttgattaagtggatgtggatatccacaaatggtgatgccatttaagctgggcaggctgagccttgtaaccatgtaggctgggaagccgcctgtagatggctgtgttctca

SEQ ID NO: 722069 - DNA, 1058 bp, Homo sapiens
acataaatttggagtcagaaatctggcttttttacttacctggcaaaatcacttaacccctctgagtctcagttttctcatctgtaaaataaggataattgtaccttccctttctgcattgcagggttgatgcaacaatgtgtaaaatgtaaagtctgatgattatgatggtactggtggtgatttttagtttagagaaaagctggataatgatgtgattatttatacctctcttaatgagaagacagctttattccagaatctgtatgagcttactggcatattctgatgtgatgtagcttccttagctgttttgtcatcattatccttttactctgatcactgataacccttgttggtataattttctattactggtatttttaatcttccaggttcataaaactggctagttattcttctgtgagcatacaaatatgtgcaagttaagaaacatcataattaaaatgagaaaatgttggttctactaattttgagctgtgtgacattgcaaacatcatttaagctccctaaggctcagttttctcatctgtaaaatgtgaacactttccttgcataagggatggggtaaagagaaaataaaataattaatgtaaaagcatttttcaaactgtaaaatgaatattaacattgatcaatcattctaggcaacaatttacctaataggttagatgatctttaaagataatttccagttctaacattccacactactttcaaaactcaaagagtgcccctacatctatagggtatccaagaaaatcagttagtagaaatgaaggactgaaagaatatcactacttggggacttaagagctaggccaaaagttcagctcagtctgagcttgagggggaactggacatgaagatctttattgcttcttcatgtcaggaaagctcagctaagcccaagtcaggagaatggatttgattaagtggatgtggatatccacaaatggtgatgccatttaagctgggcaggctgagccttgtaaccatgtaggctgggaagccrcctgtagatggctgtgttctca

SEQ ID NO: 722070 - DNA, 1701 bp, Homo sapiens
  misc_feature 1601, 1602, 1603, 1604, 1605, 1606, 1607, 1608, 1609, 1610,1611, 1612, 1613, 1614, 1615, 1616, 1617, 1618, 1619, 1620,1621, 1622, 1623, 1624, 1625, 1626, 1627, 1628, 1629, 1630,1631, 1632, 1633, 1634, 1635, 1636, 1637, 1638, 1639: n = A,T,C or G
  misc_feature 1640, 1641, 1642, 1643, 1644, 1645, 1646, 1647, 1648, 1649,1650, 1651, 1652, 1653, 1654, 1655, 1656, 1657, 1658, 1659,1660, 1661, 1662, 1663, 1664, 1665, 1666, 1667, 1668, 1669,1670, 1671, 1672, 1673, 1674, 1675, 1676, 1677, 1678: n = A,T,C or G
  misc_feature 1679, 1680, 1681, 1682, 1683, 1684, 1685, 1686, 1687, 1688,1689, 1690, 1691, 1692, 1693, 1694, 1695, 1696, 1697, 1698,1699, 1700: n = A,T,C or G
aaaacatctatctatctatcagtctcatatttcaaggcagttagacttatttaagggaactgaataattcaaaataacaatagtgataaacctttttttatatttgagacagagtgtcactctgtcacacaagctggagtacagtgacacaatctcggctcactgcaacttctgcctcccgtgttcaagtggttcttgtgcctcagcctcccgagtagctgggattacaggcacatgtcaccacacctggctaatttttgtatttttagtggagacagagtttcaccatgtttcccagactggtctcgaactcctggccttaagtgatacacccaactgggcctcccaaagtggtaggattacaggtgtgagccacagcactgggccagatagccatctttaatattgtgctcaatttcattccagtcctttctctctgtgtgtgtgtgtgtgtgtgtgtgygcgtgtgtgtgtgaaatttcacacaggggaattagtcattgccaataagaattttgaaagatagaaagtaaatggaatttttgttcccaaaagaaagccacagaaaaactctattatagaactgcaaaataagccaacaaaattaaatgcacattgtttgttagtaaactggaaataaatatcttgtgaaactgttaggattttcattttcacagtaaatttactactagtttattaaaaaaataattaagcaaaggctattggagtctactttgttttaatagatgtatttaaataaaattaataggatttggatggccaataacattcagaagcaaatgttatactataataataaaaatttcttagaaacacagaatttctggctgggcatggtggctcacacctgtaatcccagcactttgggaggctgcggcaggaggatcacttgagctcaggagtttgaaaccagcatgggcaacatagtgagacctcatctctactaaaaatcaaaaaaattagccaggcatgtagtcctagctactagagaggctgagcctgggaggttgagcctgcagtgagctataatcacaccactgcactccagcctgggcaacagagtgaggctctgtctcaaaaaagcaaaaagaaacaaacaaaaaaacagaaatgaactgtatttttcttcaactatgttagagggtacaccaagggcaagtaaacaatagattttacttcaaaccaagtaattttgtcctgatcattctgtcattctattgttccatttccctgtgaaacaacaaatattatgctttttttttcttatctctgtcttattccagaaatgatataaggtgttttttaggaatatatccaacataggaaaataaaatactttaaaaatagggaatatccaggggggaggggacaatatatgaaatgagattgaaatgggggagaagaactgttttcaaaatgccgtaaggggctgggcagagcaaaaccctgtctcaagaagaaaaaaaaaaaaagtcacaagacctaatacccttgctaggttgggataatacaatctgtaatgagaagataatcaataaatgattacggcctcctcaagataaacgtttccttagaaagannnnnnnnnnnnnnnnnnnnnnnnnnnnnnnnnnnnnnnnnnnnnnnnnnnnnnnnnnnnnnnnnnnnnnnnnnnnnnnnnnnnnnnnnnnnnnnnnnnng

SEQ ID NO: 722071 - DNA, 993 bp, Homo sapiens
gtggtggcaggcacctgtagtcccagctactcgggaggctgaggcaggagaatcccttgaacytgggaggcagaggttgcagtgagctgagattgcaccactgcactccagcctggatgatagagtgagactctgtttcagaaaaaaagaataatatacaaggaaccaaaaagtggttgattcctgagaggagaacagggaacagagtgactagggaacaaagatgggagagaagttattcttattgcataagtaacttttgtattttaaagttgtgtgctgttgtcttgtaatacttattcaaaaagtaaatatatgttttagaattcaatgaaaaataaagtgctcaacatagaatgttaaaattggattacgaaacagtaaagtgttatcacattattatttatgtattttttaaagtacataaataggaagatatggatcaaaatgttttgcttggctatatttcctgttaaacatatgttattttggtaataagaaaaaaagatagctgagcatggcggcacgcacctgtggtcccagctactcgggaggctgaggtgggaggattgcttgagcccaggtggttgaggccacagtgagccatgactgtaccactgcactcaagcctgggtgacagagcaagaccccatctttaaaaaaagtaccaaataggccaggagcggtagctcatgcctgtaatcccagcgctttgggataccgaggaggggaggatcacttgagtctaggagttcaagaccagcttgggcaacatgatgaaaccctgtctctacaaaaaatacaaaaagtattcagtcatggtggtgcacacctgtaatcctagctactgaggaggttgaggcaggaggatcatttgagtcagggagttcgaagctgcagtgagccatgatcacaccactgcactccagcctgggtgacagcgcaagaccctgtctcaaaaacaacaacaacaacaacaacaaaacccacgaa

SEQ ID NO: 722072 - DNA, 599 bp, Homo sapiens
tttacgtgttcatttaaagaaaataccatattcttcaaattgatcactttactgaactgcagcaaatgaagtgttaaaagagcaaaattgttaaaattaatttattatttttagacataagatctcactctgtcacccaggccagagtacagtggctctatcacwgctcattgtaacctcaaactcttgggctcaagtaatcccccttcctcagcctcccaagcaactgggactgcaggcgtgcaccactatgcctggctaattaaaaaaaatttttttatagaggcagcatctggctatgttgctcaggctggtctcaaacttctgacctcaaatgatctccttccttagcctcctgaagtgctgagattacaggcatgagccaccactcccagcctaaaattgcatgattctaaggaagagactgcttatttgctgtgattttttttccagaaagatgtatacatttgaagagctataaaatcaggattaatttggtgcatttcatatagtccgttatgaaataaatatttagatagtaatatattcaaaactaaactatgcatttcctgttatatagtagttgcatgttattagaa

SEQ ID NO: 722073 - DNA, 591 bp, Homo sapiens
attttagtaggcatggttccctgccaagaagcacttggcagcagtcatttcaaggaagttgtaactgaatacccagggatctaggatgtgcgttttcactagcggctaaggatttgcctcagcagcccatgaaaagctctgattcacatcagagggctccatacctgcagggctcacactctatattaaagaccaagaggccattggtatagagggtgtgcttaggacattccaacccccctcccaaagaatgatattctacttatttaggattaagattattttgaggagcagatctcttagaatgatgtctagaacagctataacactgatgagctaaatacatctaagtgcaaagtagtttttggatgctaactgagtagtcaagatatctaagctgaagcaatctgaccttatttttgtctgccctaatgtggaaaccccagaatctagagccctggatcatgataggtgttattcttaggatgcagcctaatagttggtgttctgggttgcatctcagtccagctttccagtctggctgcaaatgtgagcactraactgtggacactaaaggaaagtatgaaacca

SEQ ID NO: 722074 - DNA, 629 bp, Homo sapiens
ttgtttgttttttgagacatagtctcactctgttgaccaggctggagtgcaatggcacaatctcagcatactgcaacctcctcctgggttcaaacgattctcctagctcagcctcccaagtagctgggattacaggcacctaccacacccggctaaattttttttatttttaatagagacagtgttttgctatgttggccaggctggtctcaaactcctgacctcgtgatccmcctgcctcagcctcccaaagtgctgggattacaggtgtgagccaccgtgcctggtcaaaaaagtttttaataattttttttgaaaataaagataaaccatttgctgattgcatacgtgcattgaagctttcttatacagtgcacctggagaaagtgccaggacgtaatgacacaaattgatgactagggacccttctagggactggggagcggggggagggtggggtgggaggaagagagattagagttttagtttacatttctttgatttttatactgataatacttttatagggggcaggttttgacttcttttaattcaaataaattttgtgtttctccaaactctgtacaagctacatgatgacttttagctgatggaggcttattacatat

SEQ ID NO: 722075 - DNA, 701 bp, Homo sapiens
gggtttgtgtggtcactgcaaaaagtgggagtcaggatcccaggaattatgactgttccatgacttgagccccaaaactccrgacctgaattgccagatgcacccttgatatctccatgtggcccatactcagctctctcaaactcaacatgttccagatggaactggtcttcttccctcaagacctggatttctcctgggctctggatttaagcagatggctgttcccattaccgaatcttctagaccagaagctggacattattcaaatttcttccttcttcatcacaccaataacaacagaaataagaaaactgtcattagctgagttgcttcactcctggtatggtaacaaatgcttcacatttagtgtataatttacctctcatataactgtgaagttggtggtattattatccccactgtacagataggaaaactgaggctcagaaagaaggggaagctttccaggagacgttctgacaaaacctggtttccaacctagttgattgggcctttctctttcatcccctgtgactctctctcctcagctaagttttttcaaaggcacccagtaggtgttcagagaaatgtgctggattgaactgaactaaccttctagagggtgttatgaactgcatctccgccctgtccagttggaaactgttgccaacacaaggtcctctttggagaggaagggg

SEQ ID NO: 722076 - DNA, 1437 bp, Homo sapiens
tagtgctatcatatatcaatgacaaaagaaccacagatttatatattagataatagaagaaaaaaactcataaagaaaattatgaaatattggaactgaataatgatgaaattattacccattaaatttcatgggacaaagtccaagtagcagttgggaacattttctatctttatttgcactgaagtgtaacatacatacagcaaggtgcttaaatcttaagtatacaggttggtgaatttcctggatatgcatatatccatgtaactgacacccagatcatgttgtagaatattaccagtacctaaagggttcctacataccattaaagattgggaaaactggagttctctctctcactattactgttcagcctggtgaagaaggaaagaaaaataaatcagtatgtctaaaataaaataatatgtttgaccaggtgtggtggttcatgcctgtaatcccagcactttgggaggctgaggtgggaggatcacttgagaccagaagttcaagaccagcctgggcaatatagtgaggcctcatctttatgctaagaatgttttaaatctaaaagagaaatttgaataaaaataatttttaaaacctcaatatgtttgtcttcatagaaaactcaagagaatcaagagacaaacttttagaactaatagggaatttggtaagacttctagatacacagtcaatcatgtactttataaatgttaaatatactgtatcacatacaaaattacgttttctataaatagatatgtatatttatctgtctatatatacctcaagatttcgtaggtatctgtgaattgatatgtgtagccttttggagtagggcctaccgtagagaaatgggggtaagaaataaaatataaaagggggaaattaatcataaaaataaaaaatgataaaggaattgcatgaactactgataatatgtgtggcgacttgaggaatatgatgaactcaacttcacaaagctgaagtcccaaaatactgagataaaatggagccttaaaaaatcagaaacatcccttgctgattcatattcaaattcataaagcatcccttataaccatgactttgtatgacattcaactttgctggactccatttgctgtcctggtaaaatgagaatcataacatctctaagatacacaatggggatataactacctaggagctactgaaacatggaagcaagctgccctaggaagcaaagtgggcctctccttccctgcttttctctaatcaygaaagctgagcctgcagtgaagatgacagaggaataaaatgccctccttaggagaatgatgcagaagatggcttaggattttgaaatctgaagctataactcattacagaaatgcaaaaccttgcttatttgaagatgatccattaggcctgattggatggatctggtgagcc

SEQ ID NO: 722077 - DNA, 847 bp, Homo sapiens
gataaatggggggatgaatagatggatggaaaactgaaggacagaggaagggaggaaggaaaaaaggataaagagaggaaaggaaaggggagaacagaatgataggaggatggatggatgtatggttgaatgatgcttagatgggtaatgtccatattaaatccaattctgttcttaaaagttaaagtatgtagtaatttttcttagctagctggctggcttgtcactgaaccctgatcttttgccagcaaactactctatacgcagccacctgctctaagaatttagctaaccatgcttcactgtaatttgaataaaatagatctacacatctgaagttatcattgaaacaacagactacagaccactaaaattctgagctgcaaaaaataaaagaattccattttcttcccagttccaataaagccttcaaaagtgtaccttccaaattattaaattgtgttcagatcggattccttgatcatctaattcttctgtattatttgtctgcagaacaaccaaactttggaaaatgaaattccttttctcccaggtattagacatgagattacatgtgaatgtgtggtaagatgaatttcctttagttctcaaagggtgtttttaaaaaactgaattgccaaaatttaaatattgagaaatttcacatataaacatacaaatgtctagagtatctgggaaaaaatcrtaagaccataagacctagcaacactgtatgtcagggctactgtgttaggttgtgcgggtttcttacaaccaaccctatgaggcatatacacaatcaattgtggtttacacagactatgatataaatggagccacaaagggt

SEQ ID NO: 722078 - DNA, 982 bp, Homo sapiens
tttaattttcccaggtcaaacggtttaaataccaggtaatttccctgtgaagctataattttaaatgccacttcttgctaatatatttccaatttaatggtaagtcacattttagaatgtagtaaaacatttttacaaaagtattgagtcagataatscaagaaaaatgatttagcacagtggttggtacccagcaagtgctcaatgaatgttagcttatgacaactttgggaataatgatgttgccaacaatgacaataataatactcaaacaactatactcaccttatggtaggctgctacgaaggctgcccccaatgatctccactttctgtaattcacaatctcactaagcccttcccttgtgctgaattcagcatgtgctgaatgtagagattcaattctaatgaagataatatggcagaagtgatgagataccacttccaagattaggttattaaaacaccttcacttttatcttcagtgcttacactgtttatcaatctcttggatctcttgctgatatggtttggctctgagttgtaattcccaatgttgcaggagaggcctggtgggaggtgactggatcatcggggtggatttcccccttgctgttctcatgatagtgactgagttctcacaagaactgatggtttaaaggtgtatggcacctcccccttcaccctctctctcctgctccaccagagtaagacatgcttgcttcccctttgccctctgccatcattgtaagtttcctgaggcctcccagccatgcttcctatatagcctgtggaattgtgagtcaactaagcctattttctatataaaccagccagtctcaggtagttctttctagcaatgtgagaacagactaatacacttgccctgggggtaaccagttatgatatcgtgacgtattcctgtggcaggccccagatgagtgtgattggaaatggattttctaaggcctatcaacaaccac

SEQ ID NO: 722079 - DNA, 499 bp, Homo sapiens
aaactctgtctcaaaaaaaaaaaaaaaaattatccttgggttgttttctcctttcatgactacaaacagtgctacaacaaataaccttgtacattctctgttttgcacatatgcaaggatatctattaaataaatgcctaaaggggaattactaagtatgtgcattcyaagttttaatagatactaagttgtcaccaatagacgttcattcattcattatttgtagttaataagcacttactacattctaagcctgtactgttctggagtttggggttacagcagtatatacagcaaagtcctgggtttacagttggagagcagagacataaatgcatagaatagtgtcatcagatggtaagtgctcaaaatgggatgaaaaggagaatgatagaggggatgggagccactgttttagatcacatgatgagcaaaggcctgaaggaggcaaggaaaaattggtatgcatttcaggattagcggggaaaggtaagtgtat

SEQ ID NO: 722080 - DNA, 599 bp, Homo sapiens
ttattataaatacatgcattttaaatagagcatacctgtgttttatctgctgcctacactaacctcttctttgctgtcaggaaaggcccagtgatcaaggcaaccaaagtataaagaaacacagaagatttcttgcactgaattctataggaaccagtccttttaagagatatgtttgaaagattataaaataatgttcaatgtggaaaatttagaaaaatataaaaaagaaaataaaagataaaaacatccatatcccaccatcccactatgcagaacaaaaactgacatgttgccaggtgtggtggtctgtgaccccagcactttgggaggctgaggggggaggatcacttgaggccaggaagtcaaggctgcagtgagctgtgattgcaccactgtactccagcttgggtgacacagcgagaccctgtctccgaaaaaataaaaattgacatgttgatgtaattcctttaaatctatttcagaatgtgtttgtgtgtgtrtatatatatatatatatttttttttttttacattggagtcatagcattaatacagctgcatattcttttaaagtttattgtgtagtaaacattttt

SEQ ID NO: 722081 - DNA, 600 bp, Homo sapiens
tctgtcacccaggctggagtgcagtggcacaaatctcagctcactgtgcaacctccatctcctgggttcaagcaattctcctgcctcaacctctcargtagctgggatttcaggcatctgccaccacacctggctaatttttgtatttttggtagagatggggtttcgccatgttggccaggctggtctcgaacctctggcctcaagcaatccacctgcctcagcctcccaaagtgctgggattataggtgtgagccactgcgcccagttacggaactttttaacggagtccttactatgtgcaggtgctgaggctaaggtattagggacacagggagagcaaaaaagatatgacctccatccccaaggggctcatggacaagcaggacagatggacgttaaacagataaacacacatgattgcagattgcagattgcttcacgacagctgctccaagtcagtgagggagctttgggacgggccgcacattctccttacagggagatctgtttgaatgggtcaaagagaaatagtggccaatgcttctctctcctcccccacgattgtatattctatatacttttcttaattccattctt

SEQ ID NO: 722082 - DNA, 1300 bp, Homo sapiens
tttttgacagagccttgctccgtcccccatgctggagtgcagtggcacgatgctcggctcactgcaacctccacctcccgggttcaagcgattctcctgcctcaggctcccgagtagctgggattacaggcgcgcgccaccatgcccagctaattttttgtatttttggtagagacggcatttcaccatgttggccaggctggtctcgaactcctgaccttaggtgatctgcctgcctcggcttcccaaagtgttaggattacaggcgtcacgactgtgcctggcccagatgtctctaattctaacatgagatgtattgcaggatcatagcagagtgagttgctgatgtatccagaaggaaacgagcatggaacactcacgacagctgtcctgagaagtgtgtgtgtgctgtgcttgaatatctcactgctcatttatacacaggctttctggtgactgagttaacagtayctgtttcataaataatgtagccctctttctttctttctctctctctctctcttttttttttttttttttttttttgagacagggtcttgctctgctacccaggctggagtgcaatggtgcagtctcagctcactgcaacttcaccatgcctggctaattttttcttttttttttttttgagacggagtttcgctgtttttgcccaggctggagtgcaatggcacaatctcggctcaccacaatctttgccttttgggttcaagggattctcctgcctcagcctcccgagtagctgggattacaggcatgtgccaccacacccggctaatgttgtagttttagtagagacggggtttccctatgttggttaggctggtctcaaactcctgacctcaggtgatctacccgcctcggcctctcaaagtgctgggatcacaggcatgagccatcactcctggcctaatttttgtatttttagtagagagagggtttcactctgttggccaggctggtctcgaattcctgacctcaagttatctgcctgcctcggcctcccaaactgttggagttacaggcgtgaaccaccatgcctggccagctctatttctttaagcctacatgttttgcacttgttaaaagtatttgaacatacaattactcagcttcccttgtttacgcgtgaattttgtagaatcttaaatattttttccaatctaagctttattttatcccgtttcttctatatttgtataactttaggcggctatcttcattgaaagttttttctcaaaagccttaagatagaacatagttcttggcagcaatttga

SEQ ID NO: 722083 - DNA, 2639 bp, Homo sapiens
tgaaaaggagcccagttggttggagctaggcacctggaaggtgaggtcagtaaggatggccttggactgtggtagtccttcgtatccaatagaactaccttaaattagtcattttccaccttggcttcacatgagaagcaatgggggagcttttaaagccacactctgggcaaattagtttagaatttctgagatgttccaggcatcatgaatttttaaagctccctggtgattccaatgtacagctagtggttgggagccactgtcatgagaaaacttctacaagttctgggaaggaagagcatcattcaaaagtcaaaacaagataataagtgcacctcatgattgtgcaaaatacttccccatctttccaattgacttgaaactgaatttaattttgctcaagttcaaggagactgtagataatcatgtcatgctagtctacattgacattgcatgatgtttttaatgctacagcttttgaactccagaactgaagcacccttaaagatcatagatgggtccaaatagattccttggcccatagaacaaattattaaaagattaagtgagtgtattcttttttaaatatatagaccattcagttaaaataattgttaataaaacattattaatgcagaaaattgactgacctgtgtttctttacaaggtttgaaggagaagttctgaaggactctgactagagcaagtttcatgttcacgagagcaaacctcatgccaatgcagtttctgggtccacttccaaagggtgtgtatatgtaaggatctatgttgtccttgttctttttactgaacctggttccatattggtagatattttaaaagttaaagacataatacctctaagagttacatgttagggtttcttacttagggcccacccctctactagcagtacacaggatacttttgtgggctagtcactgaaatcctgctatgcatattttgctatgagaattgtaaggtacagatcctttctactctccttacattataggagctttcagtcttgttgagaggagataaatactgttgcaaagtatatttatttctaaacactcaaattatagtcaggatggtgatgtgttcacactacaaaaggcacataagtgatgagaatgactgacagaaaagtagattcctgcctcaagtcacccttatgttggtcatgaggaaggagaagaaattgtcttgcactacttcaaaattgttattttgcactttccttctcctctcgtctcttgtttttctaattctcctccttctcctccctaccttgtcttacccctccttctctcctccttctcctccttcttctaatctccatctctccttctttctcccccacacctccatagaatagtttaagtcagataatttacacaggcatatgatgctactgtattgatggaaagcagtgtcatcactgctttctttgtctatctgttgcactaacctataaattctttgaagattagacgcatgttttttattcaaatttgattcctgaagatttgagtatattcaggaaaaaatattcatttgtgggrcataataatagcattgtgatcatgtgtttttaaaagagtccttacattttggacacttatgacccataaggacataattgaggaccttcatcttaagttgctgggactgtgactggctatagttttcttttatctagtctgtggtttgtaaagtgtgacaatgatcaatttcatgatttgaaaaaaccttttaaacataaaaagacaagcaaacgattgtacaagcccagactgtcctgtagagaggcagaatatgcttgaaccaggctggttcagggagggctcccttcccaggggcctcctacctttcagggaggaacttctcaggctctctccagtactttgggtcatgatgaagaacatagcttggaatcatcaccaccacccctttgggaataaacatcccattgatttcaacatcttttttgcagaccctctcaagtctcatagcaactgggaataatctgagtgtttcattcaccaccatgtcaagatactccaactgtagcacagtatcataggtgggtggtgcctgaaaagaaagaaacagatttggataaattgagatttttgaattaacttttaactcagtccatgtagtactgttgaactgttagaagttccagagaacaactcatactggcaaaggattgtagcattcataaagtattttaataactgtcatgccctttgatgtgctcaatggcccactaagatgtgtggaggagttatgaaagcaggagacattcgggaaggctctaaccccaatgactgaaatccttagcataaccatgtagtggtttttctttctcatggaagcaaacatgactaataggctatgaccactagcatcaaataaaatatgacaaagtgattgtcaccattcaaaaaagaggttacacgtctgtaaccaaggaagtgaaaacagatagaaaaagcaaattctctgtgcgacaaggattattggccaaacttctggttcataactctttttgttatatatacaaacaaaaacagttacaaagcaggatttgtattatatatatgtgtgtgtgtgtgtatatatat

SEQ ID NO: 722084 - DNA, 1105 bp, Homo sapiens
  misc_feature 2, 3, 4, 5, 6, 7, 8, 9, 10, 11, 12, 13, 14, 15, 16, 17, 18,19, 20, 21, 22, 23, 24, 25, 26, 27, 28, 29, 30, 31, 32,33, 34, 35, 36, 37, 38, 39, 40, 41, 42, 43, 44, 45, 46,47, 48, 49, 50, 51, 52, 53, 54, 55, 56, 57, 58, 59, 60,61: n = A,T,C or G
  misc_feature 62, 63, 64, 65, 66, 67, 68, 69, 70, 71, 72, 73, 74, 75, 76,77, 78, 79, 80, 81, 82, 83, 84, 85, 86, 87, 88, 89, 90,91, 92, 93, 94, 95, 96, 97, 98, 99, 100, 101: n = A,T,C or G
cnnnnnnnnnnnnnnnnnnnnnnnnnnnnnnnnnnnnnnnnnnnnnnnnnnnnnnnnnnnnnnnnnnnnnnnnnnnnnnnnnnnnnnnnnnnnnnnnnnnngagagacccgccgccacctacgcagtgattatctggtgatggccaaacagtttgttctggctgtctgtctaaaatattaattcttcacagtgcgagcgagcgaaagtcggtctccagatagacaaaaacacctgaaactggtaaacagctgcttccgaataagatctcagaggttgggtaagtgcgttcaagcaggcaccctaaaaggcaaaatgatggcgcttaactagtatttgaccttcctctgcaaacatccgactgataagggaaaaacgcctcaagtgagcatgcgcacaacttccgtaaacacactgtgcatgtggcccctcccaagtgctggcaggccactgcacgtgcggacagcccaacccaaggaaaaatcagtggggaagaaaaaggggagaaggaatgcaacaccccggaaacatgccaacatataaaaccgtaagtcaaaggtcaaaccatgcactagagtctctcaagtyatccatttgcccctcttccgagtgtactttacttcctttcattcctgcttcaaagctttcttatgaaatgttcactcctgctctaaagcttgccttggtctctcactctgccttatgtccctcattcaaattctttctactgaggaggcaaggattgaggctgctgcagacctgtatggattcgctgttgcgaactgtgccactttaaaacaatacaccgaaataagaacaatacctatatactatgcatatgaggctgatataaggacttctttgtcacctttgggtaccagaatagatgttaatgggaagaatactgggatgaagagacacataatctgcatttttttttcttttagtttttgtctaggaatccacaagtttttaagaacaattattttacagcttttaagagtgtttctttttttaactacagtttccaggaaatgggaaaatatgtatatctgacatttctcattagtgagaatgagaatgatatctgtaatgtcaaaatgtcct

SEQ ID NO: 722085 - DNA, 631 bp, Homo sapiens
ttgcaccactattcacaatagcaaaggcaaggaatcaacctgaatgcccatcaatgacagattagataaagaaaatatggtacatatacaccatggaatacagtgcaggcataaaaaaaacaagatcatgtcttttgagagaatatggatggagctagaggacattatccttaacaaacaaatgcaggaaaggaaaaccaaataccacatgttcttacttataagtgggagctaaatgatgaaaactcatgaacacaaagaaggaaacaacatacactgtggtctacctgagagcagagggtaggaggaaggagaggagcagaaaatacaactattgggtaatgggcttaatacctgagtgatgaaataatctatataacaaacccccatggcacaagtttacctatgtaacaaacccgcacatgtaccactgagcytaaaataaaagtttaaaaattaattaattaattataaattatatcttgactcaacaaattatgtttattttccctgcactcagcaaaaaggtgtataaatattgagaacctgtaaagagtaaagagcataacaacaaaaaagaatatcttttcttcaatggaagaagtaagatcatgtttgcctactgatttac

SEQ ID NO: 722086 - DNA, 2404 bp, Homo sapiens
tcgtatcatatgctacacaaactttatgttagtaaaattcataagaaacctatgtaaatatatatgtgcrtacaccttttattgggcaggggagaactggttgctaaacatgtatgaacacaagcctggagttgctgaaatagtgtattgttttaaagataatcaaagtgtagtatgaagaatatgaatattgtagtaatataaatatgccaaagttttttgaaaacacagaggaggaaatgtaatctacattgcgcccaaacaggccacaggacagttttccttgagtagctgagttatgtaggctttggtctgtgttaaaatagcagaagccttcctatagttaacaatactacattgtgcacttaaacatttaatggagtagatctcatgttaactgttctttctacaataaaaattagaacttttttttataatgattgctgaagcaataagttaaatattattttataggcaacaaatcaatgactaaagaagtctggcatgcagaacttggacaattttgtatatttgtgcaaaatggtgttaatgtagaaagttaaaagaaaatattgtagtttaaaggagaatttgaactgcaatatttttccgaacatattcctgcacagagaaggatggatgatgtatataagattatattaaaactagatgctgctagaagtaagacattcatttgtaagatgtacgttggcataaaatattaactgacaagatatcaagatatctcccacccaccagatgtactgagactgtagaatgtcaatctggacaggaagctttcataactgccagacagaaaatgtgttgagacagtgcagagaagttctctccctgtgattggaactgaggggaggggtgaaaagaatgggcatttcccacactcctagaaaaactccttgacaatgacccataaggggaacttctgtggggcatttctggggagccacagagaaattttttttcttctcttccctgcacacttccagaaaagattacttagaacaggtgttcctagatatccagaaaaacaatcaaatatgcaaatgtgggtttgcatatttgacatatttgcacatataaaatatgtgtttgtgtgtatgtgtgtgtgcacttagaaatctatgtgtgtcatgtgtaggtaaaagaaagagaagagaaaaaacacatttatgaagatgccagataaaaatctggacaggctccacggctcacgcctgtaataccagcactttgagaggcggaggcgagcagatctctcgagctcaggagtttgagactagcctgggccacatggcaaaatcccatctctactaaaaatacaaaaattagctgggtgcggtagcacacacctgtaatcacagctactcggatggctgaggtaggagaatcacttgaaccacagaggctgaggctgcagagagcaaagtccatgccactgcactctagcctgggcagcagagggagactatgtttcaaaaaaaacaaaattagaatccatgccctcctagtcattttccttaatatttattccctatattcttccattaaaaaaggtatcagttattttatttgattctaggtctaagtgctatttttttcaaatatatattcttgtctcacattcagctctgggtttgggttatttacagagaaatgcttgaacatcagaaaatattgctttttggtttttttttttttccgttcttttttgtttctagctcctgcatcaatgtactcccttctggattccacacagaagttcacataagaaacacattctgaaaatatttcttcatcttcatctcttcacaatagctcagcttctaatccacttttatgtgtgacattttgtacctgagttcttcagtgaaattttacattgatctcaatattacaatttccctgaaggtttaccgctttcatcttcttgaaggaagaatatatggtcacaaaataaacttgttaataaagtgactgtgttggtttatctcctgcatagtatgtatgggttgtatcttttcatcttatctagaagcataaaaatttatgttatctctcacaaaccaatagagagcaagaacaaaattgagattttaagagaacatttttaaccactccactgaggtataattgacatacaaaaagctgtacatatttgctgtgtacaacttgatgagtttggagataagtaatcacccataaagccctcatcacattctatgccataaacttattcaccacttccaaaagtttcctcctaccttctttatttattttttgtgataagaacatttaacataagatctactatcctagaacatttttaagtataaaattctgtatcgtcaactgtaggtgttatgctgtacagtggatctctagg

SEQ ID NO: 722087 - DNA, 2404 bp, Homo sapiens
tcgtatcatatgctacacaaactttatgttagtaaaattcataagaaacctatgtaaatatatatgtgcgtacaccttttattgggcaggggagaactggttgctaaacatgtatgaacacaagcctggagttgctgaaatagtgtattgttttaaagataatcaaagtgtagtatgaagaatatgaatattgtagtaatataaatatgccaaagttttttgaaaacacagaggaggaaatgtaatctacattgcgcccaaacaggccacaggacagttttccttgagtagctgagttatgtaggctttggtctgtgttaaaatagcagaagccttccwatagttaacaatactacattgtgcacttaaacatttaatggagtagatctcatgttaactgttctttctacaataaaaattagaacttttttttataatgattgctgaagcaataagttaaatattattttataggcaacaaatcaatgactaaagaagtctggcatgcagaacttggacaattttgtatatttgtgcaaaatggtgttaatgtagaaagttaaaagaaaatattgtagtttaaaggagaatttgaactgcaatatttttccgaacatattcctgcacagagaaggatggatgatgtatataagattatattaaaactagatgctgctagaagtaagacattcatttgtaagatgtacgttggcataaaatattaactgacaagatatcaagatatctcccacccaccagatgtactgagactgtagaatgtcaatctggacaggaagctttcataactgccagacagaaaatgtgttgagacagtgcagagaagttctctccctgtgattggaactgaggggaggggtgaaaagaatgggcatttcccacactcctagaaaaactccttgacaatgacccataaggggaacttctgtggggcatttctggggagccacagagaaattttttttcttctcttccctgcacacttccagaaaagattacttagaacaggtgttcctagatatccagaaaaacaatcaaatatgcaaatgtgggtttgcatatttgacatatttgcacatataaaatatgtgtttgtgtgtatgtgtgtgtgcacttagaaatctatgtgtgtcatgtgtaggtaaaagaaagagaagagaaaaaacacatttatgaagatgccagataaaaatctggacaggctccacggctcacgcctgtaataccagcactttgagaggcggaggcgagcagatctctcgagctcaggagtttgagactagcctgggccacatggcaaaatcccatctctactaaaaatacaaaaattagctgggtgcggtagcacacacctgtaatcacagctactcggatggctgaggtaggagaatcacttgaaccacagaggctgaggctgcagagagcaaagtccatgccactgcactctagcctgggcagcagagggagactatgtttcaaaaaaaacaaaattagaatccatgccctcctagtcattttccttaatatttattccctatattcttccattaaaaaaggtatcagttattttatttgattctaggtctaagtgctatttttttcaaatatatattcttgtctcacattcagctctgggtttgggttatttacagagaaatgcttgaacatcagaaaatattgctttttggtttttttttttttccgttcttttttgtttctagctcctgcatcaatgtactcccttctggattccacacagaagttcacataagaaacacattctgaaaatatttcttcatcttcatctcttcacaatagctcagcttctaatccacttttatgtgtgacattttgtacctgagttcttcagtgaaattttacattgatctcaatattacaatttccctgaaggtttaccgctttcatcttcttgaaggaagaatatatggtcacaaaataaacttgttaataaagtgactgtgttggtttatctcctgcatagtatgtatgggttgtatcttttcatcttatctagaagcataaaaatttatgttatctctcacaaaccaatagagagcaagaacaaaattgagattttaagagaacatttttaaccactccactgaggtataattgacatacaaaaagctgtacatatttgctgtgtacaacttgatgagtttggagataagtaatcacccataaagccctcatcacattctatgccataaacttattcaccacttccaaaagtttcctcctaccttctttatttattttttgtgataagaacatttaacataagatctactatcctagaacatttttaagtataaaattctgtatcgtcaactgtaggtgttatgctgtacagtggatctctagg

SEQ ID NO: 722088 - DNA, 2404 bp, Homo sapiens
tcgtatcatatgctacacaaactttatgttagtaaaattcataagaaacctatgtaaatatatatgtgcgtacaccttttattgggcaggggagaactggttgctaaacatgtatgaacacaagcctggagttgctgaaatagtgtattgttttaaagataatcaaagtgtagtatgaagaatatgaatattgtagtaatataaatatgccaaagttttttgaaaacacagaggaggaaatgtaatctacattgcgcccaaacaggccacaggacagttttccttgagtagctgagttatgtaggctttggtctgtgttaaaatagcagaagccttcctatagttaacaatactacattgtgcacttaaacatttaatggagtagatctcatgttaactgttctttctacaataaaaattagaacttttttttataatgattgctgaagcaataagttaaatattattttataggcaacaaatcaatgactaaagaagtctggcatgcagaacttggacaattttgtatatttgtgcaaaatggtgttaatgtagaaagttaaaagaaaatattgtagtttaaaggagaatttgaactgcaatatttttccgaacatattcctgcacagagaaggatggatgatgtatataagattatattaaaactagatgctgctagaagtaagacattcatttgtaagatgtacgttggcataaaatattaactgacaagatatcaagatatctcccacccaccagatgtactgagactgtagaatgtcaatctggacaggaagctttcataactgccagacagaaaatgtgttgagacagtgcagagaagttctctccctgtgattggaactgaggggaggggtgaaaagaatgggcatttcccacactcctagaaaaactccttgacaatgacccataaggggaacttctgtggggcatttctggggagccacagagaaattttttttcttctcttccctgcacacttccagaaaagattacttagaacaggtgttcctagatatccagaaaaacaatcaaatatgcaaatgtgggtttgcatatttgacatatttgcacatataaaatatgtgtttgtgtgtatgtgtgtgtgcacttagaaatctatgtgtgtcatgtgtaggtaaaagaaagagaagagaaaaaacacatttatgaagatgccagataaaaatctggacaggctccacggctcacgcctgtaataccagcactttgagaggcggaggcgagcagatctctcgagctcaggagtttgagactagcctgggccacatggcaaaatcccatctctactaaaaatacaaaaattagctgggtgcggtagcacacacctgtaatcacagctactcggatggctgaggtaggagaatcacttgaaccacagaggctgaggctgcagagagcaaagtccatgccactgcactctagcctgggcagcagagggagactatgtttcaaaaaaaacaaaattagaatccatgccctcctagtcattttccttaatatttattccctatattcttccattaaaaaaggtatcagttattttatttgattctaggtctaagtgctatttttttcaaatatatattcttgtctcacattcagctctgggtttgggttatttacagagaaatgcttgaacatcagaaaatattgctttttggtttttttttttttccgttcttttttgtttctagctcctgcatcaatgtactcccttctggattccacacagaagttcacataagaaacacattctgaaaatatttcttcatcttcatctcttcacaatagctcagcttctaatccacttttatgtgtgacattttgtacctgagttcttcagtgaaattttacattgatctcaatattacaatttccctgaaggtttaccgctttcatcttcttgaaggaagaatatatggtcacmaaataaacttgttaataaagtgactgtgttggtttatctcctgcatagtatgtatgggttgtatcttttcatcttatctagaagcataaaaatttatgttatctctcacaaaccaatagagagcaagaacaaaattgagattttaagagaacatttttaaccactccactgaggtataattgacatacaaaaagctgtacatatttgctgtgtacaacttgatgagtttggagataagtaatcacccataaagccctcatcacattctatgccataaacttattcaccacttccaaaagtttcctcctaccttctttatttattttttgtgataagaacatttaacataagatctactatcctagaacatttttaagtataaaattctgtatcgtcaactgtaggtgttatgctgtacagtggatctctagg

SEQ ID NO: 722089 - DNA, 608 bp, Homo sapiens
tctttgcctattaatccttaaacgcttaagcattttaggataaacataatcagtatgtttctgatctattgtcacataggcttctaaaaagttagttcataactagagctttacaagccattttaagatactttcaagatcttttctttagaaacaataaaagctgaaatgtaaatcctgaaacccctagaggaaagcacagaggaaaacttttttacattggtctttgcaataaactttttggatatgacactaaaagcaggccacaaaaggaaaaatagacatatgagaatacataagacaaaaaagcgtctgcacagcaaaggaaacattctacagaacaaaaagtcagtttgcagmatgggagaaaatatttggaaaccatataactgataaggggttaattcctaaagatatatgagaccactgcagtttcaaatagacaaataataacccaattgaaaaatggccagaggatttgaacagatatttccccaacaaagacacaaaaattgacaagatgtatatgaaaatatgctcaattattaagtgtcagagagagaaaaatcaaagctacaaggggatatagtatgtctgttgcaaaaaaa

SEQ ID NO: 722090 - DNA, 1438 bp, Homo sapiens
tagaagcttaagaacagtccattctaatttatggccatagaaatcagcagagggattatcttttagggtggggttaaatggtattaataggaaaaaggcacaaagggactttctggaagtaatgaacagctctataacttgaccagggtggtgatcataagggtaaacgtgaaggtaaaaattcattaggctccgcacttaagcagcgtgcatgttacgttggtaaatgatactgcaacttgaggaaaaagttttaattaaaaaaatagtaattaatgaattggaaaacaaaaaagaagtgattgataaatacaagagctagtcctgtgggaggtgggggtggggtagggggataaataaactaaatataccactatgctaccaaagatctgtaaaaagagataaaacacaaatacacaaatttaagaatgagaaagataagtgataactgatacaaggaaaactaagataattttaaagtgcatatattttctttctaaaaatgtcraaaccctcaaaaaattagaaaaaaaaaactaggacaaaaacatgaaattccaaacaagaatttgtgtgtatgtgtttgaataaacacacacacaaacaagtaagaacccaaatttctgccataaatttccagaggaaaagaggcaaaacgctggtatggtgtggcatggtgcagtgggacctttagtccacatcacaagaggtgcgagggagttcagatgcaagataggttgagaagttacactaatagccccagttcacagacaagcgaactgagtgaccgagaagacgacattccctggaaagacttgaacaaactaattctgaggggaagaagccctggccaactttctctaggctcccagtgaggagggaggaatgcagctaccatctccacaggccaggtgaaacgcagacagggaaggtgtatttattacttccacccagacgtaatcatccccagcaaggaacaaggactcagcagggttgaaaacagatgagaaaattaatgaaatgagatcgtctgagagaatagtaagccaggggagagaaggaatattgcaaggccccaggcaagttctcttcacccactcacaccccacctaaggccagaaaacaagtagtacctaaggttgccagatttcgctaataaaatcacaggatgtccagttgcatttggacacacttatactaaaaaaggattcactgtttttctgaaattcaattttaagtcacacgaatagcctcaattcacagagaagtggactgagtgactgcaagacgacagtatcatgacagggtatctgtctaccctaataagaccagaagctgagagatggccttattgtttcccgtttgtgatcagacagagtgggaaaggctttggggaagagaggggtgggtgaaaatgtggatacagggggtcctcctc

SEQ ID NO: 722091 - DNA, 1318 bp, Homo sapiens
tgaagaggaaacttcaaagcgttgaatttcagacagaayagcccctggatgaggagaacagagcttgccagaccaccacccatgaccccatcaaaagcccagcactgctgacataaggattacaatcctttagatctacgatgcggaggagtgaatagttaagcacacagtcttgagttaagctgcctagttgaagtgctggttctaccaattactaaccttgtaacctttagtgagacgcttaaattgcctaagcttcactttcctcatttgtaaaaaggggatttaaaaaaaaaaaaaaaaaacttctctaccataatggtgttcacgtgttcattgaaataacgtatgtaaaggcctttgcttagtatttggcatgtaatagatacagaataatgcttatattcttcatagtattatgaaggtcaataacaaatagtgctccatctcatttatttaactaaatactctcaggatatttattaactaaatatctgttgtaggaattttttgttccagcatacaacgtaaacatatgcacaatttaggaatgagtgccacagagcaagaacatagaaatggagttggatcaatgtgataaaaggccattgaatacagacctaaactttttatcatcctgcattgcctggggccatgttattacaacaacagagacatagataaatggcccaaaaaacagtatggtctgtgtatcttgatcttctctgagttccttgtattcacgcatgggattatgtacacgtaagtcaccacagaatttcagatatttaagctaccatctaaagaaagaatatatgtagaaccacaaagaaaatgtcatctatataaaataaaaagacacactggagctcgaagtgtctctaagggctcagccacaagatctcatacaccctaattccagctatgtcattggagtgcttggtgacacacctctgctctcttgtgcgtcacaccagcttcctgcttcaagcagcttccttgtgtactcacagtttctgtttcatgacattaactctgtgtgcctcataatggcctcgatggccccttcttcacagtgacttttactctctcccaaggacaatgataatgcacactttgttacctactttaaatcccaaaacagagattcaaactacagccaaaagatgaaaagagctgcagcgggcactgagctgtgccacccagatccctttcagaaatgaagagatttctgccctagcccctgggagtgctgcttgcagatagcccccagctgtcagccccctacagagaggttgcttcagctgaagagagctgc

SEQ ID NO: 722092 - DNA, 1318 bp, Homo sapiens
tgaagaggaaacttcaaagcgttgaatttcagacagaacagcccctggatgaggagaacagagcttgccagaccaccacccatgaccccatcaaaagcccagcactgctgacataaggattacaatcctttagatctacgatgcggaggagtgaatagttaagcacacagtcttgagttaagctgcctagttgaagtgctggttctaccamttactaaccttgtaacctttagtgagacgcttaaattgcctaagcttcactttcctcatttgtaaaaaggggatttaaaaaaaaaaaaaaaaaacttctctaccataatggtgttcacgtgttcattgaaataacgtatgtaaaggcctttgcttagtatttggcatgtaatagatacagaataatgcttatattcttcatagtattatgaaggtcaataacaaatagtgctccatctcatttatttaactaaatactctcaggatatttattaactaaatatctgttgtaggaattttttgttccagcatacaacgtaaacatatgcacaatttaggaatgagtgccacagagcaagaacatagaaatggagttggatcaatgtgataaaaggccattgaatacagacctaaactttttatcatcctgcattgcctggggccatgttattacaacaacagagacatagataaatggcccaaaaaacagtatggtctgtgtatcttgatcttctctgagttccttgtattcacgcatgggattatgtacacgtaagtcaccacagaatttcagatatttaagctaccatctaaagaaagaatatatgtagaaccacaaagaaaatgtcatctatataaaataaaaagacacactggagctcgaagtgtctctaagggctcagccacaagatctcatacaccctaattccagctatgtcattggagtgcttggtgacacacctctgctctcttgtgcgtcacaccagcttcctgcttcaagcagcttccttgtgtactcacagtttctgtttcatgacattaactctgtgtgcctcataatggcctcgatggccccttcttcacagtgacttttactctctcccaaggacaatgataatgcacactttgttacctactttaaatcccaaaacagagattcaaactacagccaaaagatgaaaagagctgcagcgggcactgagctgtgccacccagatccctttcagaaatgaagagatttctgccctagcccctgggagtgctgcttgcagatagcccccagctgtcagccccctacagagaggttgcttcagctgaagagagctgc

SEQ ID NO: 722093 - DNA, 1318 bp, Homo sapiens
tgaagaggaaacttcaaagcgttgaatttcagacagaacagcccctggatgaggagaacagagcttgccagaccaccacccatgaccccatcaaaagcccagcactgctgacataaggattacaatcctttagatctacgatgcggaggagtgaatagttaagcacacagtcttgagttaagctgcctagttgaagtgctggttctaccaattactaaccttgtaacctttagtgagacgcttaaattgcctaagcttcactttcctcatttgtaaaaaggggatttaaaaaaaaaaaaaaaaaacttctctaccataatggtgttcacgtgttcattgaaataacgtatgtaaaggcctttgcttagtatttggcatgtaatagatacagaataatgcttatattcttcatagtattatgaaggtcaataacaaatagtgctccatctcatttatttaactaaatactctcaggatatttattaactaaatatctgttgtaggaattttttgttccagcatacaacgtaaacatatgcacaatttaggaatgagtgccacagagcaagaacatagaaatggagttggatcaatgtgataaaaggccattgaatacagacctaaactttttatcatcctgcattgcctggggccatgttattacaacaacagagacatagataaatggcccaaaaaacagtatggtctgtgtatcttgatcttctctgagttccttgtattcacgcatgggattatgtacacgtaagtcaccacagaatttcagatatttaagctaccatctaaagaaagaatatatgtagaaccacaaagaaaatgtcatctatataaaataaaaagacacactggagctcgaagtgtctctaagggctcagccacaagatctcatacaccctaattccagctatgtcattggagtgcttggtgacacacctctgctctcttgtgcgtcacaccagcttcctgcttcaagcagcttccttgtgtactcacagyttctgtttcatgacattaactctgtgtgcctcataatggcctcgatggccccttcttcacagtgacttttactctctcccaaggacaatgataatgcacactttgttacctactttaaatcccaaaacagagattcaaactacagccaaaagatgaaaagagctgcagcgggcactgagctgtgccacccagatccctttcagaaatgaagagatttctgccctagcccctgggagtgctgcttgcagatagcccccagctgtcagccccctacagagaggttgcttcagctgaagagagctgc

SEQ ID NO: 722094 - DNA, 1318 bp, Homo sapiens
tgaagaggaaacttcaaagcgttgaatttcagacagaacagcccctggatgaggagaacagagcttgccagaccaccacccatgaccccatcaaaagcccagcactgctgacataaggattacaatcctttagatctacgatgcggaggagtgaatagttaagcacacagtcttgagttaagctgcctagttgaagtgctggttctaccaattactaaccttgtaacctttagtgagacgcttaaattgcctaagcttcactttcctcatttgtaaaaaggggatttaaaaaaaaaaaaaaaaaacttctctaccataatggtgttcacgtgttcattgaaataacgtatgtaaaggcctttgcttagtatttggcatgtaatagatacagaataatgcttatattcttcatagtattatgaaggtcaataacaaatagtgctccatctcatttatttaactaaatactctcaggatatttattaactaaatatctgttgtaggaattttttgttccagcatacaacgtaaacatatgcacaatttaggaatgagtgccacagagcaagaacatagaaatggagttggatcaatgtgataaaaggccattgaatacagacctaaactttttatcatcctgcattgcctggggccatgttattacaacaacagagacatagataaatggcccaaaaaacagtatggtctgtgtatcttgatcttctctgagttccttgtattcacgcatgggattatgtacacgtaagtcaccacagaatttcagatatttaagctaccatctaaagaaagaatatatgtagaaccacaaagaaaatgtcatctatataaaataaaaagacacactggagctcgaagtgtctctaagggctcagccacaagatctcatacaccctaattccagctatgtcattggagtgcttggtgacacacctctgctctcttgtgcgtcacaccagcttcctgcttcaagcagcttccttgtgtactcacagtttctgtttcatgacattaactctgtgtgcctcataatggcctcgatggccccttcttcacagtgacttttactctctcccaaggacaatgataatgcacactttgttacctactttaaatcccaaaacagagattcaaactacagccaaaagatgaaaagagctgcagcgggcactgagctgtgccacccagatccctttcagaaatgaagagatttctgccstagcccctgggagtgctgcttgcagatagcccccagctgtcagccccctacagagaggttgcttcagctgaagagagctgc

SEQ ID NO: 722095 - DNA, 437 bp, Homo sapiens
taataaaagctagagtctcctaagttcagggtttgtcttctataatgaaaacccaaggcatgcacaggcagaatctggccctcattcacatctccctgtgggaaattaaaatgtggggaactgatgcaagatgctactctgactactatgctatgaataataaaccatttgtgtctctggctcaagtgccttatgagatatagagatagagagagacagagatagcgatagagatagagatacatagatatatctcctatgtatggcaaactaacttattagcttacaagtagggtaaaatctcagactattcaccatttctgayttaatactagtttaacatcattgcacccaacatcatagttatccacactcttggatcttgggaatttctctttgcccttgagatctgggtccttaagagaccaattgcacca

SEQ ID NO: 722096 - DNA, 880 bp, Homo sapiens
tacattataaagatacatatcaactatgtaaaaaaatagccatttatcatagaacctaaataagtaaaaaacaattatacaaatttatttttctacccacctaattgaaagtcaaaaaaataaatatctgttttatttcttcttaaaaattagggttcatccaagccattagataaagggttgtttggcaatttgatatctgcgtgttaaaataatcaaatatatattgtagctgatggcttcaataataataacaaatctagatttttgttgttgtcgttgttgttacatccatgggacaagaatttattatctatcctcagtagcaaaatttgaaaaaaataaaagcctagcacttagtagagcaaaataaatattagtttagtgaataaatttgtactctgaatttaagcactttggtcctttcctaagatttgcccaaagcagaacgcaagatggtcaatctttaaccatccctgctaccaactctgtaatcaagtctcagcactgcaaatatttccaaactgtatctaaattgcaggacactttattctggtttgctagagttggtgtwtaaatagaaaaaaaaaacagctcctttctggattattaattattttaggaatacagaatttaaatttcaacttggccatggtagagggataagaaaagatcatacagctaaataataattcacagaaataaattgcttccttctgggttaattgtatgaatcttgacacacatttcctaggagagctagaaatagaaaaagtaaacagtaacttagctggacatggagactgaaagattcccatttactctgtatatatgtgaggtaccaaaaataacaagctcattcagaggctttcattttgca

SEQ ID NO: 722097 - DNA, 880 bp, Homo sapiens
tacattataaagatacatatcaactatgtaaaaaaatagccatttatcatagaacctaaataagtaaaaaacaattatacaaatttatttttctacccacctaattgaaagtcaaaaaaataaatatctgttttatttcttcttaaaaattagggttcatccaagccattagataaagggttgtttggcaatttgatatctgcgtgttaaaataatcaaatatatattgtagctgatggcttcaataataataacaaatctagatttttgttgttgtcgttgttgttacatccatgggacaagaatttattatctatcctcagtagcaaaatttgaaaaaaataaaagcctagcacttagtagagcaaaataaatattagtttagtgaataaatttgtactctgaatttaagcactttggtcctttcctaagatttgcccaaagcagaacgcaagatggtcaatctttaaccatccctgctaccaactctgtaatcaagtctcagcactgcaaatatttccaaactgtatctaaattgcaggacactttattctggtttgctagagttggtgtttaaatagaaaaaaaaaacagctcctttctggattattaattattttaggaatayagaatttaaatttcaacttggccatggtagagggataagaaaagatcatacagctaaataataattcacagaaataaattgcttccttctgggttaattgtatgaatcttgacacacatttcctaggagagctagaaatagaaaaagtaaacagtaacttagctggacatggagactgaaagattcccatttactctgtatatatgtgaggtaccaaaaataacaagctcattcagaggctttcattttgca

SEQ ID NO: 722098 - DNA, 1132 bp, Homo sapiens
ttacctcccagactccagaacaggagattggaatttgcaaaggcaaaaaagatgagaactgggctttatcaagcaaccatagttttcagttgcttcatgcatgccttgggtctgttttgataaccagcatatcttttgtaacccaggcaagaaggaaaaatatgtgtcctactgaaggggctggactagattgtgagatgggctctgagcattccagcctcaaagataattaagactcaagaagttttcttcttgagcaagagttcaggaaaagtttatactgacttcacaactggctctgaccaaaagtttcagtgcccttttgttggaagtattaacttacttgacccctagtttgtacataaaactggctaaagagaaaggaggcaacatgaaaatggattttaaaaatccggttttgaactatgcctggcatgctaaaatatttaattcttcaacacttggcatttagagaagagggtggatttaaacagaccagctggctaattacactttgccaacattcctactggctgcttactgggtgagtcctgtttatgtcaaagtctaactctgtcctttatcccttatcatggccaagaaatggaatcccatgcattttacttaatatgaaatgttctggtgaaacccaaagcaacaaaggccactttactttcttggtgagctggacaaggcaggtggtacttgaaggttgtggagaagtctccggacaggcttaaagttatgaacaactaagattccagcttaccaccctccccacctccttttatttatttatttagagacaagatcttgctctgtcacccaggctggagtactgggttgtgctcctagctcactgcagcctcgaaatcctggcctyaaatgatcctcctgccctagcctcccaaagtgcaaggccaacctcattttagtgaagataatttttttatccttaattaagatattgtgaagcctgggcacagtggctcatgcttgtaattccagcactttgggaggccgaggtgggcagatcccttgggcccaggattaggagattagcctaggtaatatagtgaaccccatctctacaaaaaatacaaaaatgaggcaaatgagccgtgtgtggtgg

SEQ ID NO: 722099 - DNA, 647 bp, Homo sapiens
attttattgtcatgcctcattttggctatccttgggcaacaaagaatggtggaagttattctgatttaaggaaaatacaggyatttaaaactgcagcagggaaaggaaagggagctaacatttactgagcacctaccatgttccaggcaatattccaggaacattttcttgttttaacctcacaacatacctgtgagatacattattatctctataacgaatgaagaaaatttggataatataactgcttaatgtcacacagctctaaagtggtggaaccaggattggaacccaaatttatctaactcctataattccgcttcttcaaatagtaatggtaccttatatttgtgcagagctctatagttttcaaagcagttacccacatgttatcaccttctgtttccaaacaactctgtgaggtatgcgttattatgaaactttacagaccaggagaaatgatgtgttcatggtcaaacacagaataaatagaggactaggacttgaagatttatgaacttttcacatgataccactgaagccttgggacaaaccaattgctattttaaagaatgcaaattatcttgtaccatgttttctattaccaataactatatatatatctatattctgtgtacatgggaaaa

SEQ ID NO: 722100 - DNA, 1190 bp, Homo sapiens
acgtatcccttatacgaataaagaaactgctggagtaccacttctctcctggggttgaagagatcatttaggtaaatactccttttaaagatgtaaaagctaatgatggtttacaaacttaaattcttacactagcaaggagtgggagctggccattggagagagagtactgacggacgtggtaagaaagtaggatttcaggtttagatataattcattttaatgaatgtgtgggaatacacagaagagaaattatatggctccaggttacttagtattgatctaagcttcagtttatacaaaccaatttagactttcctgaagtataaattgagttatatcttaattatgagaacatattaataaactaattaatataaacaggactagactaccccaaaagattcataaactaagcagcagcagtggccctgtatcatcacagttgcattttggaaggtaaaattaaccatttggaaatatgtattccatcaccttctttatgcaaggtacttatttaggctgaagacacaggacagaaaagggctttgactatatacagatgaacatggacaaagataaacttcagataattagagctatgcagagactttatggtattgtgaagagacaattttcgattatgtgtaataggaaggtgtcccagaggatgtggcatttaagcagagatttgaataacaaaaacaaactagccatggaaataaaatgtaggaggaagaaattctaggcagagggagtagctagtgcaaaggtggtcacatgatgtgtgtgggtgtgtgtgtttccccctaggactctaacacagaaggygaaggagagaatggtgggaagttgcattggagaggtacggaggggctgcatcatttacatttggcccctttatgataaggggtatccatattaaagtaaattgcctctagatgggttaagaacagtgtgtcataaaagtcaagtgaacaggtttcatttatatgtaccaccagatgctgcagtgcaagaatgttttctgtaatgtttgtttttattttttgccttgtattaatgctagtgtatttaagtttccactgtcagcccctgaagagcagacagacatctgctccttctagtacctaatccagtgccatagcaagaaattctcaactagtgaatcaatattgattggtgtagac

SEQ ID NO: 722101 - DNA, 1869 bp, Homo sapiens
tgtagaaatctgtacttcacacacagtcgttaaatttccaggattcttagtttactgaactatgcatatgactctaatttgtttttctttgctctagcatacctgtttagcctaatttaatctctaatgataagattgggaattacgtcttatagtgattagaaggaaaaaaatgctttgagacttacagtttcccttaaaatattttcagaattgctaaacatatttttcagaagctgataaactcctttgactagtatctttaagtttttaaatgttatggatgcagatttcagtagtccttcacatctgtagttttatttaygttataaagctcaccaaaattttaaacagcagatcatgtagtatggtgggagtagcacttaggtcaggagaccttggttctggtcctaatttgccacagctgtgttattttaggcaagttagttaacttctgttggcttcaattttctcatctgtaaaataagggggtaattgtaaatgaccattgagttttattctaaggtacaaaattctgtagggatttttttgcatttgaaaaaacataaaataactttggtttgcatgcattatgggaaatagaaaacttcttagttattgccaagagagaaatgagatctctttatatcatatataaatttgtcagtctttccaactattaatagagagaaagtcaagggctttgttttatcaactgttacttgtttaggacctataacagagcccaatacatagtagaggatccttaagtagctgatagatagatgaaatcattgaataaatcattaaaaaaggtaattttcttattttagattagaaatagttattttagatttaattacatgatttttttttccataaaagtgtagatgttttaaaccaagaatatataaataataaaatagtcataaataaagtggaaacattcaggataaagaaaaagataaatagaagtagtatggaaggacagaggcagagttgccaatataagaactccagaaagagacaaacaaaaaggttaaggtagagatgattttaaactagcatcatctcattgatttcatgccagatttgtaactgaggtttttatcataaggagaaatatttttttgaaatttttcttttttgcaaataaatattgaataactcagtggccttctagtagaaagacaagctaatatttattgggtacattttaagcatcagcttactgtacttagtaccttacacacattgttaatctttatgtgaaatcctttgagatagataccatcacttctgttatcttcatttttcaaacgatgaaatggaaattgaaagttgttatgtaacttatctgtggtcataccactatgtgatagaaccatgatttaagaccagatctgcccgattcctaaagtgtatttttccccccactctaccatgttgcctccaagggtgaaagccatgatgataaaggaatggcatgttctggttaagtggatatttttgttaacatgggtcacccatttcaaaacattagaatgtacaagactaaaagatgcactgaacattaaaactaattgaatatagtttataaaatcatttacttgacctataactttttaattacaacgtagaaagcatctttttaacctttatggctacttcagtttcaggtaaagtataacgttctgtgtattccaactcagagcacaagagaaagcttttagtcaattaaaatagcctttacagaaatagaattttagatctaaaagcagagattgctgaaacttactataatccttatgataataaactctacccagatcaaatggaaaaaacagggctaatttttggtggcctgca

SEQ ID NO: 722102 - DNA, 925 bp, Homo sapiens
caagactccatctcaatttttwaaaaaaaattgatttttaactcctaactttatacatgaccaatatgtgacttaataaacctatttaaaattattgactttattactgtattttacattattaactttattacagactttatttgttaaaatcctctattcaaaataactttagaaaaaatgttctgctttggtggttgtccatccagtgaaatttggaatgagtcattaatacactgcataaccatgttccttccctatctccatcttaatgtagttccttgtcttcaatgggcaccattgacactgcatcttttatcactcatctgcccagcccgcccggcccacaaaataaatggaaagatttcttcctaactcctgccctttctaaggaaggaagtataggcacatggtctaaagaggactggacctcaagttaaattatgaccaggcccagtcacccacagatcatatgatctctgggtaaacatagcctactctaaatgactaagttaaaggtagcaggaagatacagaggatactaaaaatgcttgacaaattttaaatttctgttgaatatttaaaaaatattttatttatatctctttcctagagggtacagtctatgtcctagtcatctatgtatttttcttttcacctagcacaatatcagttgctagtagaatgaattaagaaactgctccatacattttttttctaattttctgctttatctaatgtttctttaatgcagataaactgcttatatgataattaaatgtctctttcctgttttaaatgtatatattttatatagatatattgtacacgataatacatatatgatcatactttcaattgaaggaaagtaaggaaatagtttaaaactgacttatgaatcaatacatactacaatttcaacatc

SEQ ID NO: 722103 - DNA, 1080 bp, Homo sapiens
ggagttgaagggttttgcggtaaatctgatacctataattgaaaccttatgattagagttggtgagtggaaaatttctcagtaaaaagggaagtgctgtttctaaaaagaagggaagcgtgcaatagatgtccattataatagcagatcagtaaagatcaatttttctttaccaaggaagggacttcctttatagctcgtgtaatagtttggattattcagcaaatattcactgccctctcactagaggactggccatgtgatttgctttgttaaggtgtgtgttaacagatgcagctcaagcagaggcctgaaatgagtttctgtggttggggttgcttgtgcctctgccacctcggttagaaaagtacatcccatggaggccactggtcccacaggacgagagccagagggagcagagccagcccagctaacccgtagctctgcagctcaaaacagaattgccccagccaatcctgcaaactggtgggcatgatactgaatgattattggtgtatggcgctgagttttggggaagtttattatgcagcattattgtagcaacagtcaactgatacttgtgacataattacaacattgagtagttgtgtaaataaaacatctatatgtgaatgtttacagacagtttattcataatagccaaagttgtaagcaacccaaatgttcatcaacaggaaaatggataaataaatagtggtatattcacacaatggaatatttcactcagttttaaagaacaggctactgatgtattgaataacaccagtgaatctcaaaatcatcatgctaagtgaaagaagctagacataaaaagagtacatactggttgatcttatatgaaawttttttttttttttttttgagacagactctcgctctgtcacccagactggagtgcagtgggcacagtctcagcttactgcaacctctgcctcctggttccagggattctcctgcctcagcctcccaagtagctgggattacagacgtgcgccactgtgcacagctaatttttgtagttttagtagagacgggtttcaccgtgttggacaggctggtc

SEQ ID NO: 722104 - DNA, 954 bp, Homo sapiens
caactgaggcccaggaaggtttaagaaatttgctcagtatcacagagatgttagaagggacagctaggatctgaactcaggcagccagactctatagcctgtgtacatgaccatgttacatggccttatatagcccaaaaacttcattttaatatactgcattatacaacagtaaaacaagctcaaatacatttamaaatctaagcaaaaccaaatgacagaatttcgtacaggatcaatgagaagcctacactattgtggtaaggtaaagggtagagcaaggaagagggaataaagtagatgagttttatatatgttgctcacatattcctacatgtactttctatcctaggaaagttaattagcttctaactttatccccttgagagaagagtaatatagaacagaacacagagaatcatctcagagagataaaaagaaatttgggaccaatttactatcatacaatttccccctaaaccctctacagtgataaaagcaactctcttccctattgtgtgttctctcctaatctcattttaaaaatcaaagtttcattagtatgttccaaaggcctctctcaccttgaattttccttatttttaacactaattaaaaaagaggagggaagggtgttgaagtactgttcacagaatagcagcaccaaattaaacttggcttttcaagggaaatgccaaatggcagtaaattaagaattaaatttcgttttacagaccctaaaactgcattaaagtgagccttgtaatcattaaacaagattataaatatttattctctagaaatactgaaagattaggaactagataacctctggagatttacacagtgttatgtatctactgaccaatatagaaaagaaaataatggggcaaagtgaaacctttgggtttttcactagttttgaatgcagcaacatgtgtccctccatttctg

SEQ ID NO: 722105 - DNA, 2194 bp, Homo sapiens
ttatttggttttttcagagttatattcccagcactctagattagggctggcaaattttttctctaaagcaccagagagcaattattctaggctttgtgggccatagagtctgtcataactgctcaatttcgcctttayagtaaaaaagaagccacagacaataagtaaatgaataggaatggctgtgtttcaataaaacttttatttacaataaggggtgactagaatggatttggtgagtgggtcatagttggccaattcccgctctagattaatgccaggcacataggaggtactcaaatacatgctggatgaataaatgatttcacaactattttggttagagatattatcaggaaagacatagcaaaattccatgactataagcaagtactttcttttgtcatagctctttgttcaaggatatcttgataaacttatcgtacctatcactccgctagctattaaacactgtaaaagatatttaggacacacagttctgctctcatcaatgtaggtacaagaacagaaatactaatgtctgattttcacgtatctgcacaaacatcacatctaactccaaaattacaactttattagccacaaaaccacaaaatgttaagtatcaaaaccacaaagttttagaatacaccactctcacttcatagaggtatataaaaatggatgccagaaatgattgcaagatacttcagaaactgattttctttcagttaaaacgtaacacaccttgtagggatgactaacaaatgcatcatgaaaggaagtttaactacaaatcactgcaaaacaactgttatatatacagggacaacttgatatgtagtaaaaagaaaaaagaactgactcatcttcaagttggttgtgaatataaacttcctacttagataagtgcttagcctgaagtacttcatttaagatagttatgatgcctgtcctttctaactcatagaattttgagggggtcaactgggacggtgattgtgaaaatactttaacccgtaagttgcaatataaagctcagttcagaattgggtggcttatttaagtcacatatctgcagttcatcatgagagagagaggttcaaactgtccactatttaatagtagctgcagtcataaatccaagactccttatttacccatagctcacaaagggcaggttcataaaagttctccttgccacagagacagtaatcacctgttaggagatctgtgaataggcctcacttccacctgagatgataccgttttttattaaaagtgtgatggaatggtttctaacatcctcctctcaaaagtttataaaatgatgtatcaattactctggataactggcaacaaaaatttactatgtgcttacgctcaatatttataactgtaaaggaaggataaaagcaagtatgtggtctaccaggggagacttctgtgtgcctagactacaggatagtgggaaatgatcttagaataaggccacatcacaaaatctgtgtttccatgataaggagtctgaacttaaacccacaagcaacagggaatcccaccaccttagaatgaaaaggggagctttttagaacaagtgctgttcactaaatattactgttttttatatactttaaattgctctgaaaagaattctaggtgactttaaaaatgcatgctgtatgatatcaaaagtaggcaaaaatagtcaatccaagtaaaaatggttaaaaaaaaataagttagaaatactgtcaataaataaaatgtatgcccataaaggcctatttgctaattggaagccattcaactctattctttcaaggagctaatgcaaagaagaatatgactacttaagaaaaacaaaatcagcgactcaagaaaagtacaatgaaatattaccccagataacataagaggatttcatctatagtttacaacaagtaaaacacaaaatgatatggtcaataatacctgaaaagtaaaatgtaagtttctgggatggatggatggatggatggatggattgactgactgactgatttgagacagggtctcactctgtcgcccaggctggagtgcagtggtgcgatctcggctcactgcaacctctacctcccaggatcaagcgattctcctgcctcagcttcccaagtagctgggattacaggcacacaccaccatacctaatttt

SEQ ID NO: 722106 - DNA, 2194 bp, Homo sapiens
ttatttggttttttcagagttatattcccagcactctagattagggctggcaaattttttctctaaagcaccagagagcaattattctaggctttgtgggccatagagtctgtcataactgctcaatttcgcctttacagtaaaaaagaagccacagacartaagtaaatgaataggaatggctgtgtttcaataaaacttttatttacaataaggggtgactagaatggatttggtgagtgggtcatagttggccaattcccgctctagattaatgccaggcacataggaggtactcaaatacatgctggatgaataaatgatttcacaactattttggttagagatattatcaggaaagacatagcaaaattccatgactataagcaagtactttcttttgtcatagctctttgttcaaggatatcttgataaacttatcgtacctatcactccgctagctattaaacactgtaaaagatatttaggacacacagttctgctctcatcaatgtaggtacaagaacagaaatactaatgtctgattttcacgtatctgcacaaacatcacatctaactccaaaattacaactttattagccacaaaaccacaaaatgttaagtatcaaaaccacaaagttttagaatacaccactctcacttcatagaggtatataaaaatggatgccagaaatgattgcaagatacttcagaaactgattttctttcagttaaaacgtaacacaccttgtagggatgactaacaaatgcatcatgaaaggaagtttaactacaaatcactgcaaaacaactgttatatatacagggacaacttgatatgtagtaaaaagaaaaaagaactgactcatcttcaagttggttgtgaatataaacttcctacttagataagtgcttagcctgaagtacttcatttaagatagttatgatgcctgtcctttctaactcatagaattttgagggggtcaactgggacggtgattgtgaaaatactttaacccgtaagttgcaatataaagctcagttcagaattgggtggcttatttaagtcacatatctgcagttcatcatgagagagagaggttcaaactgtccactatttaatagtagctgcagtcataaatccaagactccttatttacccatagctcacaaagggcaggttcataaaagttctccttgccacagagacagtaatcacctgttaggagatctgtgaataggcctcacttccacctgagatgataccgttttttattaaaagtgtgatggaatggtttctaacatcctcctctcaaaagtttataaaatgatgtatcaattactctggataactggcaacaaaaatttactatgtgcttacgctcaatatttataactgtaaaggaaggataaaagcaagtatgtggtctaccaggggagacttctgtgtgcctagactacaggatagtgggaaatgatcttagaataaggccacatcacaaaatctgtgtttccatgataaggagtctgaacttaaacccacaagcaacagggaatcccaccaccttagaatgaaaaggggagctttttagaacaagtgctgttcactaaatattactgttttttatatactttaaattgctctgaaaagaattctaggtgactttaaaaatgcatgctgtatgatatcaaaagtaggcaaaaatagtcaatccaagtaaaaatggttaaaaaaaaataagttagaaatactgtcaataaataaaatgtatgcccataaaggcctatttgctaattggaagccattcaactctattctttcaaggagctaatgcaaagaagaatatgactacttaagaaaaacaaaatcagcgactcaagaaaagtacaatgaaatattaccccagataacataagaggatttcatctatagtttacaacaagtaaaacacaaaatgatatggtcaataatacctgaaaagtaaaatgtaagtttctgggatggatggatggatggatggatggattgactgactgactgatttgagacagggtctcactctgtcgcccaggctggagtgcagtggtgcgatctcggctcactgcaacctctacctcccaggatcaagcgattctcctgcctcagcttcccaagtagctgggattacaggcacacaccaccatacctaatttt

SEQ ID NO: 722107 - DNA, 1139 bp, Homo sapiens
tcagaatcacggcgggaggcaaaaggcacttcttacattgaggcagcaagagaaaaatgagaaaagcaaaagcrgaaaccgctgataaacccatcagatctcatgagacttattcactaccatgagaataggatggaaaagaccggcccccataattcaattacctccccctgggtcccacccacaacatgtgggaattctgggaaatacaattcaagttgatatttgggtggagacaaagccaaaacatatcagccatcatcgcaggttcaatgaaaagctagtttaggaaaatgctcaaattaagatttctgaaatatcccctttcctaccacatgtccagtgcattctctcaccggagagtaggacttaggtggcaggggctgaaccagcatcacctctactagtcttcttatatgcaggcaacaagactgaagaagggaaagtgaattgagattgcaggcaagagataaggttgtttgtcaagaaaaaccccgatattgatcatatctatggagccacaagtggaagccaaaagtggtcttcccagtgtgttaatctctgggaggtgttcttatcttccagcatctactcccttctagttatctaattgcattgtaacaaatctttatgacagaagtggaatgcctctttctccctccctttccccacctccccttggtatgtgatggtagacagtatagtgacttcgagtgtttatttaactgtgcatgctttttctccatcgtctaaacatccgccaggaaccttgacattagtttcacctctcctctggggctgagagatgggaaagaagcgtcaagaacttgaacagaaatccagctctcagtacattgcagtaagtaatcactttctttttttcctttcagagtaaaaaaacctgtttcaaactctcttcagggcaaccaatgaattaaatatcctactcattgcagacatgcttcatatttcaccatgatgggcagtcttaaagtctctacttaactattgatagccattgagatcccagtaattcctgagacactcatggcagaatggttctaattattagacagctttttcctagactgagctgaaatctgtcaccatggaatatatctttcccttccccactaggc

SEQ ID NO: 722108 - DNA, 1139 bp, Homo sapiens
tcagaatcacggcgggaggcaaaaggcacttcttacattgaggcagcaagagaaaaatgagaaaagcaaaagcagaaaccgctgataaacccatcagatctcatgagacttattcactaccatgagaataggatggaaaagaccggcccccataattcaattacctccccctgggtcccacccacaacatgtgggaattctgggaaatacaattcaagttgatatttgggtggagacaaagccaaaacatatcagccatcatcgcaggttcaatgaaaagctagtttaggaaaatgctcaaattaagatttctgaaatatcccctttcctaccacatgtccagtgcattctctcaccggagagtaggacttaggtggcaggggctgaaccagcatcacctctactagtcttcttatatgcaggcaacaagactgaagaagggaaagtgaattgagattgcaggcaagagataaggttgtttgtcaagaaaaaccccgatattgatcatatctatggagccacaagtggaagccaaaagtggtcttcccagtgtgttaatctctgggaggtgttcttatcttccagcatctactcccttctagttatctaattgcattgtaacaaatctttatgacagaagtggaatgcctctttctccctccctttccccacctccccttggtatgtgatggtagacagtatagtgacttcgagtgtttatttaactgtgcatgctttttctccatcgtctaaacatccgccaggaaccttgacattagtttcacctctcctctggggctgagagatgggaaagaagcgtcaakaacttgaacagaaatccagctctcagtacattgcagtaagtaatcactttctttttttcctttcagagtaaaaaaacctgtttcaaactctcttcagggcaaccaatgaattaaatatcctactcattgcagacatgcttcatatttcaccatgatgggcagtcttaaagtctctacttaactattgatagccattgagatcccagtaattcctgagacactcatggcagaatggttctaattattagacagctttttcctagactgagctgaaatctgtcaccatggaatatatctttcccttccccactaggc

SEQ ID NO: 722109 - DNA, 2952 bp, Homo sapiens
cgtgcctgtaatcccaactactcgagaggctgaggcgggaggattgcttggtcccagaagttggaggagtgcaatgagctgtgatcccgccactgcactccagcttggtcaacagagcaagaccacatctctaaaaacaaagacacagatatgagaaataaaatagggatgaaaggaatgagttaagacaatgttagagaaggatgacgtagtaagaaacctgaagataacgaaaacccacattaacctaatgttgcagaaaagagggcttcatcattgttgtctgagaaacttgtgagtaaaagacaaaaataatacatattgtgakaaatacattcaatacaatataaggaaaatattctttagcttcttgagactccatgaagttcaagagttaggaaattctgaaaagggtttggcagggtcatagtgattccgtctggaaagggtttgtttgtgcttggtctcagggctgctaggaagatgggaaatgtctctggcactccaggagagcaattactctgtgccatgacttcatgtgccccctcaccatgatgcagtgccccatgggagatgttctgtcactgatcccactgtctcactacattccaacagtccaaaagacaggcaaaaatttagactgataactttttttattagtctgatttaaaaattagttacacaagtaaaataatgtctgtatcacactcataatcacgtgtgcacatgaaaatgttagctcagaggaggttgaatgcttctccagtgcagacttcctggaaagctggaaagctgggcaatggctcaggggcccctgggcacagcactgtcttctcctgaatgagaatcagctgtgctgatgcctacgttagttcaagaaccaggagctgcataaacaagcttttgagaagtatgccagaagaagctcagattgatgatggtgtgtttgacaaaattaatgaagccatgcttattagactgaaagataagattccaaatgtgagaatacaggcagttctggcgctttcacgacttcaggatccaaaggatgatgaatgcccagtggttaatgcatatgctactttgatcgaaaatgattgatttgaatccagaacttagacaggcagtgttatcatgtattgcaccatcagcaaagactttgccaaaaattgtagggtgcaccaaggatgtgaaagaggctgtcagaaagctggcttatccggtgttagctgaaaaggttcgtatgagagctatgtccattgctcagacagtaatgctccctcaacaaggttttaatgagagatgagatgctgtgaaacaagctatgtggaagcatcttctccaaagctggttatggttctctgagggaaatatcttcgagtggcttcagcagttggatgtagaaaattctgaagtggcagtctctgtcctcaatgccatgttttcaatgactcctctcagtgaactggtggcaatctgtaaaaacaatgatggcaggtacataaaggattcattctttgaaatgtaatactgattaacttctacaattaatttgttttttttcctccccatagcttaagattatattaatatctttaatcttacctcccttttgttttcttttagtctgatgaatatcttctttcccttcttttttcccctcctggtgtaagaactcattactttatcttagactatctactttagctgtggttttctacccctcggtttcttactttgatttttgaattagcctaccatgagaaaatccagcaacatgcacccctagtatatgtttgcttatttggttcttttttgttctaagttccttcattcctttctgtgttaatgactctaattaaaaggatagtggttttaaagcaaatcttcttattcttatttatgttctcttcaatttgtaatgatataaagatcatgctttctcttacactctttcttttaagtgaaggaaattgattctagtggaaacgttaactcctgaaattgctttgtattggtgtgccctttgtgaatatttgaaatcaaaaggagatgaaggtgaagaatttttagagcggatttcgccagagcctgtagtatatatagactatttactgaggtaaatttttttttcttttagtttggagaatgcttgtgttgctgcaactgttaacctcccagcccccttcctcgaggtcatgcttgattgtgaatatgttaaaaatcctttttttttttttgtacatgccgggatagttatatacattgagtctttttgaatatcttgtatatcttgtgctggtctgtataatgaaagagcaaatcatgtttaggatcatttcttcaaaactattaagatatgattatgaacatttctgcatatacagttgataatgatgatgtattatttctgaaattggttggcacattttctgttaagtgccagataataagtatcttagggtcttgtgggccataccatctgtcaaaaacaaaaacaaaaaacaaaaaagaccaggagctggttggacatttgtgaatgttctcttgccctacttcgactctcacttctcttaagttctgtacctcgactacacaaatcagaggctgccagcagatggatgtgtgcacgtgtgtgtatgaatgtacttcctgtccacctggaacttacctgcaaaaatccttgccacaatttggatgtgcagagaaagtgttgtttcttattttctttatatcctttcttgccttcctcaggtactacctattaccagcaggaaaacaaagcaaacaaaccaacagaacccaggaaaatggaaatggcccacctgatttaagctttagacatacacaatactttattgtacataagtgtcaaatgaaattaaaaacgaggaaaaaaagacatacacaagactttaaatggctccgtgggcactgtccagccctcagctt

SEQ ID NO: 722110 - DNA, 533 bp, Homo sapiens
tcccaatggaaaactctgccaacagaataccttgacttcagggattttcatatgcaggaggctctagccagcaagaggcagtgtaggcagctgcaaatgaagttctgggcacactgagaggcgtggggaggccactcataggagacaggccttcaacaataaacaggatgtcaacaagcacactaaggcactcggtaagatattttacatgcagaattgtgtgaaaagacatacgtgggtatttcttcaaggaaataagaatggagcacagaagtggcaagagtaaatgcataggctgttttctacatgtatcaaagtattcaatatatttaattatcacaataagycaatcaagtggtactgttatgcccattttacagatgaagactaagccaaagagaaattatatgcaatggccaatgtcatagaattaattagatagaaaacaatactcaaattgtcacttgtcttattgtaaaaacatatctactttttatctattaatttattccaaaactatataatcagttcct

SEQ ID NO: 722111 - DNA, 603 bp, Homo sapiens
gaaatttctgagcaatgtttacaataaaaagatggtattttagcattcactggattgataaatgtagtaggtcttaatcttcataagaattttttagcttctagttctgtcttgagctgatatgatcataatagctgtcatttgtataatgtttaagagtttatcagcacttyctattctattacttatttcaagcctaataatcatttgttaaattaaatagcccttattttgtaaatgggaacactgtgactacaaaagactaggcaaattgcctaagtcaagcatggatctcaaatttaatcaatcgcttccttggcacccttagaagacagctttttctgtggtggcatagttttgtacatgcgcacatttgaacccaattacaaactttaaaatgtcactgggtttggaccccgtttttccaagataaatgtcattttcactgggaaattatcaagtcacttacaagcagctttcttaaagagaagctacctgctattaactcttcatgtttctgtcttctttaggtgaaggcaataattcaagtaggggaatgaaggagatcagttctgcctttgcagtggatatctgatgttgaat

SEQ ID NO: 722112 - DNA, 603 bp, Homo sapiens
gaaatttctgagcaatgtttacaataaaaagatggtattttagcattcactggattgataaatgtagtaggtcttaatcttcataagaattttttagcttctagttctgtcttgagctgatatgatcataatagctgtcatttgtataatgtttaagagtttatcagcacttcctaytctattacttatttcaagcctaataatcatttgttaaattaaatagcccttattttgtaaatgggaacactgtgactacaaaagactaggcaaattgcctaagtcaagcatggatctcaaatttaatcaatcgcttccttggcacccttagaagacagctttttctgtggtggcatagttttgtacatgcgcacatttgaacccaattacaaactttaaaatgtcactgggtttggaccccgtttttccaagataaatgtcattttcactgggaaattatcaagtcacttacaagcagctttcttaaagagaagctacctgctattaactcttcatgtttctgtcttctttaggtgaaggcaataattcaagtaggggaatgaaggagatcagttctgcctttgcagtggatatctgatgttgaat

SEQ ID NO: 722113 - DNA, 892 bp, Homo sapiens
ccgggaaaaaattgtcttcagggaacagtccctgtgccaaaaagtttgggactgctgttttatgtatggatataccacattttgtttattgattcatgacttgatggacactgaagtcatttccaccttttggctattatgaataatgctgctatgaacatttgtgtacaggtttttgtgtaaagatatgttttcagattctttggggtgtatacctaggagtagaattgctgggtcatatggtaactgtttaacgttttgaggaactgccaaactgttttccaaagtggctgtaccacttttcatgcctgtcaacaatgagtgagagttctaatttctccactttttttttttkttttttttggagatagaatttcgctcttgttgcccaggctggagggcagtggtgccatctcagctcactgcaacctctgcctcccaggttcaagagattctcctgcctcagcctcccaaaatgctgggattacaggcgtgagccacagggcccggtcttataccactgtcttcaaatgagaacttgtgtgatgctttataaaccattttcatggctgtcttatttgatcctcacatttctgtaaagaagttaagcccttattagtcttattttgcaaatgaaaaaactaaggtttagaagttaaacaactaaccctgtctaacagctagtgtgtaagtgctacagctttggactccaaatctatgtttctttacatagatcagctactgttggctgcctttgtggacctatctcacgtttctgggtgatgttagtagatttacattcttcctcgctgtactatgcctgttatcaattgtctatggcttatctgttttcttttgaccctgtggagtcctaaacctcaagatttcaggg

SEQ ID NO: 722114 - DNA, 641 bp, Homo sapiens
ttcaaatcactgaagataaccttagcatgatgtatttttctttaactttttataaaggaaatttaacaagtataaacctattaacaacaacagcaacaaagcctacaattctcctcacatgaaaaagtacctgtttataagcaaagatgaataataatgagataaataattagaaattattcttttgtgtttcccaaacttgtatctggggtgcttcttaaaagcacagatttctggctaggtgtgatggtatgcactygcagtcccagctactcaggatgctgaagcaggttgcttgagcccaggaattcaagtccagcctgggcaacacagcaagactctggctctaaaaaatatatatttatacatagaaagaaaaaaaatcacaaatttctgttcataagcaaaataaactcacgactttagtatcatctctaaatcagactttattaattcatcctgtccttttttttttcttagcgtcttgttctgtcgcccaggctggagtgcagtggtatgctctcggctcactgcaacctccacctcctgggttcaagcagttctcatgcctcagcctcccgagcagctgggactacaggtgccggccaccacacccagctaatttttttgtatttttagta

SEQ ID NO: 722115 - DNA, 641 bp, Homo sapiens
ttcaaatcactgaagataaccttagcatgatgtatttttctttaactttttataaaggaaatttaacaagtataaacctattaacaacaacagcaacaaagcctacaattctcctcacatgaaaaagtacctgtttataagcaaagatgaataataatgagataaataattagaaattattcttttgtgtttcccaaacttgtatctggggtgcttcttaaaagcacagatttctggctaggtgtgatggtatgcactcgcagtcccagctactcaggatgctgaagcaggttgcttgagcccaggaattcaagtccagcctgggcaacacagcaagactctggctctaaaaaatatatatttatacatagaaagaaaaaaaatcacaaatttctgttcataagcaaaataaactcacractttagtatcatctctaaatcagactttattaattcatcctgtccttttttttttcttagcgtcttgttctgtcgcccaggctggagtgcagtggtatgctctcggctcactgcaacctccacctcctgggttcaagcagttctcatgcctcagcctcccgagcagctgggactacaggtgccggccaccacacccagctaatttttttgtatttttagta

SEQ ID NO: 722116 - DNA, 866 bp, Homo sapiens
caacaaaaacaaagaatggaattactaaagctgtagtagggaatgaagttctgatgcatgctacaacatacatgaaccttgaaaatatgctggctgggcgyggcggcacacgcctgtaatcccaggactttgggagggcgaggcgggtagatcacgaggtcaggagatcgagaccatcctggctaacacggtgaaaccccgtctctactaacaaaaaaaaaaaaagaaagaaggaaaagaaaataatatgctaagtgaaataagcaagacacaaggatacatattgttatgattccatttatatgaggcatctagaatgaacaaatccatagatagaatgtgattagtgattattaggggctggggagaggaagatggcaaattattgcctaatgggtacaaagtttgtttgggatgatcagaagttctagaaatggatagtggtaatggttgtataacattatgaatatacttaatgctactaaatgtacccttaaaaacagtttaaatggtatattttacgttatatcaaaattaaaaattaaataatgaagaaactttatattactgatttaaggcaatctccaaaataaactgctaaatgcaaaaggtatgatatagaacaagaggggaaaggaaactacaggtaaacacaaatttgtaaattctcagaacatctcagaaggttataaagtgattgtccctgtgggagacaaaccaggtgcctagaggactgagaagaagtgagttatttttcactggatactcttctatatgttttgaattttgacacatgtatattacctagtccaaaattttttttaattaaaaaaatgtgttgactggggatccaagaaagggcaggg

SEQ ID NO: 722117 - DNA, 1349 bp, Homo sapiens
gactgaaaccctattagatttttacaatttatataaggtttaaaatatttatattaataacatacctataaaagtaaccaaaagaagatttaagctgggcacagtggctcatgcctataatcccaacactttgggaggccaagttggacagatcatcagaggtcaggagttcgacacctgcctggccaacatggagaaatcttgtctctactaaaaatacaaaattagccgggcatggtggcacgtgtctgtagtcccagctacttgggaggttgaggcagaagaattgcttgaaccttggggcagaatttgcagtgaacctagatcatgccacagcactccagactgggtgacaaagcaagattctgtctcagagaaaaaaaaagaagatttagtgttatttatcttttggcaatgcttcccatacaatgttaccaactaagttttagcaaagatgtcaaaaaattgaaaacatttgacctaaacggaatggcagtttattgttttttattttattacttttttgagacagggtctcaccctgttgcccaggctgkagtgcagtggtgaaatcatggctcactgcagcctcaacctcccaggctcaggtgattctccaccttagtctcccaagtagccaggactatgagcacgtgctaccacacctagctagcttttgtatttttagtagagatggggttttgccattttgcccaggctggacttgaactcctgggctcaagtgatccacccaccgtggcctcccaaagggctggaattacagacaagagccgctgcacacagccacatgtcatttttaaataacattcatttaattagcatgacaaccaaaagacatcaaaagcaacatagaaggttacatggaagtgaaaactgaaaaccctcagttttcccaagtaattaaaaaaaaataaaggcaacacatggattatcttggtaaaacctaaaatatttattacaggccagtcatttaaagggtaaaagctcctgtggcataattgtgtcttcttatgggaagctaatttaaatcacttggaagtcaaaccgatgacaaggagacttgaatttaattagacatagaaagagtgtgaccagggtcatgagtgagcataatattacagaggaatgtaaacaggaaaaccagagcatagagcagtggggatccatagctcacaatgatagcatggaagtttcctggttacatgaagtaattaagacatatttaaaagccaagagtacaaaattagacctgaagaaaaagctgaaggagttatcatcccagccaagcaggaaacccaagccttttattccttctcaagaagaaacag

SEQ ID NO: 722118 - DNA, 1349 bp, Homo sapiens
gactgaaaccctattagatttttacaatttatataaggtttaaaatatttatattaataacatacctataaaagtaaccaaaagaagatttaagctgggcacagtggctcatgcctataatcccaacactttgggaggccaagttggacagatcatcagaggtcaggagttcgacacctgcctggccaacatggagaaatcttgtctctactaaaaatacaaaattagccgggcatggtggcacgtgtctgtagtcccagctacttgggaggttgaggcagaagaattgcttgaaccttggggcagaatttgcagtgaacctagatcatgccacagcactccagactgggtgacaaagcaagattctgtctcagagaaaaaaaaagaagatttagtgttatttatcttttggcaatgcttcccatacaatgttaccaactaagttttagcaaagatgtcaaaaaattgaaaacatttgacctaaacggaatggcagtttattgttttttattttattacttttttgagacagggtctcaccctgttgcccaggctggagtgcagtggtgaaatcatggctcactgcagcctcaacctcccaggctcaggtgattctccaccttagtctcccaagtagccaggactatgagcacktgctaccacacctagctagcttttgtatttttagtagagatggggttttgccattttgcccaggctggacttgaactcctgggctcaagtgatccacccaccgtggcctcccaaagggctggaattacagacaagagccgctgcacacagccacatgtcatttttaaataacattcatttaattagcatgacaaccaaaagacatcaaaagcaacatagaaggttacatggaagtgaaaactgaaaaccctcagttttcccaagtaattaaaaaaaaataaaggcaacacatggattatcttggtaaaacctaaaatatttattacaggccagtcatttaaagggtaaaagctcctgtggcataattgtgtcttcttatgggaagctaatttaaatcacttggaagtcaaaccgatgacaaggagacttgaatttaattagacatagaaagagtgtgaccagggtcatgagtgagcataatattacagaggaatgtaaacaggaaaaccagagcatagagcagtggggatccatagctcacaatgatagcatggaagtttcctggttacatgaagtaattaagacatatttaaaagccaagagtacaaaattagacctgaagaaaaagctgaaggagttatcatcccagccaagcaggaaacccaagccttttattccttctcaagaagaaacag

SEQ ID NO: 722119 - DNA, 1349 bp, Homo sapiens
gactgaaaccctattagatttttacaatttatataaggtttaaaatatttatattaataacatacctataaaagtaaccaaaagaagatttaagctgggcacagtggctcatgcctataatcccaacactttgggaggccaagttggacagatcatcagaggtcaggagttcgacacctgcctggccaacatggagaaatcttgtctctactaaaaatacaaaattagccgggcatggtggcacgtgtctgtagtcccagctacttgggaggttgaggcagaagaattgcttgaaccttggggcagaatttgcagtgaacctagatcatgccacagcactccagactgggtgacaaagcaagattctgtctcagagaaaaaaaaagaagatttagtgttatttatcttttggcaatgcttcccatacaatgttaccaactaagttttagcaaagatgtcaaaaaattgaaaacatttgacctaaacggaatggcagtttattgttttttattttattacttttttgagacagggtctcaccctgttgcccaggctggagtgcagtggtgaaatcatggctcactgcagcctcaacctcccaggctcaggtgattctccaccttagtctcccaagtagccaggactatgagcacgtgctaccacacctagctagcttttgtatttttagtagagatggggttttgccattttgcccaggctggacttgaactcctgggctcaagtgatccacccaccktggcctcccaaagggctggaattacagacaagagccgctgcacacagccacatgtcatttttaaataacattcatttaattagcatgacaaccaaaagacatcaaaagcaacatagaaggttacatggaagtgaaaactgaaaaccctcagttttcccaagtaattaaaaaaaaataaaggcaacacatggattatcttggtaaaacctaaaatatttattacaggccagtcatttaaagggtaaaagctcctgtggcataattgtgtcttcttatgggaagctaatttaaatcacttggaagtcaaaccgatgacaaggagacttgaatttaattagacatagaaagagtgtgaccagggtcatgagtgagcataatattacagaggaatgtaaacaggaaaaccagagcatagagcagtggggatccatagctcacaatgatagcatggaagtttcctggttacatgaagtaattaagacatatttaaaagccaagagtacaaaattagacctgaagaaaaagctgaaggagttatcatcccagccaagcaggaaacccaagccttttattccttctcaagaagaaacag

SEQ ID NO: 722120 - DNA, 1349 bp, Homo sapiens
gactgaaaccctattagatttttacaatttatataaggtttaaaatatttatattaataacatacctataaaagtaaccaaaagaagatttaagctgggcacagtggctcatgcctataatcccaacactttgggaggccaagttggacagatcatcagaggtcaggagttcgacacctgcctggccaacatggagaaatcttgtctctactaaaaatacaaaattagccgggcatggtggcacgtgtctgtagtcccagctacttgggaggttgaggcagaagaattgcttgaaccttggggcagaatttgcagtgaacctagatcatgccacagcactccagactgggtgacaaagcaagattctgtctcagagaaaaaaaaagaagatttagtgttatttatcttttggcaatgcttcccatacaatgttaccaactaagttttagcaaagatgtcaaaaaattgaaaacatttgacctaaacggaatggcagtttattgttttttattttattacttttttgagacagggtctcaccctgttgcccaggctggagtgcagtggtgaaatcatggctcactgcagcctcaacctcccaggctcaggtgattctccaccttagtctcccaagtagccaggactatgagcacgtgctaccacacctagctagcttttgtatttttagtagagatggggttttgccattttgcccaggctggacttgaactcctgggctcaagtgatccacccaccgtggcctcccaaagggctggaattacagacaagagccgctgcacacagccacatgtcatttttaaataacattcatttaattagcatgacaaccaaaagacatcaaaagcaacatagaaggttacatggaagtgaaaactgaaaaccctcagttttcccaagtaattaaaaaaaaataaaggcaacacatggattatcttgrtaaaacctaaaatatttattacaggccagtcatttaaagggtaaaagctcctgtggcataattgtgtcttcttatgggaagctaatttaaatcacttggaagtcaaaccgatgacaaggagacttgaatttaattagacatagaaagagtgtgaccagggtcatgagtgagcataatattacagaggaatgtaaacaggaaaaccagagcatagagcagtggggatccatagctcacaatgatagcatggaagtttcctggttacatgaagtaattaagacatatttaaaagccaagagtacaaaattagacctgaagaaaaagctgaaggagttatcatcccagccaagcaggaaacccaagccttttattccttctcaagaagaaacag

SEQ ID NO: 722121 - DNA, 1349 bp, Homo sapiens
gactgaaaccctattagatttttacaatttatataaggtttaaaatatttatattaataacatacctataaaagtaaccaaaagaagatttaagctgggcacagtggctcatgcctataatcccaacactttgggaggccaagttggacagatcatcagaggtcaggagttcgacacctgcctggccaacatggagaaatcttgtctctactaaaaatacaaaattagccgggcatggtggcacgtgtctgtagtcccagctacttgggaggttgaggcagaagaattgcttgaaccttggggcagaatttgcagtgaacctagatcatgccacagcactccagactgggtgacaaagcaagattctgtctcagagaaaaaaaaagaagatttagtgttatttatcttttggcaatgcttcccatacaatgttaccaactaagttttagcaaagatgtcaaaaaattgaaaacatttgacctaaacggaatggcagtttattgttttttattttattacttttttgagacagggtctcaccctgttgcccaggctggagtgcagtggtgaaatcatggctcactgcagcctcaacctcccaggctcaggtgattctccaccttagtctcccaagtagccaggactatgagcacgtgctaccacacctagctagcttttgtatttttagtagagatggggttttgccattttgcccaggctggacttgaactcctgggctcaagtgatccacccaccgtggcctcccaaagggctggaattacagacaagagccgctgcacacagccacatgtcatttttaaataacattcatttaattagcatgacaaccaaaagacatcaaaagcaacatagaaggttacatggaagtgaaaactgaaaaccctcagttttcccaagtaattaaaaaaaaataaaggcaacacatggattatcttggtaaaacctaaaatatttattacaggccagtcatttaaagggtaaaagctcctgtggcataattgtgtcttcttatgggaagctaatttaaatcacttggaagtcaaaccgatgacaaggagacttgaatttaattagacatagaaagagtgtgwccagggtcatgagtgagcataatattacagaggaatgtaaacaggaaaaccagagcatagagcagtggggatccatagctcacaatgatagcatggaagtttcctggttacatgaagtaattaagacatatttaaaagccaagagtacaaaattagacctgaagaaaaagctgaaggagttatcatcccagccaagcaggaaacccaagccttttattccttctcaagaagaaacag

SEQ ID NO: 722122 - DNA, 1001 bp, Homo sapiens
  misc_feature 494: n = A,T,C or G
ttaactatttgttcagatcgctcactcctccattccacaaccagtacatgtcaggttctttccaataataatattcttccttgaggaacattcagcagaaatagaccaatcaaaactggtaacactaggtttatttaaatatatatataagctgcagaaaagtacagaccagaaatggggctgtatcttctttttagaaaccgctctcacattcagcaagatatctgtttacaggcaatactaaaacctgattaaggcttaacaaaaactaagtccacatgaaaggaaatgtggatatatgtggatmgatgctttgttaggttgatttttttgtaagattgtgtatatatatataagctatgaattggatttagaggtacgacaatttgtcacaaacctataaatatttttctacccaacgtcacccaatttcttacttctggcagaccaggcatttgattagagtcttcactctccttggaggcgtgctgtgngaaaggacacagcacctctaatcatgcttacctcctgctatagccactagcattatccaagaacacactgaccttttgcggtgctacattccttggcaattatcctcactcttctcttagtttaatatttttactttcttttctatcctcagacccccacctccatctccatcttccactcagtgaaaataattctacttgcatctttttcccataaggatctatgtttttcttatattttcattctcctaatgtttagcaggtcaaatgcagttggtttcattaacaaataaaagccacatgtcaaaatggtttaacagtgttaaatcctgacctgagtttagctttggctctgtgaacttaccctcaatgccaaatgtcacatttgatgtagaagcaactgctgtgctgtttagatgttcctgacaccatttgaatccattacttcattgagatattttgctcaacatcttttccttctatggatgaattaattgtgcccaacac

SEQ ID NO: 722123 - DNA, 3520 bp, Homo sapiens
tcaccaactacttcttacagcaaaaccaaaaggtaataaataacagttagcaattctgaggacctattgcatcctgtgcaatttaaatccttctctcactatcctactcttcaacaggtacttggactcactatcaaaaggtaaacactacacttcgaatttaaggaaattttcacaaatcacaaaaggttctgkagataatgttttatttcaaaatactctgagatgaatataaacaagtatttgggtataccgaggggtttggttcttttgtttttctgttccttctgggtttttcctttgggggttttgtcctccctacccgtgtgcttgcatttggtaagccacacttctgtagggtaaccacattacttcaccagcagtgtttcaagaaaacatcttctgaagttatttcagggagcaaatgcatctgtttctatttggctataaaatatggttaaaaacaaaaagaaaaagcaatcagaaatagcattatatctaatgccctttccaaatcagagagtagaggtctttagttggttaagctgtcagcatccccaaatatatggtatccctgcaaaagtaagagaaattatgtctcctctgtggagcaagtgagggtttagccttccctgtgtcaagagtgcagtactctccctgcactcattaccatggttcattgcaagccagcactccacaatgtcagatggccaccgcagctcagccttctgacttcaatattctcaaaggctgggcagtcttccttttgagaacattaagcaggaagaagaaacgtgagactaatttatgcaaatgtatgcaacatcaatcagatggtctctgccagatagcacaaatcactgggtgatttagtgctttcctactatgcacaaaaagacttccagacaccagctctttagtatggtggcagtgtacctcggccaccagctaggctttgccatggtaatttgtttctttatctttaaaaataaacagcacaattcaatctaacatctcagttaaataagtaaaacccaaaaggcaagcttcagtgtctcgaataaattacccaagcctactgaaagttagaatcaggccgaatttaatctaagagaaagtagaataagaaaaaattttttaaatgaagagtttcaaggagagtgagagctcaattgacactgataaatatcacagagagatgggaaaggagggactctgaaaagttgattgattgattgattgaattatggattgatttttgcatgtgaactttaaaagctcaattccagtcggatagcggtgacgaacaccaaataatagtgactctaggaatgaacaggaattaaataattaaagatataagtatgtttacaggaaattcaagtgggagtgataagaaatgcagtggtagtttaaggggatcaaggggtcatggaaaggaatttttggtgagcacggtaatgaatcacaggggcatgactaatccagagcagccagtggaccgacattgaaggcgccagggagaaaggggacaaaacaggcatccgaagatgggattaagaatgcatttaagatacagcaggtttaaaacttgcaactcaggtgtttatacatgcaacttgatcttcttgtctatgacagtacctaatttctctcctaaatccccatttcaactcagtatctctgttgcttttggttctaagaagggtcagtttggatttaaacactggcaattgaatattaaagattgtcctcctccctctcctccttctctcatccccagaagggagctgtttccctggggtttgtttgctgtcctggctcttggttctcacggcaaggcatctggatcttgggcatcatgctatggtatatccaccgatgtccatggtcctattacagtttctagttcctcattctatgtgctctgcattctcctcaacagaaccccactgggacttccatgctcaaccctatcctgaatgacagggcaccctcatctttctatgtcgtcctgagggactgctctcaggtccacctgcctacttgccacatgtccagtcattgcccacatacatatggaacttctcggtgaggcttttagagtccccagttaaatcccggtaagccaagcaatggtctcttctgtctggaatcccacaaacttttctggggtttctgatggtccctcataagctagcaggttataggaaaccctttctcatgcaatctctacctaccaaactctagccattttccttctgccctccctggtgagccagtggcaggagcttccatggccattcccagtgggggagatgctgctctctggatttgggggatggtttactcatagacttaatgcctttattatttaaaaatattgaaattaactaactatgattccactaaaaaatctggaaccgacataactaaagaaactaaaaacaggctagaattaggcatcagtaaaaaatagtggtcaatatcttcactactgttttccacggacttctctcaaatcccattcattggctcacaggattcttccttttccagaaagtcaggtctctgttggcatcccatccatgtcagcaaaattatcaagagttataaagggtctgagattttactctacttgcaaattaacaggttaagctaccagtttcatggatgttgacagaagacatgagactcttgggtcagaggcaaagaactttattacagcaatagcagtagctagagcatttgctttatcttgtactgattctctgagtctcagatctcacagagtgagtagaagacaaccaggtgtctccttcacatgcagtgggttgagttacaagagaggaaccctgagcttagggtatctgaatcttttataatgcctgccatttgttatgttgggaggcactatctctgtcttccaagactgtttgctatacaaacatccttgaaaagatagtccagaaccaatgtggccattgcctctgcttgtgagatatacagaaatataagaaacccacagagacttgcctccaaacagagtcagtcccttctctaatcttcagtaatctatagaattttttaaattacattattttgtcattttttttgagaaactgagagagaaaaagagccaagagtgtgtgtttagaatgtcatctttgtccctgaaatcctgaaatttgcctgtatagaacaaattaatttattttcaaaaattacttttccttgtgcctgtgatagagtttaacatgtaacataggttttaccatttattttaatctgtgtacctatagttgctttttacctctgtggccctagtgaatatcacccatcatgttattactgttgactgggggataggttgaaaaaagctgctgaatttaagaatgtcttatggaaatctagtaaccttgtcttgaccatgctacagggaactaatgtgtcagaggttcacatttcaaccggaactcaataggaggagaaaaatatctctaatacagcagaagagaga

SEQ ID NO: 722124 - DNA, 532 bp, Homo sapiens
cctaaaaatttaacatttaatagactgtgaaacctcttacttgaaatccaacattttcccaatatatgaactccctaccatagccttcaaggcagtgcataatcttgcccctatacaccttttctatctcatctcatgattcttcctggcttgyttcaccgacattacaggtccttttactgttcttcctggtatacatcatcccattgtgattctgtatgacaacttggccaggctatagttttcacacatttactcaaacaacatttcaggtgttgttgtgaaggtattttgtagatgtgattaacatctacaatcagttgggtttaagtaaggggtattagccttgataatctgtgtgggcctcattcaatcagatgaaacactttaagggcagagctgaggtttctgtaagaagaggaaattctacttgtaaactgcagtcagctcccaccaaagagtttcctgatggtctttcttacagattccagactcacctacccagccctaatgcaagccaattccttggaat

SEQ ID NO: 722125 - DNA, 1099 bp, Homo sapiens
tctcttagaatatctcagtttggtatcatcaggtgaaatgtatcgtcttgggtaaaattattttgcagatgctcagtgtataaactggaagtataagaggaaaaaaacaaggctcagaggaatttttggtagcatttgcctaatcatgcaagctgaaattggtttacctttaatgcatgaattctctcatgttgagggaaattaagagaattcttgcactttaagagggctgggctgttaaatcctcaaaaccacttttcacttgtagaaaactcagtacaattttctatgtgagtctcaaaacttaaaaaatccccacagcatagtcagaaacgtgcatttattacattttgtgaaaaggctgtattaaacattgggttacattgcatatattatwtttgtgtatatatatatatagagacagggtcttgccgtgtcacccaggctggagtgcacagtcatagctcactgtaaccttgaaatcctggcacagtcatagctcactataatcttgaactcctggacttaagcaatcctcccatttctgcctcccaggtagctgggagactacaggtgagtgccactacatcctaacaatttttgtaacttttgtagacagggatcccgctatgttgcccaggctggtctcgaactccaggcctcaaatgatcctcctgcctcagcctcccattttttattttaaaaataaagtctcagatagactgacaacattgcatagttgctgaaagcatagactttggagccagactgtctgggtttctatccttgctcagctactaactagttttgagactttgagggggttatatctcagctttctcaaacacaaaacgggaagatttacctatgtcatgggattattctgaggattaagttgtttttaatttcttcaagtatcacttggcacacagtaatattcaggttttaaaaatacaaatatgccttgaattatcattgcatgctttcttattaaatatattaggataatcaaaatattttttctgaaaaaattctctaaatatagcattcctgtggcatgtaacattttctgttatttttttcccggatacacgcatat

SEQ ID NO: 722126 - DNA, 1099 bp, Homo sapiens
tctcttagaatatctcagtttggtatcatcaggtgaaatgtatcgtcttgggtaaaattattttgcagatgctcagtgtataaactggaagtataagaggaaaaaaacaaggctcagaggaatttttggtagcatttgcctaatcatgcaagctgaaattggtttacctttaatgcatgaattctctcatgttgagggaaattaagagaattcttgcactttaagagggctgggctgttaaatcctcaaaaccacttttcacttgtagaaaactcagtacaattttctatgtgagtctcaaaacttaaaaaatccccacagcatagtcagaaacgtgcatttattacattttgtgaaaaggctgtattaaacattgggttacattgcatatattatatttgtktatatatatatatagagacagggtcttgccgtgtcacccaggctggagtgcacagtcatagctcactgtaaccttgaaatcctggcacagtcatagctcactataatcttgaactcctggacttaagcaatcctcccatttctgcctcccaggtagctgggagactacaggtgagtgccactacatcctaacaatttttgtaacttttgtagacagggatcccgctatgttgcccaggctggtctcgaactccaggcctcaaatgatcctcctgcctcagcctcccattttttattttaaaaataaagtctcagatagactgacaacattgcatagttgctgaaagcatagactttggagccagactgtctgggtttctatccttgctcagctactaactagttttgagactttgagggggttatatctcagctttctcaaacacaaaacgggaagatttacctatgtcatgggattattctgaggattaagttgtttttaatttcttcaagtatcacttggcacacagtaatattcaggttttaaaaatacaaatatgccttgaattatcattgcatgctttcttattaaatatattaggataatcaaaatattttttctgaaaaaattctctaaatatagcattcctgtggcatgtaacattttctgttatttttttcccggatacacgcatat

SEQ ID NO: 722127 - DNA, 1099 bp, Homo sapiens
tctcttagaatatctcagtttggtatcatcaggtgaaatgtatcgtcttgggtaaaattattttgcagatgctcagtgtataaactggaagtataagaggaaaaaaacaaggctcagaggaatttttggtagcatttgcctaatcatgcaagctgaaattggtttacctttaatgcatgaattctctcatgttgagggaaattaagagaattcttgcactttaagagggctgggctgttaaatcctcaaaaccacttttcacttgtagaaaactcagtacaattttctatgtgagtctcaaaacttaaaaaatccccacagcatagtcagaaacgtgcatttattacattttgtgaaaaggctgtattaaacattgggttacattgcatatattatatttgtgtatwtatatatatagagacagggtcttgccgtgtcacccaggctggagtgcacagtcatagctcactgtaaccttgaaatcctggcacagtcatagctcactataatcttgaactcctggacttaagcaatcctcccatttctgcctcccaggtagctgggagactacaggtgagtgccactacatcctaacaatttttgtaacttttgtagacagggatcccgctatgttgcccaggctggtctcgaactccaggcctcaaatgatcctcctgcctcagcctcccattttttattttaaaaataaagtctcagatagactgacaacattgcatagttgctgaaagcatagactttggagccagactgtctgggtttctatccttgctcagctactaactagttttgagactttgagggggttatatctcagctttctcaaacacaaaacgggaagatttacctatgtcatgggattattctgaggattaagttgtttttaatttcttcaagtatcacttggcacacagtaatattcaggttttaaaaatacaaatatgccttgaattatcattgcatgctttcttattaaatatattaggataatcaaaatattttttctgaaaaaattctctaaatatagcattcctgtggcatgtaacattttctgttatttttttcccggatacacgcatat

SEQ ID NO: 722128 - DNA, 1099 bp, Homo sapiens
tctcttagaatatctcagtttggtatcatcaggtgaaatgtatcgtcttgggtaaaattattttgcagatgctcagtgtataaactggaagtataagaggaaaaaaacaaggctcagaggaatttttggtagcatttgcctaatcatgcaagctgaaattggtttacctttaatgcatgaattctctcatgttgagggaaattaagagaattcttgcactttaagagggctgggctgttaaatcctcaaaaccacttttcacttgtagaaaactcagtacaattttctatgtgagtctcaaaacttaaaaaatccccacagcatagtcagaaacgtgcatttattacattttgtgaaaaggctgtattaaacattgggttacattgcatatattatatttgtgtatatatwtatatagagacagggtcttgccgtgtcacccaggctggagtgcacagtcatagctcactgtaaccttgaaatcctggcacagtcatagctcactataatcttgaactcctggacttaagcaatcctcccatttctgcctcccaggtagctgggagactacaggtgagtgccactacatcctaacaatttttgtaacttttgtagacagggatcccgctatgttgcccaggctggtctcgaactccaggcctcaaatgatcctcctgcctcagcctcccattttttattttaaaaataaagtctcagatagactgacaacattgcatagttgctgaaagcatagactttggagccagactgtctgggtttctatccttgctcagctactaactagttttgagactttgagggggttatatctcagctttctcaaacacaaaacgggaagatttacctatgtcatgggattattctgaggattaagttgtttttaatttcttcaagtatcacttggcacacagtaatattcaggttttaaaaatacaaatatgccttgaattatcattgcatgctttcttattaaatatattaggataatcaaaatattttttctgaaaaaattctctaaatatagcattcctgtggcatgtaacattttctgttatttttttcccggatacacgcatat

SEQ ID NO: 722129 - DNA, 589 bp, Homo sapiens
gcagaaggccatgattcacggtttgtgtgacatgtttgacagcactgtagattaactagtgtcaggagagcagaggctcctccataacttactgaagggtaaactgttctgtgtaggaagtatggagatctacacatctgggcattttcgagacattaaagcaagagcgaggtgacaatatgcartaccgtgttatccatcactaagtcatatgaattttcaagtgaggctttaacgagaactcaaatgctttaaagagcttaataagtgatatgtttaaaagcctaagagagaagtatattttgttgttacaacgttaaattagaattatagttgaaatacaatggaaatttgccagaaaaggaaacttttagttgagatgtgaagccagtaggggaggtttagggtgttaactttattggaaaataattattttgcaatttgtttaatggtcatttttgttgttgttgtcgtgattgagaaaacaaaatgttcattttatagtactctttattaatagactcatttgacttgtagaattgataatcaacaataagaattttgcctgtagacatgaaaccaatccaga

SEQ ID NO: 722130 - DNA, 589 bp, Homo sapiens
gcagaaggccatgattcacggtttgtgtgacatgtttgacagcactgtagattaactagtgtcaggagagcagaggctcctccataacttactgaagggtaaactgttctgtgtaggaagtatggagatctacacatctgggcattttcgagacattaaagcaagagcgaggtgacaatatgcaataccgtgttatccatcactaagtcatatgaattttcaagtgaggctttaacgagaactcaaatgctttaaagagcttaataagtgatatgtttaaaagcctaagagagaagtatattttgttgttacaacgttaaattagaattatagttgaaatacaatggaaatttgccagaaaaggaaacttttagttgagatgtgaagccagtaggggaggtttagggtgttaactttattggaaaataattattttgcaatttgtttaatggtcatttttgttgttgttgtcgtgattgrgaaaacaaaatgttcattttatagtactctttattaatagactcatttgacttgtagaattgataatcaacaataagaattttgcctgtagacatgaaaccaatccaga

SEQ ID NO: 722131 - DNA, 688 bp, Homo sapiens
caacttataagacctccagggaggctcagtttcctctctgayaacacagagatattctctgtggccctagcttcctcactatgtgaggaacaagagcagttacatcagcatttctcaaacttgaactcgtggacaaacggccagggcccttgttaaatggagcttctgatccagtagtgttggcattaagcctgaggttctgcatttctaacaagctcgaagctaactcaatactgatggtccatgacctgtgctttaagcagcaaggagctcctagcatcttcaagtgctttgctttatggacacacaacaggttatcacatccctatcagcctcacataagacgaactcattgattaagccaaaaattaaacaccttccagatgctgggcccacaaaccaagtgggtacaaaataaagtcagacctttacccatcaagggaacaaagggccacaaaccttccttccagcacttcacagaaacagagactgactcttaaatcctgcggccttaaaggtgagatcctgccaagatccaaggagctacgtgacaactagccaccagccaatgacagtaaccaccatttgtcaaacactcccacagaatgctgggagcttcatatacattccactcccccgggcctcactttcctcatgtataaaatgggtcaaaaatgcattatgtaaa

SEQ ID NO: 722132 - DNA, 1055 bp, Homo sapiens
tctaatgactatatgccttggtgatgttcattttgtatagtattttaccagtattctctggatttcttgcatctggatgtctatttctttactaagatttgggaaattttcttgaattatttcctcaaatatattttcctggttgtttcctttttcttcttctctcttagaaatgtcagtaattctttgttttggtcattttatataattctgtatttctcaaagactgttcattttttataattctttttcctttatttttgtctgcctggactagttcaaaagaccggtcttcaagctctggaattcttccatctgcttggtcagtctatttctttttttttttttttttttttttttttgagatggattcttgctctgtcatccaggctggagtgcagtggcacaatctcggctcactgtaagctccgcctcccaggttcacaccattctcctgcctcagcctcctgagtagctgggactacaggtgcccatcaccatgtctggctacttttttgcatttttagtaaaagaagtgatttttaaaatgtgtctgcacacagccatgtcatgtggctttacagggcagacaggaacaatgggggaaattcagagaagtcagttgataagaggtgggtagtggagggttttgtaagccacatggggagagctgctctttctctaggggctctgatagctaataataacagttaacaactacctggcatttattaagcaactggtatgtgctagagattctaaactaccattcatttgctcacagcaactctgtatgctgagtgtctgtagttatatgtgaagagataaagaaactgcagttgagtgactggcccaagatcacacagccaataagtgacagagttgtacccaagacttgtacatagatcttgctttgagagagtgacatacagaggtggatttacaatgaagctaatgaaacgtaaatttcagggttcmccacttgctagacacctgtgaatgctgggagttgtcatgtttgaggtagagaggggaagctggcgtataaccagaaa

SEQ ID NO: 722133 - DNA, 598 bp, Homo sapiens
tcttgtccttcttttatattcacccaktggccaaagtctgtttactcttcttcagcagtatcttttgcagctcgttcctccttttccttccagtttctagatgattgcacaacctactgaaaggtctccctgctctagtctttcaacagtcccagccattaatccatcctagacagcgttgctatttcattttctaacacagcagtctaatcaactcactctctgactcaatggctgccaactacttaagttgatgtcaaaacaccctgggctctgaaggcctgccacaaactgactccagcctactttttttggtttattttctcactgctcaaatgtgtctagtcagatgagatgatttaccttcatgcaaacaccacttctattttctttctgctcctgcctttctgttcggtgtgctctgtcaaatgaaatcccgcccagcctttgagacccagctcaaaagcataagagggccagtaagcctccctccttccctgttctctttacccactccctgcttataatcatgttcttctgtgcattctctgtctcactccaagaaagcacgtttctgcctttagtcagagttactgac

SEQ ID NO: 722134 - DNA, 598 bp, Homo sapiens
tcttgtccttcttttatattcacccagtggccaaagtctgtttactcttcttcagcagtatcttttgcagctcgttcctccttttccttccagtttctagatgattgcacaacctactgaaaggtctccctgctctagtctttcaacagtcccagccattaatccatcctagacagcgttgctatttcattttctaacacagcagtctaatcaactcactctctgactcaatggctgccaactacttaagttgatgtcaaaacaccctgggctctgaaggcctgccacaaactgactccagcctactttttttggtttattttctcactgctcaaatgtgtctagtcagatgagatgatttaccttcatgcaaacaccacttctattttctttctgctcctgcctttctgttcggtgtgctctgtcaaatgaaatcccgcccagcctttgagacycagctcaaaagcataagagggccagtaagcctccctccttccctgttctctttacccactccctgcttataatcatgttcttctgtgcattctctgtctcactccaagaaagcacgtttctgcctttagtcagagttactgac

SEQ ID NO: 722135 - DNA, 611 bp, Homo sapiens
ccattagtccctcttttagttggctagacagggaaactgaaaaagctataaagttgtggaactaaagcctattgcagaagagattccgagagcagcgaggattggaattacctggattgccctttttgttttggggtgtgtgtgtgtgtgtgtgtgtgtgtgtgtgtgtgtgtgtttgtgtgtgtagtggcaggagaaattcttggtcttttgtggcaacagacaagggaggcataactaagctaaagtgcaagttccagtccaattaacagacaggcagttgtagaaattatgtccacatgagaagaaataagggctggagggggctacacaggcagcaacatctgcttgaaataatatgtggtagtttgaggcatcccgacctgatcctccttcccattcaaatgacacaaaagaggaagctaggtggtcatcggttaatagttggagaagggggtaatgagttaccaaaggtatttctgagaatagtctgtgttcagatgaatcaagaaagaattgggttggacccggraggggaagaagttggcatttggatttttcatgtctaccatagatattgaataaaggcaatgtattagctggccctcacc

SEQ ID NO: 722136 - DNA, 578 bp, Homo sapiens
taaatgttttaatgactgtggcaaatgatagcaatttaacagcttaactactatttttaggtagcgtagctatttgggagtaggggctcctaggagtggtgggatgggctacctctgccaaattttgtgtggttaataatgggttgagtctcccaacttttcttttattcttgggaagcaaaaactaatagagagctgttstttcagagtttttaggttaagatgtgtgaaagtttcagagccgggtacagtggcctgtgcctgtagtctcctatttgggaggccgaggcaggaggatcactggggagttcaaggctggtgagctataattgtttctgtgaatagccactgcacactagcctgggcaacatagtgagaccctgtcttaaaactaaaaacagaggtacttaaaaatatatatatctgaaagtttcattcactgtgagtttttctatggatgaggaaacattaagtttatggcaaattgagttggtgccccatgtgcatttgttcttcacatctgttgagtggaaagcatttattaactgagttccctgtgtgcgtgggcactcatagct

SEQ ID NO: 722137 - DNA, 578 bp, Homo sapiens
taaatgttttaatgactgtggcaaatgatagcaatttaacagcttaactactatttttaggtagcgtagctatttgggagtaggggctcctaggagtggtgggatgggctacctctgccaaattttgtgtggttaataatgggttgagtctcccaacttttcttttattcttgggaagcaaaaactaatagagagctgttgtttcagagtttttaggttaagatgtgtgaaagtttcagagccgggtacagtggcctgtgcctgtagtctcctatttgggaggccgaggcaggaggatcactggggagttcaaggctggtgagctataattgtttctgtgaatagccactgcacactagcctgggcaacatagtgagaccctgtcttaaaactaaaaacagaggtacttaaaaawatatatatctgaaagtttcattcactgtgagtttttctatggatgaggaaacattaagtttatggcaaattgagttggtgccccatgtgcatttgttcttcacatctgttgagtggaaagcatttattaactgagttccctgtgtgcgtgggcactcatagct

SEQ ID NO: 722138 - DNA, 606 bp, Homo sapiens
gccaggctggtcttgaactcatgacctcaagtgatctgccagcctcggcttcccaaagtgctggaattgcaggagtgagccactgcaccctgccttcagtagctttttgtggtaaagtattggtaacaaaactctgctagagatctgaaatcatatccattccaaattatattcatcatcatcatcattcaaagatcatttagaaagcatgctctctctagtcaaaggattaggcatagcagaacagaaatattagtgataatatctatcctactccagccaaacagcatggggcaaaaaccayggctcaattcacctttatgtcagctggtccgagacagcatggacttccacccactcccctccactccagtgatggtatcagggcactcctcccgctcccaactagagagtgagggaagaacttcaaagaggagggagctggataaagggattatttaaatattattataaaatatttaatattttaataccctttaaatttctttaacagtatcaaagtttgagaaatgaactacagtgtagaacaccaccaggtttaaagattggcctctggacagtacatacaggaagcaaatcagaata

SEQ ID NO: 722139 - DNA, 606 bp, Homo sapiens
gccaggctggtcttgaactcatgacctcaagtgatctgccagcctcggcttcccaaagtgctggaattgcaggagtgagccactgcaccctgccttcagtagctttttgtggtaaagtattggtaacaaaactctgctagagatctgaaatcatatccattccaaattatattcatcatcatcatcattcaaagatcatttagaaagcatgctctctctagtcaaaggattaggcatagcagaacagaaatattagtgataatatctatcctactccagccaaacagcatggggcaaaaaccacggctcaattcacctttatgtcagctggtccgagacagcatggacttccacccactcccctccactccagtgatggtatcagggcactcctcccgctcccaactagagagtgagggaagaacttcaaagaggagggagctggataaagggattatttaaatattattataaaatatttaatattttaataccctttaaatttctttaacagtatcaaagtttgagaaatgaactacrgtgtagaacaccaccaggtttaaagattggcctctggacagtacatacaggaagcaaatcagaata

SEQ ID NO: 722140 - DNA, 597 bp, Homo sapiens
ggcccctgccctcaccacagggagctaagtgctcctaagtttcatctgagtcacagcaaatttctatgaatgaatatctcataaagtttattctcaaattttagtaacatttttggactttcagaattctcagaatataatgatcaggtctgaaaaaattgaggttttttaaaattttaattaaaattttaaaagttgaaataaaaaaactaaaaaattaaaaatttttaaattaagagaaaataaaaattaacttagaaaatyagcataatgtgataaaaactagaacatcatataattctctataatcctctctgaacctttccgatactcttattttatacctaggaggtgaggccagtgtaaattgttcaggattatactgtgattttccagctcccagtccagtggtttgcccattgtacctgtatgtttcaaactggggttttaaaaagtgatgtagttctttatatagactaaacattacttgaaatcacattttgaaagcctttttttttttttaatttttgacatcaccattcccaacatgtagcctccaaaattatcacagaaaaggataaggaaagattttagaaa

SEQ ID NO: 722141 - DNA, 597 bp, Homo sapiens
ggcccctgccctcaccacagggagctaagtgctcctaagtttcatctgagtcacagcaaatttctatgaatgaatatctcataaagtttattctcaaattttagtaacatttttggactttcagaattctcagaatataatgatcaggtctgaaaaaattgaggttttttaaaattttaattaaaattttaaaagttgaaataaaaaaactaaaaaattaaaaatttttaaattaagagaaaataaaaattaacttagaaaatcrgcataatgtgataaaaactagaacatcatataattctctataatcctctctgaacctttccgatactcttattttatacctaggaggtgaggccagtgtaaattgttcaggattatactgtgattttccagctcccagtccagtggtttgcccattgtacctgtatgtttcaaactggggttttaaaaagtgatgtagttctttatatagactaaacattacttgaaatcacattttgaaagcctttttttttttttaatttttgacatcaccattcccaacatgtagcctccaaaattatcacagaaaaggataaggaaagattttagaaa

SEQ ID NO: 722142 - DNA, 597 bp, Homo sapiens
ggcccctgccctcaccacagggagctaagtgctcctaagtttcatctgagtcacagcaaatttctatgaatgaatatctcataaagtttattctcaaattttagtaacatttttggactttcagaattctcagaatataatgatcaggtctgaaaaaattgaggttttttaaaattttaattaaaattttaaaagttgaaataaaaaaactaaaaaattaaaaatttttaaattaagagaaaataaaaattaacttagaaaatcagcataatgtgataaaaactagaacatcatataattctctataatcctctctgaacctttccgatactcttattttatacctaggagstgaggccagtgtaaattgttcaggattatactgtgattttccagctcccagtccagtggtttgcccattgtacctgtatgtttcaaactggggttttaaaaagtgatgtagttctttatatagactaaacattacttgaaatcacattttgaaagcctttttttttttttaatttttgacatcaccattcccaacatgtagcctccaaaattatcacagaaaaggataaggaaagattttagaaa

SEQ ID NO: 722143 - DNA, 597 bp, Homo sapiens
ggcccctgccctcaccacagggagctaagtgctcctaagtttcatctgagtcacagcaaatttctatgaatgaatatctcataaagtttattctcaaattttagtaacatttttggactttcagaattctcagaatataatgatcaggtctgaaaaaattgaggttttttaaaattttaattaaaattttaaaagttgaaataaaaaaactaaaaaattaaaaatttttaaattaagagaaaataaaaattaacttagaaaatcagcataatgtgataaaaactagaacatcatataattctctataatcctctctgaacctttccgatactcttattttatacctaggaggtgaggccagtgtaaattgttcaggattatactgtgattttccagctcccagtccagtggtttgcccattgtacctgtatgtttcaaactggggttttaaaaagtgatgtagttctttatatagactaaacattacttgaaatcacatkttgaaagcctttttttttttttaatttttgacatcaccattcccaacatgtagcctccaaaattatcacagaaaaggataaggaaagattttagaaa

SEQ ID NO: 722144 - DNA, 2600 bp, Homo sapiens
aatttcaaaagtttagacaaacaggaaatcatctgattttaaaatttacactaaaattcaaatgagtgataacattcaactacatctaccttttaagaaaaattatctaactaaaatgattttttgatcatgttttcaagtaaagtgccattacaaaggaaaatttcagctggtcaatacaggagagtttagaagcctttcaaatagtaacttaggccaacccatctagcaggaatttatataaaaattgcattacagggacacatttaggtgaaatagaactaagaaagtaagatgttgatatgtgattaaaaaaagacaaagaaaaataatttcccaaatatattttaataggctcagattttaaatggtaaatggagacctatgaaactcttatgaaactctttactgatatcaaccatattatatctaggataatctttagaaaagatcctgttaaactctcagttgcctcccaatttgtactcccatgttgatttctctatgattctatagagaatataattcttattccgcctcttctaccattgattatttaacaagttcttaggattttgaagcccatcttaatgttaactcagttaaatattattaatagttgttattgtggttctgtacacatagttgacttaaaaacatgtgtttactgaaaatatatgcttagcagaattgagagtcaaatttaatttggttcaaatgcatcttgttggttcttcattttcaaatttattgacacttcagcattgatttaatctaaacttacctgccttttcccctccttagtgaaaaagaaatatttccaaatgatatataatttggaagtggtactttcattttaccttttactacagtgtacttaacaagatactttcttcttcctcttccataaacaactatttctttttctccctgctttcccatctaaatgtttaaagacaatttatcaacctggttgcacttgactgcaaacacattagatcaagaacaaagaagcatagcttttaagaactatagatacaagtaggtcatcatggtcactgaaatgatatttagtgtcatttgcaacataaaagacaacaacttcttgactttgaatttgagtttctattcatagctgtgggggaaatttaatatcagaaactcatcccagaacattttgtgaacatgaaaacaaaaaatctatgttataaaatacaaccattgcttaaaatattagtcattggtaagtttaaagacaaactttcacrtcatggggctcataagttctagtttactctggatcagctgaatggtttacacacaggaccaccatcaaccatttccacatttctggcaaatgcatactaagaggtgtgaggaaaaaatagtccagcatccaacagggaaaaaagtataatctaaatatataaaataaatattttcttttgcatatactcagtggttcatcattttgaaatcacattatacaatacaatatccaaaaatttggaaaatttctatgttattttaacatattattgatttggaattttctatctaaacaagagttcaacagatttgttttgttataaaacaacatatccccattatatataatttagaaaatacagaataatgtaaaaactaatcatacatacttccattatcaagagatagttatcattatgtctgtgtttattaatcttctttcctgtttattattattttggtgggattgggggagggttaattgcacaattatggctacattgtttaaatctttctatgctattttaattacttaggctgttttaatgttagtacatagttgttcataaacttcatttacatggcttcataattcattgcaaattggctttgcaacagtttactttagcacttctcaatttttttaacttttgatttgtttctcccaccatttttcttccttaaatcttttttatgtttatgattttagcttatgatagattatgaaaagtataataaataaatgaaagggtacaggtatttttaagggtcttttttttttctgttaccagattgattttgataaagtttataccaattactatgttgtaaatatttgtcccctccaaaactcatgttcaaatttaattgccattgtaacaatattacgaggtggaacctttaagagattattaggccatatgggctccaccctaaagggtggaattggtgcccatatacaaggtctagtgtggtcccctcttgctctcttgccttctgccatgggatgacgcagcaagaaggccctcctcagatggtggcagcttgatcttggacttcccagcctccagaactgtgaggcagtaaatttctgttcattataaattacccagtctcaagtattctattatagcagaatttaagttctaatacatcagtttatatattagcaacaaatgaaagtatcacttcaaatcatctcgccaagattatttgtaatatttgctaatttgaacataaaatatagttaaatgtcattgttatttctcacttggcttgagaatctggttcatattaaagtaaaacattgagaaaaatgcctaattattcga

SEQ ID NO: 722145 - DNA, 608 bp, Homo sapiens
ttcaaaggggatgatgagcaacagtttcactctttgtcactgttgtttagaggaagtttcactctttgttttcttaatgttttttagagacagggtctctctctgttgcccaggctgtagtgtaggtgcaatcatagctcactgcagcctcaaactcctgggcttaagcaattccctcaccttggcctctsaaaacatcaccctttgttgttattttcaactgttatttgcaaataaagcttgccttggaatagcagcatggtagaatggcatcaatgtgcctgggatataactccaactctgacatttattaataagtgtgacctcagactcattcatatttagtaccagagatgatatatacctgttctgaatacttcccaagttgaagtaagtattaaaaggtaaaataaagttactaacacagtgccccgtgtacaagatgaccactcaatgttattccatctcctgcaacgctttgtcccttagtaaaggaaatgctgaaataattatagccccaagctccttggtaaagcatggatgcataggttttggctattgctctttctttgcttgtttctttaatacgttcattgatatataatttg

SEQ ID NO: 722146 - DNA, 604 bp, Homo sapiens
taaccaacctctaggtctttttcatatgaactaatgttaaaccagaattctctatgtgttacttgtatttttacgcagggctcaatatttatgatggctaaatttttatctttctgactttatggtattattctgtggagttaagatataattttgaatcttaattytgtcaacccccgaattagatatccttcccaggttttaaaattttagacataagtaaaactcttaattttcaagcatactaagctttagatcacaaatgatttttgccatcctcaagagttattgcaatgtgccatatatatttaaatacattgggaaatgtcttaaaggatgctacttctgatgggggagaaaaggtgttcaaacgggtttagtgcagggtgtgcatggggctgtgctggacacaaagattttagtcatatctatgatgttctaattttttacaggaaaaagttatccagttgttatttatgcaatgaaaacaaattttaaagaaaccaatatagtatgaccacctcccttgacccacccaccgaacttcaatagttttctgacaaaagaaacaaagttagtgaaaataagaaaaatcactgagtcc

SEQ ID NO: 722147 - DNA, 2423 bp, Homo sapiens
ttaaaagtgtcctatactatgaatttatttgccatatataagacaatcagaattatctggtagtttattctaatcctggttaataatcattaggactaaactatttacattaaagaaggaaaaaacaatgagatgataattttttttttctttgagacggagtcttgctctgtcggccaggctggagtgcaatggcgcgatctcggctcactgcaacttccgcttcctgggttcaagcaattctcctgcctcagcctttccagtagctgggactacgggcgccctccaccactcccggctaatttttgtatttttcatagagacagcatttcaccatactggccaggctggtcgtgaactcctgaccttgtgatctgcccaccttggcttcccaaagtgctgggattacaggtgtgagccaccgcacccagccttttttttgaaatggagtctggctctgtcgcccaggctggagtgcaatggcgcgatctcggctcactgcaacctctgcctcccaggttcaagcgattagcctgcctcatcctcctgagtagctgggattacaggcgtgcaccaccacgcccgcctaatttttgtatttttagtagagatggggtttcactacgttggtcaggatggtcttgaacttctgaccttgtgctccacccacctcagcctcccaagagttgggattacaggcgtgagccactgcacccggctgagatgataattttatttaaaaaaaaaattgtagagatagggtcttgccgtgttgcccaggctggtctcaaattcctgggctcaggagatcttccctcctcagcccctcaaagtgctgggattacaggcctgagccactgcatccagccaggagtgacaatttytaaagccttaattagtgaaatggtttgttttgagaagcagaaatgactaagtggtatagacatgcaggaaaagcaaaatgggccttatggctattgaaattatgagtgttgatctgttctataaattggaggagacagctatttgcattctttcttatccagttgactaaacttactcattttaaaatgaattatcttgcaaaattatgtgaggttaagtttgtcagaggattgaaaacgtggttggtttatttgtggtaattgtgaaaaattgcaaaggtagcaaaattttttaaaaaatggaaaagagaaagattattgatgccttgtgaatacaggtgtccccaaaaggcctgagaccaaccttaattatcaagaatatggttgcagtggaaattggtaaacagctgaaattgattcattgattattcaacacttattgagcacatactactattattaatagctgtactgcgagcgctaatacttaaaagaggaagtcaggtgaaggcgcaacagctttatgctctttttcactataatctgtgaaatagtgtatattaaacaataatagtatatggaaaagcacatctacatgtgtcatcagttataatactgtggggctgtttggcagacaatagagtagataaatttattgaacattgggcctttgaaaggtatgtggaaattgtaaataaaaatggattccatgaatttcaaataataattgttctgttgtatgtgaaactgtgtaataagattgtcattttatttacttttctgcatcattttcaacttcctttttgagattagctaaaattgaacacttacaagaggaaatgattttacttttatattttcatgtccaagggaagaggaaaacatgaagaaaacagatttataaaatttactcacaaggctgggcacggtggctcacacctgtaatcccagtagtttgagaggccgaggcaggtggatcacgaagtcaggagttcaagaccagcctggccaagaaggtgaaaccccgtctctactaaaaatacaaaaattagccgggtgcggtgggagatacctgtaatcccagctactcaggaggctgaggcagaattgcttgaacctgggtggcagagattacagtgagccaagatcgcaccactgcactccagcctgggtgatagaatgagactccatctcaaaaaaaaagtaaaataaaattaaatttattcacttatatttttctttagtgaggaaaccaaaggaaaagataatttaggttatattctgaaagaaataaacagtcactggctttctggttcttcatgtaaagaagattcaggacaagatatttcttttgaaaaagataatcttgtaaaaatgagtgtgccaaagaagttgacattttaagtaagttaatattttacacaaaagctcttcttctgttacctcttatgcttactggaagaaagcaaccagcacagagaaagaaacgttgggtaacaagctggaagagataacaataatagcagttattgtaaagcc

SEQ ID NO: 722148 - DNA, 601 bp, Homo sapiens
tgggccaattttttattttttacagatggggtcttgctatgtggcccaggctggtttcaaactcctgggctgaagcaatccttgacttcccaaagtgctgggattacaggcgtgagccaccacacttggcctatatttcttaaacgaaaaaagaactttgacaagttaaggaattaaaatgagtgggaaaaaatacaaaaagttaaaacaaaatgtaatgcacacacctgttgacccaataattctatctctaggaaattatcccaaagatatattcatacactatgcaaaggtatattacagcactgtccattttatgagacaatttaaatatacgtaaaaactaaaatagtattcagacratagaaaataatatagccattaaaaagaacgtggtaggtctcggtgttctgtaacagaagttccttaagctccgtgaagtatcatgtgaacccaaacccatgtgcttgtgggtccagtgtgaaaagatacaccaaaaactggcaggaggactgggaaggaagtggagggcaacttttactctctcttgttaagctattaaattatttaacattgtttaaacatttctaaaatgcaaaag

SEQ ID NO: 722149 - DNA, 649 bp, Homo sapiens
caagtacctgtctgagtctctgctttcaattttgggcatatacctagaagtgggattgctggatcataggatcattctatttttaacttttttgaggaattgccataccacccgctacagcagccgcatcttttatattgccaacagtgcacaaaggctctgatttctccactttctggtcaacatttagattatcattctttttttaaaaaaacgtaatasctaacccaatgggcatgaagtaaggttgtttttgttttttgtttttaatgtgtgcgttatcttacttgatccattaaatccctaacaagaactcctctagggcagatgtcctgtcttattcatccttggccccagtgtcttgcaagcaagtgaattctcaataagtgttaattgaatggatggttgatagatttataggatgcatgccaattctgtggacgagagtaggtactaattgttattttcatttcacagaagagcaagtcagggctccgagcactaagtgacttggctgaggtcaaactgcctgcaagttttatctaatagtgacagaggaaccaatgtgtcgagcatgaatgtcagtccattgaaacagtgcccacttttctgactctgctccttaagagacagggcctgtacagcaagg

SEQ ID NO: 722150 - DNA, 1866 bp, Homo sapiens
attgcgccactgaacttcaacttgggtgacagagtgagaccctgtctcaaaaaaaataaataaaatgaaataaaatagttgttcccaaggaaagtgaaaatgggtacaagactgtaggaaaaacacatctgcccaaggaaattctagttgcttcccaaggcgtctaatcattggctgccccctttaattcccatctggaatactcaacctctcgaggcctttgggtcatcatgtttgctttagagctggaactgacctgtagatatggctgacacctgatttttcctagtcttaattttatgtcttttggggaatcaagcaattttctggaagatcttagtgattagaatggtcatccagtgaaactaacaactctgatttgttgagattttattaaattaatatttttaaatggcatcagattaaacctaatatcccagaatacaggcattattacccccatttgaccagtcaggacattgagactcagagaagtcaaatgacttcaccaaggtcccacagctattatgtggtagactcaggagtcaaccgaggcccttccagctccaaagttgatgcttcatcatggctcttatttgccaagaagtagccaggaagctgagactcagccatccccaaaatgagagttaggcaaaagccaacaaccacattcaccactcactgcagaatgggctctcctcagctgtgtcaaagaatgccttcgtcattggaggatctttcccccttagatggtctttccaattatcagcataatagcctatgaaacaagtttaaaaaattgtaagattaatatgtattatacaaacataaaagcaactgaggtagcaagaacattgagtttgactgtatccaccacttctgagagaaactccatcccacctccatcccccatggtgagggcctgcagggtgacccatcttgctggccaaccctgtccctaagagctgaagggcaacaggaccctccagttgttttccccctttactggttctcagtagcagggtggagaggtgtggggtgtggcacacactggtgtggactaaaaataacactgacatttttcagtaatacattcattttctagattaaaacagattcaagttcatacctaaaatagcatcactcttgaaaaccaatatgctttcttgaagaactacaatggggcccctaaattgcatagacctgggcttgccacatgactgactgtgtcactaagcaggtgagtgtcctcctttgtttttgctgtccagagggccctctttctctcctctgtccctagccctagagaatggccttcacattctgccttaattgatccagggtgggacccaggcatcagtattgtgttaaaactccttaggtgattctaaagcacaatcaaggttgagaaccccttgtctataccatgccctgttgttaacttggatttttccttttggaaaaaaaatagaaaatcctcatgaccatccagtttcaaagtcctaaccacctagaatatctgtactaatccctagcgaatatccaagcagcctccacaatatctattacctcactccacctgctgtacgtgcacacaagagccagaatgtggagtgagggcatttacatagacatgagtctgtgaaaaagttcacttgtcaggagrgtctctgggctcattgtggaccctctcccagcagagaggttgtaagcacagaaagggtattcctgtccccacaggagcaggctacgtagagtgactgtaccctgggtaagcttggaaactcttctgtaaccttcttttccatgctagaatagagggtccagggaggctgtactgccttctggatggaatactctacagtt

SEQ ID NO: 722151 - DNA, 1555 bp, Homo sapiens
  misc_feature 341, 342, 343, 344, 345, 346, 347, 348, 349, 350, 351, 352,353, 354, 355, 356, 357, 358, 359, 360, 361, 362, 363, 364,365, 366, 367, 368, 369, 370, 371, 372, 373, 374, 375, 376,377, 378, 379, 380, 381, 382, 383, 384, 385, 386, 387: n = A,T,C or G
  misc_feature 388, 389, 390, 391, 392, 393, 394, 395, 396, 397, 398, 399,400, 401, 402, 403, 404, 405, 406, 407, 408, 409, 410, 411,412, 413, 414, 415, 416, 417, 418, 419, 420, 421, 422, 423,424, 425, 426, 427, 428, 429, 430, 431, 432, 433, 434: n = A,T,C or G
  misc_feature 435, 436, 437, 438, 439, 440: n = A,T,C or G
tatgcatgaaaactgttatgcagaaaaaattcctacaatggttttttttcctccaaatgaaattcttttgtgttaataaatatttcttcatttatgtccaatcttagggtgctcacaaagagatctccttaggttacatccctttgtttctgagatttaatgaaagaattttatgtaagttaaagaaaggaattcttgttagatttatatatcaaagtaaaccacagacctcagttatttcgcccaacttggccaccccaccccatctgatgtcagagtctttctctaatactgtcttgagtcaactgtgtgccaggatagtgcctgctggaaactggatnnnnnnnnnnnnnnnnnnnnnnnnnnnnnnnnnnnnnnnnnnnnnnnnnnnnnnnnnnnnnnnnnnnnnnnnnnnnnnnnnnnnnnnnnnnnnnnnnnnnccattaaaattcccaaagcctattctcaaaccaacttttcatgtggacgttcaatcatctttctggatgacctcgccttacccattgcctcagattctgtgtgtgtgtgtgtatagaagaaacaaagaaaaaaagtgcttttcacatagtgaggacatttccccatcctatgagtctgtgtatgtgtgtgcatatgtatatgtatgtacacacacacacacacacacacacacacacacacacacactgccccgtggaataggcaggacggggttgcatttcccctcttttaaaggtgaggatgctgagcctcagaaagatcaagtgacctgaacaaagtcacacagccaatgtgtttctccaaaagaaatgaccaggagtcagtgtttctttatacaagggtgtccaatcttttggcttctcggccacactggaagaagaagaattgtcttgggccacacataaagtacactagcactaatgatagctgatgagctaaaaaaataaaaataaaaatcacacacaaaaaacagtgttttaagaaagtttacaaatttgtattgggctacattcaaagccgtcctgggccatgggttggacaagcttgctccaccataaacacgtgatgaacagacattgaaatygtacctttagggctgttttaggaacacaagaggcatcatctggctatcttgagaaagcagatttcaattttctattcattaaagaaatgtgcttccatctaccttgaaatcattttgatgatttccagattcaagtccctgaataaattccagggaaagtcacgtcacgggacagaatggccgtcaccttgaaaaaaaattattttctcctggaggcactactgaggctcagcgatcccacgtctgccactccctcctactgcatgtggtatccctgagtctccgctcagggaaaacagacaaaactacacatgctcaaaacagaacaaaaatgggaacagggctcagaaaccagtttgtctggttccagtcatttccaccgcaatgacagatccagtgaccttggcagccctcatccattcaccacatcttcccattaccacctaacgtgcccctcccaatagctccgtg

SEQ ID NO: 722152 - DNA, 1555 bp, Homo sapiens
  misc_feature 341, 342, 343, 344, 345, 346, 347, 348, 349, 350, 351, 352,353, 354, 355, 356, 357, 358, 359, 360, 361, 362, 363, 364,365, 366, 367, 368, 369, 370, 371, 372, 373, 374, 375, 376,377, 378, 379, 380, 381, 382, 383, 384, 385, 386, 387: n = A,T,C or G
  misc_feature 388, 389, 390, 391, 392, 393, 394, 395, 396, 397, 398, 399,400, 401, 402, 403, 404, 405, 406, 407, 408, 409, 410, 411,412, 413, 414, 415, 416, 417, 418, 419, 420, 421, 422, 423,424, 425, 426, 427, 428, 429, 430, 431, 432, 433, 434: n = A,T,C or G
  misc_feature 435, 436, 437, 438, 439, 440: n = A,T,C or G
tatgcatgaaaactgttatgcagaaaaaattcctacaatggttttttttcctccaaatgaaattcttttgtgttaataaatatttcttcatttatgtccaatcttagggtgctcacaaagagatctccttaggttacatccctttgtttctgagatttaatgaaagaattttatgtaagttaaagaaaggaattcttgttagatttatatatcaaagtaaaccacagacctcagttatttcgcccaacttggccaccccaccccatctgatgtcagagtctttctctaatactgtcttgagtcaactgtgtgccaggatagtgcctgctggaaactggatnnnnnnnnnnnnnnnnnnnnnnnnnnnnnnnnnnnnnnnnnnnnnnnnnnnnnnnnnnnnnnnnnnnnnnnnnnnnnnnnnnnnnnnnnnnnnnnnnnnnccattaaaattcccaaagcctattctcaaaccaacttttcatgtggacgttcaatcatctttctggatgacctcgccttacccattgcctcagattctgtgtgtgtgtgtgtatagaagaaacaaagaaaaaaagtgcttttcacatagtgaggacatttccccatcctatgagtctgtgtatgtgtgtgcatatgtatatgtatgtacacacacacacacacacacacacacacacacacacacactgccccgtggaataggcaggacggggttgcatttcccctcttttaaaggtgaggatgctgagcctcagaaagatcaagtgacctgaacaaagtcacacagccaatgtgtttctccaaaagaaatgaccaggagtcagtgtttctttatacaagggtgtccaatcttttggcttctcggccacactggaagaagaagaattgtcttgggccacacataaagtacactagcactaatgatagctgatgagctaaaaaaataaaaataaaaatcacacacaaaaaacagtgttttaagaaagtttacaaatttgtattgggctacattcaaagccgtcctgggccatgggttggacaagcttgctccaccataaacacgtgatgaacagacattgaaatcgtacctttagggctgttttaggaacacaagaggcatcatctggctatcttgagaaagcagatttcaattttctattcattaaagaaatgtgcttccatctaccttgaaatcattttgatgatttccagattcaagtccctgaataaattccagggaaagtcacgtcacgggacagaatggccgtcaccttgaaaaaaaattattttctcctggaggcactactgaggctcagcgatcccacgtctgccactccctcctactgcatgtggtatccctgagyctccgctcagggaaaacagacaaaactacacatgctcaaaacagaacaaaaatgggaacagggctcagaaaccagtttgtctggttccagtcatttccaccgcaatgacagatccagtgaccttggcagccctcatccattcaccacatcttcccattaccacctaacgtgcccctcccaatagctccgtg

SEQ ID NO: 722153 - DNA, 1494 bp, Homo sapiens
taaaaatgacaattttaggtttagaatatataacagaaaagtgtcctcatacagaagcaataaaaaatataaaatatctaggtaaaactttaaaacgtataaatgatctaagtgaggaatgctaaaaaagttttgcatgaataattaactcatgagcaaaaagggtattttggggattgaatgtgctttggaaagcctctctcrctttaatagacattcgtattatcaccctttattatacaacaatgttttcagtgggggaatgaatagttactacactctcctttgctagtggtatttatttagccctttcaaccaaatatcccccagccctctgctcatcttagttactgctcaccacatccttgcacgttccaaggcagcccttacttggtaaggaaagagaggcacagacctgtaagtggattgcccagaacaacaaagaggcctagctgaacataaccctttcttcccagttcctgttgcaaaccgtattaactgctgttgtcatagaattagaatgctttttaaagtccagcaggaaccttagaaattcaataatgccattttatagctgagaaagctaaatcccaagaaagctgagtgttttgcctgaggttatacgatttattaacggcagaggtgggactagaaaccatgagtcttcatgaggccttcaaagaactactttctttgtgggaccgacatgaagggtttaaacatttgtggctacaggtccagagagacatccctagaaaatgctgagattagtaagattttggttggagagtgtagaaataggacagcgtttgctttcaccctaaccagaatgaagggtctcagatttccaggttaaatgcctctgaaactttattctagaacctttcccactgccctagtttgtttaagtcaagcatgaactcaccactcaatgtttgccagagtttggatgaatgtcagcatcaggctactgtaataatggtttaagattatttaatcccattagttatacacttcattaggctgagtgaattgttggcagtggttcagtaaacttcctcctttagagataaaaggacagaaagaaaataggaaaggagcctattcctcattttctttcatagttataattctttttttttttttttttttttttttcccgagacggggtcttgctctgtcacccaggctggagtgcagtggtgcaatctcggctcaccgcaagctccacctgccgggttcacgccattctcctgcctcagcctcccgagtagttgggactacaagcacccgccaccacgcccagctatttttttttttttttttttttgtatttttagtagagatgggtttcaccgtgttagccaggatggtcttgatctcctgacctcatgatccgcctgccttggcctcccaaagtgctgggattacaggggtgagccactgcactggccataattcttaatggataaaggaatgataattacccagctg

SEQ ID NO: 722154 - DNA, 647 bp, Homo sapiens
ctgtctggctactaggggaaagttatttactgaccctgaaaacatttattttcacccatctcttctagaaaggctaagaaatttcacaccttcttgccacattaccttgattattatactggctcactcctttctggctcacagattggctggaattctaaatatggcttttggaaggaagtaattgaatyataaaatgtccaagtatctctacaggaaaagaaatgtcatctagcccatgacaaggcttttgcacaaaaaaacctgccctaataaaaagtttacagttttctgtattaaaaaagaataaacaccaataaaaaaccataaagggggatttactttggagggatttcacactgacataagaaagaatttcctgtacatatggtccccaattttagacacaatgcattcctggaaattgtatcataaagcagatcaccagaagggaaagctgtgattgtgcctgcttcttccattcaacaaacacctactgaatgcccactatgtcccaggcataatgacaagctctgccctgttcacatggcctaaaaaatgatcagtgcatcagaatgggtaaggcaataagaacagaaatgtgtttatgaggttatcaaatgagcatggcatcacagtgagaaaga

SEQ ID NO: 722155 - DNA, 647 bp, Homo sapiens
ctgtctggctactaggggaaagttatttactgaccctgaaaacatttattttcacccatctcttctagaaaggctaagaaatttcacaccttcttgccacattaccttgattattatactggctcactcctttctggctcacagattggctggaattctaaatatggcttttggaaggaagtaattgaattrtaaaatgtccaagtatctctacaggaaaagaaatgtcatctagcccatgacaaggcttttgcacaaaaaaacctgccctaataaaaagtttacagttttctgtattaaaaaagaataaacaccaataaaaaaccataaagggggatttactttggagggatttcacactgacataagaaagaatttcctgtacatatggtccccaattttagacacaatgcattcctggaaattgtatcataaagcagatcaccagaagggaaagctgtgattgtgcctgcttcttccattcaacaaacacctactgaatgcccactatgtcccaggcataatgacaagctctgccctgttcacatggcctaaaaaatgatcagtgcatcagaatgggtaaggcaataagaacagaaatgtgtttatgaggttatcaaatgagcatggcatcacagtgagaaaga

SEQ ID NO: 722156 - DNA, 647 bp, Homo sapiens
ctgtctggctactaggggaaagttatttactgaccctgaaaacatttattttcacccatctcttctagaaaggctaagaaatttcacaccttcttgccacattaccttgattattatactggctcactcctttctggctcacagattggctggaattctaaatatggcttttggaaggaagtaattgaattataaaatgtccaagtatctctacaggaaaagaaatgtcatctagcccatgacaaggcttttgcacaaaaaaacctgccctaataaaaagtttacagttttctgtattaaaaaagaataaacaccwataaaaaaccataaagggggatttactttggagggatttcacactgacataagaaagaatttcctgtacatatggtccccaattttagacacaatgcattcctggaaattgtatcataaagcagatcaccagaagggaaagctgtgattgtgcctgcttcttccattcaacaaacacctactgaatgcccactatgtcccaggcataatgacaagctctgccctgttcacatggcctaaaaaatgatcagtgcatcagaatgggtaaggcaataagaacagaaatgtgtttatgaggttatcaaatgagcatggcatcacagtgagaaaga

SEQ ID NO: 722157 - DNA, 650 bp, Homo sapiens
ctttcattttactacctttcactcccctgttattctcttggtctccttccagactgcattgttttctatctcacaaagccatgatgagcttttctcctgtccctttgctcatgctgtcctagcttcctgaaatgttctcccttatttgccctggattttcagcctgttgaatgttcttcttttaaagcacatgtcaaatatgactgtcttgttaaatttttttcatayactttacctttgaatacagctattaatgttttgttcttaatctcctctacttaatattaaacatcttatttctgtttctcttattgtggaagtgtcttgcatgttgtggttgtgtggtatgtctttaactggccatagtaactacattatcttaaatttaaactttctttggccatgtgtagtggcacacacctgtaatcctagtactttgggaggccaaggtgggcggatcacttgaggccaggagtttgagaacagcctggccaacagggtgaaaccccgtctctactaaaaaaatacaaaaaaattagccaggtgtggtggcggttgcctgtagtcccagctacttgggaggctgaggcaggagaatggcatgaacccaggaggcggagcttgtagtgaacagagatcgagccactgca

SEQ ID NO: 722158 - DNA, 614 bp, Homo sapiens
tctgtaactacctatatcctcaattttgcctcttggcccacaaaacctaaaattgaaatatttactctctggcccgtaacagaaaacatttgccaacccctgatctagtttgcatgaccaaactgggaaattaagctgcatttaattgttcaagattatttcataagaatttatactctaaattctgtcttttttgtaaatctatcttttataggcatatcaaatttttgccctgtatgggggcaaatgatgccccatttaacacagtctaatttttcacagtaaactaggaagggcttcatttgaccatcagagctgcttgtatgtaagcatattaggtctcctgcaggtttctgttgtttgcygtcttgtgatactaatccagaaaaataaataccaagagacaaataccatagttgttaatatacattcagtgttttctatttatattttttatgcaggcatttatgtgataccaagtctggatttcatctttttaaaacctatttaagagatattttaaaaagaccatgcaggggattttttgttgttgttgttttgttgttgttgttgtttgtttgttttttgagacagagtttcactcttgttgccca

SEQ ID NO: 722159 - DNA, 413 bp, Homo sapiens
agtattcccttttcatcatatccatgccaatatctttttttttaacttcttagtaatggcaattcttgcaggagtaaggtggtatttcatcgtggttttaatttgcatttccctggtgaytagtgatgttttttcatgtgtttgttggctatttgtatatcttcttttgagaaacgtcctttgcccactttttgataggattatttgttttcttcttgctgatttgtttgagttccttgcaggccattattctaaatgaagtaactcaggaatagagaactaaatactgcatgttctcacttataagtgggagctgagctatgaggatgcaaagacatacagagtgatgtaatggactctggggactccaggtggggaggagattgggagggggtgagggataaaagactaca

SEQ ID NO: 722160 - DNA, 1024 bp, Homo sapiens
tgaacagttctcttatttattgtgtcaaattttacacttgtacacttggcagggcaagtccagtaccagttatttcatcaaaattatacgcagatagattggtgttatttaaatgatatattttttttgacacagagtttcactcttcgttgcccaggctggagtgcagtggcacgatcttggctcactgtaaccaccgcctcccaggttcaagtcattctcctgtctcagcctcccgagtagctgggattacaggcatgcaccaccmtgcccgggtaatttttgtgttattaggagagacagggtttcaccgtgttggccaggctggtctcaaactcctgacctcaggtgatccacctgcttcagcctgccaaagtaccgggattacaggcatgaggcccagtgcccagccttaagtgatactttcaaaatttaatttttgttgaaaaatcacatataaaaatgtatgccaacagaatttttaggtttctcttaaaaaattataaatgttttcagttttaaacaaaacttaattaactcagaatatcatatattttctgttactcctggtggaaaaaagtaggaatattttggtcaactactttcttatctattaaaatactctcctttctataagttcaactaacaagacattgtctttgtaaaaaaatttctcaagttctaaaagttcactgtgattcctatacctgtatattttacagctctattactacaatccgttttcttcatattttttcctatatcctctcccaatattttgaatgtttcttggtgcaacaatattgaaatgtcaaaaacataaatataataaatttatagataataaaaaaacataacctagacagtcatccagaggccttcaaaattaaaattcttagaaagatgaaaagagaataatttgtagctacagctagttaaaaacctggtaattcattaagactttgtactcaatgcattttctatgtgttttattagaagatggagtctgaagaaatagataata

SEQ ID NO: 722161 - DNA, 626 bp, Homo sapiens
  misc_feature 5, 6, 7, 8, 9, 10, 11, 12, 13, 14, 15, 16, 17, 18, 19, 20,21, 22, 23, 24, 25, 26, 27, 28, 29, 30, 31, 32, 33, 34,35, 36, 37, 38, 39, 40, 41, 42, 43, 44, 45, 46, 47, 48,49, 50, 51, 52, 53, 54, 55, 56, 57, 58, 59, 60, 61, 62,63: n = A,T,C or G
  misc_feature 64, 65, 66, 67, 68, 69, 70, 71, 72, 73, 74, 75, 76, 77, 78,79, 80, 81, 82, 83, 84, 85, 86, 87, 88, 89, 90, 91, 92,93, 94, 95, 96, 97, 98, 99, 100, 101, 102, 103, 104: n = A,T,C or G
tgatnnnnnnnnnnnnnnnnnnnnnnnnnnnnnnnnnnnnnnnnnnnnnnnnnnnnnnnnnnnnnnnnnnnnnnnnnnnnnnnnnnnnnnnnnnnnnnnnnnnnttcaatccagcaatcccattactgggtatttacccaaaggaaagaggttttagaaattagtcaattmtgagtgtaatgtattcctccctgttctttctgcctatggtagtatttctgaaatggtctggaatagctatcttcaaattcaaaccttggtgaatagtgaatgacttaaatatattaacttagaaatatcttagcagattctttcattaggttaagcctgaatctatcatatgtaatttattctattaaatattgtatgtcatcagtatatattcatatcgtattaatattatacagcaaatggtaaataagtaaatggttgctaaatgccttcctgaatagataaaactgtcctaatacaacataacccttcaatattatcttagaaacttctccctaaattcctgtggctcttctaaattttcttccttcattgttcatgttacttgggagcatggtgattggctgttgtatttgagagcctggaagtttggaaagagaaattgataattaagt

SEQ ID NO: 722162 - DNA, 1653 bp, Homo sapiens
aagttctgcaacttactccataatctttctgctgcttctggatacacttccaaactgggagatgtcagagtaattgagcagtgtggccmgcaaataactaattatttttaaaaatttgaaattgatagcaccctcatgagaaactagaaaacaaagtatcgattcccatacccttccccatatctaatgtaaaaagactacttacttacctcatgcgctaacattttatagagttcttctctagttacagaaatcctctctctgtctgtactgtccacaacaactattacaaactaaaataattacaaaaaaattattagtgattatacaatttggtatctgtaaaatttataatgtgtttatttgacatacaggctattaatatcaagaaattggaatcttatggtattgttggaaaatcagagctacctatacattgtgaagccaaaaggtctgatcgattttaatatatttactaatttttaagagaaaagagaatatgatattaacattctaactaatatatataacgcatgtctgttttctaaactagtatcttgaatgctaatggacctatatctatctatttgcactacaaatcaacaagaaaaacatgcaatatgatcctgaatttattacttccaggtagatattatttattaatatcaatctgaacacctaaaagggcacgggtatgggagtaaagtaatgtgacaagataaagaaatcaattaaaaaaaaattcaaccaactgaaagaataaatctctatctaaaaacaagctctcttccttacataagtatcgcctgctacctgcaagcacaaccccttcataaactgatgatgagactggtatcagaaggtgcgatgaaagacttgtgattgttgtgcaggactgagctccaccccagctcttcctcaactccgtgagcacccaaaagcaagagatcagcaggaacagatggagatttaacttacttactttatgataacatttatgatgcccaagttggttctgactgcctattagtaacatgcactatttatttttgggacctagatcttaatttttaaataaattattatgattttctggatcttttcaattattcagacttcatcaaccaaaaggcagatgtatgagagaactgctactttacctctcctctcacttgacagcttactgataggtggctttatcactgtaaggcccattttattccaaggtattttaataaaactgttaattttcaggctgttggcatgaatttgaaacctatagcatatgtatacagtagcatatatacctttataatcatacataacttcccttattaaaaaatgattaaatgcctaatgcagtgttaggaaatcaagttgtcagatacacttaatggtttcttaatgacttaaaagtcagctttatatacttataaaccatgctttattaacttgtaataatgaacactacaaaaacaacggtcagtcttttaattcacaggtctatgcaatgaagcactcaaatgtcaaaggtctgaaatttcctttgggaaataatgtgtaaataaaaagatatgactatgtctaaaatgccttataatcaaaagaaaaacaattatttaatgtgcaattgtgttttgtaaaagaaaatag

SEQ ID NO: 722163 - DNA, 1653 bp, Homo sapiens
aagttctgcaacttactccataatctttctgctgcttctggatacacttccaaactgggagatgtcagagtaattgagcagtgtggcccgcaaataactaattatttttaaaaatttgaaattgatagcaccctcatgagaaactagaaaacaaagtatcgattcccatacccttccccatatctaatgtaaaaagactacttacttacctcatgcgctaacattttatagagttcttctctagttacagaaatcctctctctgtctgtactgtccacaacaactattacaaactaaaataattacaaaaaaattattagtgattatacaatttggtatctgtaaaatttataatgtgtttatttgacatacaggctattaatatcaagaaattggaatcttatggtattgttggaaaatcagagctacctatacattgtgaagccaaaaggtctgatcgattttaatatatttactaatttttaagagaaaagagaatatgatattaacattctaactaatatatataacgcatgtctgttttctaaactagtatcttgaatgcyaatggacctatatctatctatttgcactacaaatcaacaagaaaaacatgcaatatgatcctgaatttattacttccaggtagatattatttattaatatcaatctgaacacctaaaagggcacgggtatgggagtaaagtaatgtgacaagataaagaaatcaattaaaaaaaaattcaaccaactgaaagaataaatctctatctaaaaacaagctctcttccttacataagtatcgcctgctacctgcaagcacaaccccttcataaactgatgatgagactggtatcagaaggtgcgatgaaagacttgtgattgttgtgcaggactgagctccaccccagctcttcctcaactccgtgagcacccaaaagcaagagatcagcaggaacagatggagatttaacttacttactttatgataacatttatgatgcccaagttggttctgactgcctattagtaacatgcactatttatttttgggacctagatcttaatttttaaataaattattatgattttctggatcttttcaattattcagacttcatcaaccaaaaggcagatgtatgagagaactgctactttacctctcctctcacttgacagcttactgataggtggctttatcactgtaaggcccattttattccaaggtattttaataaaactgttaattttcaggctgttggcatgaatttgaaacctatagcatatgtatacagtagcatatatacctttataatcatacataacttcccttattaaaaaatgattaaatgcctaatgcagtgttaggaaatcaagttgtcagatacacttaatggtttcttaatgacttaaaagtcagctttatatacttataaaccatgctttattaacttgtaataatgaacactacaaaaacaacggtcagtcttttaattcacaggtctatgcaatgaagcactcaaatgtcaaaggtctgaaatttcctttgggaaataatgtgtaaataaaaagatatgactatgtctaaaatgccttataatcaaaagaaaaacaattatttaatgtgcaattgtgttttgtaaaagaaaatag

SEQ ID NO: 722164 - DNA, 1653 bp, Homo sapiens
aagttctgcaacttactccataatctttctgctgcttctggatacacttccaaactgggagatgtcagagtaattgagcagtgtggcccgcaaataactaattatttttaaaaatttgaaattgatagcaccctcatgagaaactagaaaacaaagtatcgattcccatacccttccccatatctaatgtaaaaagactacttacttacctcatgcgctaacattttatagagttcttctctagttacagaaatcctctctctgtctgtactgtccacaacaactattacaaactaaaataattacaaaaaaattattagtgattatacaatttggtatctgtaaaatttataatgtgtttatttgacatacaggctattaatatcaagaaattggaatcttatggtattgttggaaaatcagagctacctatacattgtgaagccaaaaggtctgatcgattttaatatatttactaatttttaagagaaaagagaatatgatattaacattctaactaatatatataacgcatgtctgttttctaaactagtatcttgaatgctaatggacctatatctatctatttgcactacaaatcaacaagaaaaacatgcaatatgatcctgaatttattacttycaggtagatattatttattaatatcaatctgaacacctaaaagggcacgggtatgggagtaaagtaatgtgacaagataaagaaatcaattaaaaaaaaattcaaccaactgaaagaataaatctctatctaaaaacaagctctcttccttacataagtatcgcctgctacctgcaagcacaaccccttcataaactgatgatgagactggtatcagaaggtgcgatgaaagacttgtgattgttgtgcaggactgagctccaccccagctcttcctcaactccgtgagcacccaaaagcaagagatcagcaggaacagatggagatttaacttacttactttatgataacatttatgatgcccaagttggttctgactgcctattagtaacatgcactatttatttttgggacctagatcttaatttttaaataaattattatgattttctggatcttttcaattattcagacttcatcaaccaaaaggcagatgtatgagagaactgctactttacctctcctctcacttgacagcttactgataggtggctttatcactgtaaggcccattttattccaaggtattttaataaaactgttaattttcaggctgttggcatgaatttgaaacctatagcatatgtatacagtagcatatatacctttataatcatacataacttcccttattaaaaaatgattaaatgcctaatgcagtgttaggaaatcaagttgtcagatacacttaatggtttcttaatgacttaaaagtcagctttatatacttataaaccatgctttattaacttgtaataatgaacactacaaaaacaacggtcagtcttttaattcacaggtctatgcaatgaagcactcaaatgtcaaaggtctgaaatttcctttgggaaataatgtgtaaataaaaagatatgactatgtctaaaatgccttataatcaaaagaaaaacaattatttaatgtgcaattgtgttttgtaaaagaaaatag

SEQ ID NO: 722165 - DNA, 821 bp, Homo sapiens
tcttgagaagatcatctgatttttatttttaattctgtttatgctatgtatcacatttatcgacttgtgtatgttaaaccatttctgcatccctggtatgaaacccatttgaaaatggtggattacctttttgatatgctgttggatttggttagctagtattttcttttttyttttttttaaattacaaaaggaaatttatttcaaaagaataaggggacatttacatttaaacaaggtgataaacaggtgtcttgcaaaagaaaaaaaatccatggcattaagtttttcattcaaattcggaagcaaaaataacctaagttgtgcactattgccttaggaaagggaaggggaagggtgagggataagtgaacagtcaactcagtatcaaacttgagaaaagtaaagtcacttctgctcagttttgagtttacaaatgtgcttataaagaggaaaagtggtaaaattatacttaatcttcaaatttatttagctgtattctcaatacaatttctgtacttgaaatggctttgggccactggctgatctatctctgaggtccagattacctggtcagttttcaaatggcaattttatattcctttgttcagattccaagggagtttaggctcagctcatggtcttttggaatgtttagagattattaccaccactccatagccaagctgaccaacttttgctcacttgtatcattctagcctttcagaaatattttccccatacacatgtgcagtaattctaataaaggagttttgcttcttctgcagtgtagaggtaatggtaatgaagacacctgcatt

SEQ ID NO: 722166 - DNA, 643 bp, Homo sapiens
gtatgtaatttaatctatcacagtttttctttataattcctttgcttttactctcaaaacatttcattaaacgaaggaaagagaaatagtcatgtctacttcaaaaaactcttaaatgtatattttgatgaagactactgatgatttttttctcaactgacttgaagtgatgcctttaaaattagtaaatttctttctatatttgggttkatttgtgaattcctattttgttcaaatgatcattgtgcctattgtgtcagccagtgccacgtcatgtagctttatgatacattttagtaattctcagtgcacaagctccctcatttttcttttccaaaaatatcttgacttttcttagttgttttattattcacatgaactgtaggattatttttctgtcccaggaaagattatctcattggaattcttacttactggtctgtcatttcaaaaactgctctaacatcttccctctcctccccttgttgatctcacccttaggtttttcctgttgtctgctttagtccctcttgctctttggtgctgagactgcctgagaaaggatgagatgatgtggagagagtccattcagcccggccctttttgctccaagtctgcatttccgtgccttcctaattcactc

SEQ ID NO: 722167 - DNA, 638 bp, Homo sapiens
tgtggagtccataagggacattctgacatccaacatgtaccaagttcggcaaagggtgtgtatgagccacctgtgttgtccccattktctgtccttgaaaacagtctctgaagggggagtctgttgatgttcaagtctcctgatgttcacgtcaccctctgtaaggtggtaacttgctgaatattttctctctgcttagtttggagaatagaaagttaattgtcatgtttctgctgcaaaattggtacctgtgacataaaaagaaatgcaaatctagttaccgtctctagggggcaggctgccctagccctgcagcctggtgctgtccagaactagcaggtctctgtagagaagcacacacaccacaccacagaacaaagatggcaccaggatgctgatcacagtgcagttgtcccaattgtattgactatagtaaagatgagaaagttgagatagtttaggttacaatattgaaactctaatttataatgaataaatgcctgaataaaaggagacatcttatttctcaattttggaactaggtatgaaatctctactagtccttgggacctggtccaaagtgcatactaagaagatttctgaggacactggatgaatctttctgaaactttgactta

SEQ ID NO: 722168 - DNA, 586 bp, Homo sapiens
tttccttcctcctgccctgaagcctgtggctctggcttgtccacccagggctgggggccctgcagcagccccctctctcccctcagcttctctgcccccmtcctcagccccctaagctgcctcctgccttcccagtctgagttggctggggagcttgtaaaacagccccaccagcaggcttgtcctgagtggtgctgatgcaggagttggagcagggctgcgaatcttcttggggactctgatgatctgtctggttggagaatcactgcgagccaaggcgtggcattggccaatggtgattcccggtctcctcaggtatgctatgatctccgcctcatgcttgacatgggcaggacgaaggagggaggaaggaggcagggtgcggggaggaatcctctgcctggaggatgcccattgggcttctctatgctcaccaggcttagaggtcctggctcttggccaccttggggcaggtgtgcatcactgatgcagaggaaacgcctcctcctcctctgtcaactcagatcctctgaggccctgctggtgcctccctctgctgggaccctttcagggatcaaggccagga

SEQ ID NO: 722169 - DNA, 586 bp, Homo sapiens
tttccttcctcctgccctgaagcctgtggctctggcttgtccacccagggctgggggccctgcagcagccccctctctcccctcagcttctctgcccccatcctcagccccctaagctgcctcctgccttcccagtctgagttggctggggagcttgtaaaacagccccaccagcaggcttgtcctgagtggtgctgatgcaggagttggagcagggctgcgaatcttcttggggactctgatgatctgtctggttggagaatcactgcragccaaggcgtggcattggccaatggtgattcccggtctcctcaggtatgctatgatctccgcctcatgcttgacatgggcaggacgaaggagggaggaaggaggcagggtgcggggaggaatcctctgcctggaggatgcccattgggcttctctatgctcaccaggcttagaggtcctggctcttggccaccttggggcaggtgtgcatcactgatgcagaggaaacgcctcctcctcctctgtcaactcagatcctctgaggccctgctggtgcctccctctgctgggaccctttcagggatcaaggccagga

SEQ ID NO: 722170 - DNA, 624 bp, Homo sapiens
ttctccctgaatgcactcgttcccaatttgctccactgacactcttgaagcatccctgggatgcacgcactaagacagatggggccgtgctgggggccctgtgaccccactctgatgcccccaactgtgggtcccctccaccatcaacccctggtggtcagggcgatgtgcaggagggatgcgtggagggcccaacaagtgctgacccacatggctgggagttcctcctgcagctgaacactggaggagctctgagaggaggggagaaggtggagccccttgcgtcatcagggttggccgtgtgtgtccctggggctccttggagtctgtggtggccactgagatgagattcagaaacagaaaatagggtcacacagggctgacgtcccatgcaggtgccacrgaaatagaggtctccagacccaaaacccctaagagcatcatagcctgtggtgtggggtgaggggtccccactgggttccttaggagtgcatgtttgctccttgaaccttgaaggctaggcagtgagccaaggccatgcagtccagctgaggaacagatgtccccgagaacccaaacatcccgaagcatttctgggaacctaccaagaaaaagagtctcatt

SEQ ID NO: 722171 - DNA, 1141 bp, Homo sapiens
atccactcaaggtagtagggttgttgtcagggttaaatgagttaataatgggagtgctgcagccactgccgctgattccaaatctcattgccacaccccccgacgactgcctgatgtgcattcctgattccttttggttccaagtccaatgtggcaactctcaaggatcagctgcttcataatcttctaaaggaagaacagaccgcccagaataagattacagttgttggggttggtgctgttggcatggcctgtgccatcaatatcttaatgaaggacttggcagatgaacttgatcttgttgatgtcatcgaagacaaattgaagggagagatgatggatctccaacatggcagccttttccttagaacaccaaagattgtctctggcaaagactataatggaactgcaaactccaaactggtaattatcatggctgggacatgtcagcaagaggaagaaagccgtctcaatttggtccagcgtaacgtgaacatctttaagttcatcattcttaatgttgtaaaatacagcccgaactgcaagttgcttattgtttcaaatccagtggatatcttgacctacgtggcttggaagataagtggttttcccaaaaaccatgttattggaagtggttgcaatctggattcagcccaattccgttacctgatgggggaaaggctgggagttcacccattaagctgtcatgggtgggtccttggggaacatggagattccagtgcacctgtatggagtggaawgaatgttgctggtgtctccctgaagactccgcacccagatttagagactgataaacataaggaacagtggaaagaggttcacaaactggtggttgagagtgcttatgaggtgatcaaactcaaaggctacacatcctgggccattggactctctgtagcagatttggcagaggtacagtgaagaatcttaggcaggtgcacccagttttcaccatgattaagggtctctatggaataaaggatgatgtcgtccttagggttccttgcattttgggacagaatggaatctcagaccttgtgaaagtgactctgactcctgaggaagaggcctgtttgaagaagagtgcagatacactttgggggatccaaaaagagctgca

SEQ ID NO: 722172 - DNA, 1046 bp, Homo sapiens
ctggctaacaattaccaggcattgttctgggtgctgggaacatcaagactgatgttcttgatgaattacagagagtaattcatggtctagttggggcaatagaaacataaaatatcatagasaaatgtaacagtggggaggcctgggaaagcacaagcgttgaggcccacacagagtcatctatggttttgaaagacagagctagttggttagtttaggaaataaagctaaaaacattataaaatcagattatttagagggctttttaacggaatgataatttatacttaattttgtagggacaatgtgattaagtcaagagttgaaagagataatttgtatggtctcctgaatggaggattggcaggagcttaatgaagaggctatttcataaagtaagaaagagatgatacaaatcttaagataggagttggcaatgataatacagagaaagaaatggactgaagaaactgattggttgtgggttagggagaaggaggagtcaataataactgaggactctggcatactgggttgagataatagaaattagagctttctgaggttcatgaataactgctgagtgaatttttgggctgtaggttcagactttgagacattagctcacaaactatggggctgacaatctcatgtagagaatctcatgtagagaaaaaaaagcacagagagcaaatgaaaaggagattgattggagaatcttggtggtggctgaggttagaaaagccaccaagaaagaagatggagacaaatggttagagaggaaggaagatggccaggacagagtatcatcattaaagctacggagaaatgtcatcaggggccctaggggcaaaatggttcaggaggattgtcattaatttgggtgactatgaagtcatttgtatcctacagacagcattttcaatagagtggtggggacaggaaatacagaggatttaggagtgattatgaatggaaatgatgaatgatataaagagatggaggtagttagtatagatttatttttatagatttttggaaacaga

SEQ ID NO: 722173 - DNA, 653 bp, Homo sapiens
agttgttattttattacactaatttaggtcccttttgtgatactgcccgcaattgtctagtaggattttttgcccattttttatgcctgttaacttttatttttcttttattggctggttagatgtaatttgggggaagttatctaattttttctttttaatgtttgccttttttatttttaaaaattcttttagatggagtctctctctgtcacccaggcaggagtgcactggcgccatctcagctcactccaacctccaccttccgggttcaagcgattctcctacctcagyctgctgagcagatgggattacaggcgcctgccaccatgcccggcttatttttgtattttcagtagagacggggattcgctatgttggtcaggctggtctcaaactcctgaccttagtgatccacctgcctcggcctcccaaagtgctctgattacaggcatgaaccaccgcgaccgacctactgtttgtcttttaaagtgatcttgagcatatgttctacaaataatgaaggtgtacaacctcagaaactgtttgctatcagtagctataatcagtcttgtttatatttcatatacttgtatgttttagccaagctagcctttatgggaagcgcagaagtcagaaagaggaagatgagc

SEQ ID NO: 722174 - DNA, 501 bp, Homo sapiens
tcagtctctgaagtgctggaatatctttatcattttttttgtaatcaattcagtatttgaatagggataaaattgatttctgggactagacttctcatgtatgctattagcccctcagcagataagatccaccttaaaatgtccagacttccagctctctccagcaacaaatcaaggtgtcagccagcagctcrggcctgccttgagagtcactgtggggattaagtgagatgaacaccgcagtatggaaccagaggactccccgtgacaactccgactcagggagccttggtgtggctcgcagaggagacaggcagtgccccaagtcatgtgtcgacgagaagccttttccacttctggtccctcgtgtccacttaacatccccctacattaaaacactcggatgcataatcgcctgagtagcctacttaataataatttgttaatatccttcacagtgtcaggagaaggttgtctggagaagttttattgtattttaag

SEQ ID NO: 722175 - DNA, 940 bp, Homo sapiens
atatgtccaaatctttctttcatacatataactttctttcctctctttactaaaacaagatagttagcttggtctgaagagcacttcctttyttcattctgtcacactcttatctcgtgagaaactttacccattaactgataaaaaaaattcagttgttgtatgcatatactctagaaagatttaactcagataaacagtcaaaattgtctaaaagagacagaaacaagttatcaggctatgtttctctttgtggctactgagaagttcatttacaagatagcctttgtcacaacagctataagataacaataagaggcttcggtttcaaaataaaaggaaaccttggcatgattcacagtcttcaacaattagcttaccgtaaaaaatgttagtacaatacttggattgttcaagaccaaggttaaatttcttgtgcttcaaatttcccacgtcagctttctaatttaaatttccactgttttcataacttgcttcaaactaaaaattatacgtataaatttgtattcaattgaatacagtaataatgatgatgtcgttttactaataaattttagctttagaatcgtattgtatgtgcagaaacattgtgaagatagcacatagcatttccattacgccacagtgggtttccctgttattaatatcttacattagtatggtgtatttgttgctattagtgaaccaatatcagcacactattatcaactaaagtccatactttaatcagaccaccttagttgcttacctaatgtctttttttggctccaggatcccatccaggataccacgcttcattgagtggtaatgtctccttagatttcttttggctctgagagtttctcagacttcctttgcttttcatgactttgacaggttttgggtgttgttgccattgttgttttgagacagggtctcg

SEQ ID NO: 722176 - DNA, 940 bp, Homo sapiens
atatgtccaaatctttctttcatacatataactttctttcctctctttactaaaacaagatagttagcttggtctgaagagcacttccttttttcattctgtcacactcttatctcgtgagaaactttacccattaactgataaaaaaaattcagttgttgtatgcatatactctagaaagatttaactcagataaacagtcaaaattgtctaaaagagacagaaacaagttatcaggctatgtttctctttgtggctactgagaagttcatttacaagatagcctttgtcacaacagctataagataacaataagaggcttcrgtttcaaaataaaaggaaaccttggcatgattcacagtcttcaacaattagcttaccgtaaaaaatgttagtacaatacttggattgttcaagaccaaggttaaatttcttgtgcttcaaatttcccacgtcagctttctaatttaaatttccactgttttcataacttgcttcaaactaaaaattatacgtataaatttgtattcaattgaatacagtaataatgatgatgtcgttttactaataaattttagctttagaatcgtattgtatgtgcagaaacattgtgaagatagcacatagcatttccattacgccacagtgggtttccctgttattaatatcttacattagtatggtgtatttgttgctattagtgaaccaatatcagcacactattatcaactaaagtccatactttaatcagaccaccttagttgcttacctaatgtctttttttggctccaggatcccatccaggataccacgcttcattgagtggtaatgtctccttagatttcttttggctctgagagtttctcagacttcctttgcttttcatgactttgacaggttttgggtgttgttgccattgttgttttgagacagggtctcg

SEQ ID NO: 722177 - DNA, 940 bp, Homo sapiens
atatgtccaaatctttctttcatacatataactttctttcctctctttactaaaacaagatagttagcttggtctgaagagcacttccttttttcattctgtcacactcttatctcgtgagaaactttacccattaactgataaaaaaaattcagttgttgtatgcatatactctagaaagatttaactcagataaacagtcaaaattgtctaaaagagacagaaacaagttatcaggctatgtttctctttgtggctactgagaagttcatttacaagatagcctttgtcacaacagctataagataacaataagaggcttcggtttcaaaataaaaggaaaccttggcatgattcacagtcttcaacaattagcttaccgtaaaaaatgttagtacaatacttggattgttcaagaccaaggttaaatttcttgtgcttcaaatttcccacgtcagctttctaatttaaatttccactgttttcataacttgcttcaaaytaaaaattatacgtataaatttgtattcaattgaatacagtaataatgatgatgtcgttttactaataaattttagctttagaatcgtattgtatgtgcagaaacattgtgaagatagcacatagcatttccattacgccacagtgggtttccctgttattaatatcttacattagtatggtgtatttgttgctattagtgaaccaatatcagcacactattatcaactaaagtccatactttaatcagaccaccttagttgcttacctaatgtctttttttggctccaggatcccatccaggataccacgcttcattgagtggtaatgtctccttagatttcttttggctctgagagtttctcagacttcctttgcttttcatgactttgacaggttttgggtgttgttgccattgttgttttgagacagggtctcg

SEQ ID NO: 722178 - DNA, 536 bp, Homo sapiens
ccctgagtcaaatttcttcatcccctccacctgcctgtctatgaaaatgttttgtcttaaagtatattccccctggaggaatgaaacaccttttattgggtgtcaaatgcccctctctggtgtctagcatggcttttgctttgttttctgcctcttccaggcacttaggagggacaggagctgtgtcctctgccatctgccccaccacagaatagggcagggtgggcgtragggtcagagatgctcaggagcttcctgggactcattttggtgacaagaggggagaaagcaactgaccccaggcacttaaaaatgtcccacgcatctctatagctccatgctgtacttttcccctgctggaaccagacaggctggacatctcagtcccaagaggtattccccacagcccaacacaccggctgtggcagattacagtcagagtgcctcttcaggcctgaccttgacccatccctcctcactgggaagggcctccctacaggaactccagcaactccagccaggggctcagagacaga

SEQ ID NO: 722179 - DNA, 654 bp, Homo sapiens
cacggcgagagggtctggaggttgatggcgtgtgggttggggagggagtggctgaagaggggcgagagtgttccgggactggggaatcatctgtcygctgctccctgcacacaagggtttccatgacgccctgacctagtggcctacattccgataggttttgaagtttcaaaagacaatagtaaccacacagcatggagaaaagtgctgggaaaggcaccagagagtgcagagtccagctcaggatacaccggaatctaccatatggtaaagggagctttgcaatcagtgaggaaaagataggttaggcctcaaatcattattttattaaaacaatttttaaaacaaaatatttaactcattccttgcaacagataagctccagataaaatacattttaattttaaaaaaattataaaagtaaaataatacaagctaatttaggtgaatattttaatattattttcacaagcagccaaagtttaaacactgacacatcatcaaagccagaagctataaagaagaatatccatggggtttatctataactttttaaatatcaattttttttctcatggataagattaaggacaaatagccaactgagtttaaaatatctataataggccaggcgcggtggctcatgcctgtaat

SEQ ID NO: 722180 - DNA, 663 bp, Homo sapiens
ctgttctacagatgaagttaaaggaaattaagaaactttcatacagctagtaaaagactgagcccagaattaattcagtcgcctgatgagaaagacctgcctcttagccactctgaaattctgtatctaggaaacatcttcactcttgccacctgccttctacattttttcgtcattccatctataaaccacaaatggagaaaaggcaatgaagcataaagcagaggaaggaaaagggatgtataaatattttcttcaatattatagcaattggtatgtgtgtaacagagtaaaggcaatttgcgtgcctgtccctggtgttctttgccagcaattctgattttgcacaaggcacagagcaggccctgtgatcaaggtcttttctcayacattcatgtatctattatctaggaaccatcccaagtttaatttcattgaaatgctattctgatcacacccagattttacaggtaacgaacctggcttcgctggggccacccctgagagccgaaggtaatgtgggagtcgcctgttagcagctacatcatctcggtaactatgtgctccaccactcgcatctcttgctcccctgtaccccaccccttctcgttccagcagggatggaggagaaaattgcattatatttctcggctccataaacta

SEQ ID NO: 722181 - DNA, 741 bp, Homo sapiens
taattggtaacatctttagattaacatatagtaaaatcaacttttaataatgtgaacatcttctgactctctgaaaacagacacatcctggggccccagctctccatcctgcctgagcatcagtatctcccgggcagctttgtacattccaaatgtccacccctcacccttagagattttgwctcagtggtctgaaacaaagcaattgaaacctagctaggtagcatcctaaactgcctttttcaacagaaggatttcaagtattggatttggccttcaggatcttattctctctcagaaataacaaatttttcatgacttaatcacgactacaagtcatgtaggagaaggagtctgtggtttgtggttttgactttcatgttctgttgttttgtctgtttttaacaccaaatttgaagttactcattctgaggtaagctttcaaaatagtaaatatacaagctatgtaattctatggtgaaataatatcatatctgcaagaaacccaagaagaaattttagatacagagaatgagaaatctgttaagagaattgttgagatttttccctttgtatggcttcaaggtaagaactggcatggctttatatggagtttattacagcctaccacaaacttattaataagaaatagtgttccatatattaggtcatcaaccaaagataagtgcaagatatttctctttttttttttttaacgatggccctaagaataaacattcc

SEQ ID NO: 722182 - DNA, 1977 bp, Homo sapiens
  misc_feature 1339, 1340, 1341, 1342, 1343, 1344, 1345, 1346, 1347, 1348,1349, 1350, 1351, 1352, 1353, 1354, 1355, 1356, 1357, 1358,1359, 1360, 1361, 1362, 1363, 1364, 1365, 1366, 1367, 1368,1369, 1370, 1371, 1372, 1373, 1374, 1375, 1376, 1377: n = A,T,C or G
  misc_feature 1378, 1379, 1380, 1381, 1382, 1383, 1384, 1385, 1386, 1387,1388, 1389, 1390, 1391, 1392, 1393, 1394, 1395, 1396, 1397,1398, 1399, 1400, 1401, 1402, 1403, 1404, 1405, 1406, 1407,1408, 1409, 1410, 1411, 1412, 1413, 1414, 1415, 1416: n = A,T,C or G
  misc_feature 1417, 1418, 1419, 1420, 1421, 1422, 1423, 1424, 1425, 1426,1427, 1428, 1429, 1430, 1431, 1432, 1433, 1434, 1435, 1436,1437, 1438: n = A,T,C or G
tcgcctccgctacttatcatttctatgtgttgagaatattatctcttttacttctggtagattttattcagcatctttaaataataagccatttctaagttaaagtaagaaacaacttgatagctttgtgcttgtgttcttttggaatactatgttaatagtactaggatatcctttgtagaagctagggtaattggtgacttttgaaatattttattagtgcatctcctgatgtcccactcaggtagttttaggggtgagcaaagtttactttacagatccaatctggtgaagtacttgtttttgtaaataaaatcttgttagaacacaagtatgcccattcatttatttattgtctgtgctgcatttttgctagatgtgagtgtttgcaacagaggctctgatttgcacagccccagatatttactatttggtcatttacaaaaatatttaccaactcctgaaggaacaaattgattcttgtgtcttgccccatcactgtaacaaaccccaggaccacagagagtacacatagactatagcagcatttctcatgcttgagaaatgtgaatattcccttggaaggatgcaaagtattctcctcaccaccagtaatgacttaagttacttttattatacagtttcttaaatccaaataaatacatatttaggtatacactccttatagatttagcttgtcccaaaacatatttaaagtattgcacacataaaattaacattaaatggatttaatggtaatgttattttgcacaaactaactgtgtacttgaggcataaaaatggcactacctgatgtgactacagccttttcagtttggtacatggctcctactgcactccatgtgattgagttctctctccatttttctccattcaaatttccatgagacctccttgggacagaaaatgttgaattaattggatttggcttgtttagtgagcacatcatgaatgacgaaagatcatataactgaagttcttaaacaattcatttcaaactgatatgcagtgtgagcactggaatctcatggaagttcttgtttataatgaccacccaggttatttgactttagcacatatgtatgcatatataaatctacatacatatgcacatacatacatttatgtacatgcatacaatattatttagatggagagggaaatttaactgttctcattgggaaattgtaggttacctgtatacattgtcttacctctattctggttacaaaacactgacctagaacaaagatagaaatattttaaaagttaaagaagagcaggttaatgtcaatttaggcatgatgaactaattgcnnnnnnnnnnnnnnnnnnnnnnnnnnnnnnnnnnnnnnnnnnnnnnnnnnnnnnnnnnnnnnnnnnnnnnnnnnnnnnnnnnnnnnnnnnnnnnnnnnnncaaagataatgtacccctgcctttgaatataatattctctataaaataggtatcaatcaggtattcaatcagaatttattaattgcttatggtataaaaataactaaaattttccaaaatcatatawgatggcaagatttaagtctttgatccatcttgagttagtttttgtataagatgagagatagggatccactttcattcttctacatgtgactagccaattttcccagcaccgtttattagagtgtcctttccccagtgtatgtttttgtatgctttgttgaagatcagctggttataattatttggctttatttctgggctctcaattctgttccattggtttatgtgtctatttttatgtaaggagcatgctgtttttgtatctatatagtcttatagtataacttgaagtccagtaatgtgatgtgatacttccatgttcattctttttgcttaggattgccttggctattcaggctctttttggttacatattaattttaggattattttttataattctgtgattaaca

SEQ ID NO: 722183 - DNA, 1977 bp, Homo sapiens
  misc_feature 1339, 1340, 1341, 1342, 1343, 1344, 1345, 1346, 1347, 1348,1349, 1350, 1351, 1352, 1353, 1354, 1355, 1356, 1357, 1358,1359, 1360, 1361, 1362, 1363, 1364, 1365, 1366, 1367, 1368,1369, 1370, 1371, 1372, 1373, 1374, 1375, 1376, 1377: n = A,T,C or G
  misc_feature 1378, 1379, 1380, 1381, 1382, 1383, 1384, 1385, 1386, 1387,1388, 1389, 1390, 1391, 1392, 1393, 1394, 1395, 1396, 1397,1398, 1399, 1400, 1401, 1402, 1403, 1404, 1405, 1406, 1407,1408, 1409, 1410, 1411, 1412, 1413, 1414, 1415, 1416: n = A,T,C or G
  misc_feature 1417, 1418, 1419, 1420, 1421, 1422, 1423, 1424, 1425, 1426,1427, 1428, 1429, 1430, 1431, 1432, 1433, 1434, 1435, 1436,1437, 1438: n = A,T,C or G
tcgcctccgctacttatcatttctatgtgttgagaatattatctcttttacttctggtagattttattcagcatctttaaataataagccatttctaagttaaagtaagaaacaacttgatagctttgtgcttgtgttcttttggaatactatgttaatagtactaggatatcctttgtagaagctagggtaattggtgacttttgaaatattttattagtgcatctcctgatgtcccactcaggtagttttaggggtgagcaaagtttactttacagatccaatctggtgaagtacttgtttttgtaaataaaatcttgttagaacacaagtatgcccattcatttatttattgtctgtgctgcatttttgctagatgtgagtgtttgcaacagaggctctgatttgcacagccccagatatttactatttggtcatttacaaaaatatttaccaactcctgaaggaacaaattgattcttgtgtcttgccccatcactgtaacaaaccccaggaccacagagagtacacatagactatagcagcatttctcatgcttgagaaatgtgaatattcccttggaaggatgcaaagtattctcctcaccaccagtaatgacttaagttacttttattatacagtttcttaaatccaaataaatacatatttaggtatacactccttatagatttagcttgtcccaaaacatatttaaagtattgcacacataaaattaacattaaatggatttaatggtaatgttattttgcacaaactaactgtgtacttgaggcataaaaatggcactacctgatgtgactacagccttttcagtttggtacatggctcctactgcactccatgtgattgagttctctctccatttttctccattcaaatttccatgagacctccttgggacagaaaatgttgaattaattggatttggcttgtttagtgagcacatcatgaatgacgaaagatcatataactgaagttcttaaacaattcatttcaaactgatatgcagtgtgagcactggaatctcatggaagttcttgtttataatgaccacccaggttatttgactttagcacatatgtatgcatatataaatctacatacatatgcacatacatacatttatgtacatgcatacaatattatttagatggagagggaaatttaactgttctcattgggaaattgtaggttacctgtatacattgtcttacctctattctggttacaaaacactgacctagaacaaagatagaaatattttaaaagttaaagaagagcaggttaatgtcaatttaggcatgatgaactaattgcnnnnnnnnnnnnnnnnnnnnnnnnnnnnnnnnnnnnnnnnnnnnnnnnnnnnnnnnnnnnnnnnnnnnnnnnnnnnnnnnnnnnnnnnnnnnnnnnnnnncaaagataatgtacccctgcctttgaatataatattctctataaaataggtatcaatcaggtattcaatcagaatttattaattgcttatggtataaaaataactaaaattttccaaaatcatatatgatggcaagatttaagtctttgatccatcttgagttagtttttgtataagatgagagatagggatccactttcattcttctacatgtgactagccaattttcccagcaccgtttattagagtgtcctttccccagtgtatgtttttgtatgctttgttgaagatcagctggttataattatttggctttatttctgggctctcaattctgttccattggtttatgtgtctatttttatgtaaggagcatgctgtttttgtatctatatagtcttatagtataacttgaagtccagtaatgtgatgtgatrcttccatgttcattctttttgcttaggattgccttggctattcaggctctttttggttacatattaattttaggattattttttataattctgtgattaaca

SEQ ID NO: 722184 - DNA, 592 bp, Homo sapiens
gctaagagagtgcatgtaaaatgttctcatcataaaaatgataactatgttaggtaatgcatatgttaattagccagatttagtcgttccatagtgtatgtatatttcaattttttttttttttttgagacggtcttgctctgtcacccaggctggagtgcagtggtgtgatcttggctcactgcaacctccgactcctggattcaagcgattttagtacctcagccttctgagtagctgggattacaggtgcccaccaccacacttggctaatttttgtatttttagtagagacggggtttccccatgttgcccaggatggtctcgaactcctggcctcaggtgattgacccgcctcagcctcccaaaatgctgagattacatgggtgagccaccacgcctggccataatgtatgtatatttcaaagcaatatgttgcacacagtaaatacatctaatctaattttatctgtcaattaaaaacattttaaaatggtcatactaatttcccagtagaaatatataaatatttctgttttctcacttctaattttcatatgagcagatttgttaagcttggggagaartaaca

SEQ ID NO: 722185 - DNA, 3559 bp, Homo sapiens
  misc_feature 484, 485, 486, 487, 488, 489, 490, 491, 492, 493, 494, 495,496, 497, 498, 499, 500, 501, 502, 503, 504, 505, 506, 507,508, 509, 510, 511, 512, 513, 514, 515, 516, 517, 518, 519,520, 521, 522, 523, 524, 525, 526, 527, 528, 529, 530: n = A,T,C or G
  misc_feature 531, 532, 533, 534, 535, 536, 537, 538, 539, 540, 541, 542,543, 544, 545, 546, 547, 548, 549, 550, 551, 552, 553, 554,555, 556, 557, 558, 559, 560, 561, 562, 563, 564, 565, 566,567, 568, 569, 570, 571, 572, 573, 574, 575, 576, 577: n = A,T,C or G
  misc_feature 578, 579, 580, 581, 582, 583: n = A,T,C or G
tttacctagcccaaaccctctaaaaggcctagagaaagatagcttatatctctttatatgcctcttaggctcttggcgtgtgataggtactatcttgtaccataaatcttggaaaactgattatttaaaacaaaatgtatgcactttatcttgttaaataacatgtcatttgattgcatatttaggaatatattatgcttcttcataaatgataccatagtgttgctagaatactagaagtaaattttttttttttttttttgagaccgagtctcgctctgtagtgcagtggtgcgatctcggctcactgcaatttctgcctcctgggttcaagtgattctcctgcctcagcctcccgagtagctgggactacaggcatgcatcaccacacccagctaatttttgtatttttagtaaagatggggtttcgccatgttggccaggctggtcttgaactcctgacctcaggtgatccgcccacctnnnnnnnnnnnnnnnnnnnnnnnnnnnnnnnnnnnnnnnnnnnnnnnnnnnnnnnnnnnnnnnnnnnnnnnnnnnnnnnnnnnnnnnnnnnnnnnnnnnnctatattgccccagctaatctcaaactcatgggatcaagtgatcctcctgccttggcctcccaaacttgtggaattacaggcgtgagcctttgctaccagccaaaatcaaccttttaaaagaattaaagttgattttattcagaaatctttcaccaaggactatagcctgaggtctactgtccagaagtagccctttggaaagagcctaccagactgctgttggcacagcatttcagtgtattgttagtgtattgattctttgagcattagaaataatttttaatattaatatatgtatattgaatgtatatgcatgaatatttatagaaacatagttgcagtgcttataaaatwcagcctaattaagggtaaagggagattggatacttttacagattgtaaccaatttaatttccttacgtttcttatccttttgccattcctgtcttttgaaaatgtgtgggcccaatacgaggcagtgagccaaataagcagtgtaagtatgtggaaaacctgctttttgttaaagaaagtctacttgaattttgattgaaaaaggtattttcttccaatatagatggttgatcaaatatgtaagtcagggaagcagaaaaaattgtttaaaatgaaccatcacaaggaaagaaaaagaaagtaaaaaaaaaaaaggagttaaaatggagcgagaaagaagtaagaaaactttatattcagaaaaattgtcttgccatttcaagtaatattcttattttactttgctggtgaatatattaaggtaggaaggatttttttagtcttatcagaatattataaatgtgtgtactattttaaataaatagtactttgttgtacatattcttttataacctatctactttagcagcttccattcataacttctctctccctttgactctctgatctagccacagtggatttctaatggtaccttatttgtacatattatcttacacagatctttctacctgggatgtttttccctccattctttcccaagttagcatatatgacaacttcatatgtcaggttacattgccattttctcaaagaaacttttttatcccctctttctagacaaattcgtcatagtatgtagtcttatagcactatctctccttcttagtagctaaagcagatataatgtttcatttttcttagatttaataatgtttttcttcaggaaaaataagctttccgtatgggaatggtcaaaacctttgcttgccatttctgaaatatttattagtgctctattctaattcttctgtgttgtctgcataacaaggatcctgaagcctgaaaattacattttctaaactcccttgcagctgggtattgcaaggattggataggttctgccaatagtagtctctggaaagaagtaagattcctgctgggagggaaaaggcattctgcctctgtttctagcataagccttggtggtagctacaggtgattatgtgcccgaggcagcagcatcagtagtttcagtaatgaaagcaggaaagctcctgcctggtctcatcgccctaattccatcacatgtgtaacagattcctgcattgaatccctcactgccttgcttagattggtttctgatttcctaactggatcctgaccagtaaacctagttcctagtgtgtattatagaaaaataaatatacctatttttcccactcaatatgccatagatactttttatgcaattaaatacaggtctaaatcaatattgattttccaaatccatttaaattactcccttctagctaagctataaaatggaaatacgattcttttaaatcctttctatattagtggaaggtacacttaatgtttaacttcctatttgtttattttgtcaggccttggccacaaatgataaggagttgtaactaggacttttgaattaaatggatttactgagaatgcatatggttctttttaagcttaatttttattaataatttagatttatgaaaactagttaatttgtccacactaataaagtatctttcaagatgtattttaatatattctatgtaaataaaaattattaagaaataaactggtcataaataatagctatatttggtatcctatttgactgatattttccttccttgtgatgttagaaaaaaattatcccagagttctatatagtcctaatgacatttctaaatcttcaagagagtaacataaaagtttcagacttgaagattagtatataattgaacagatcctggttcaccctaactttgagtgattttggaggcagaataatgtatccattgggagaagaatataacaaattaaaattgtcactctctttaaatttaaaatagttataataaagtgaaagccatgaaacattatctttgtgttaaaatcatttgttatatttaaaaaagtgtctcagtatgtacagaaatgaaaacaaaaatgacaggcatttgaactaaacaaagaaatgattaatttccaattgattaatcaaaatgaagttaaagtttcctggaagatttattttgacttacattttttctctagtaaaaaataacatttttatattatgtgttcttgccaaacaatataaacagttgaggcctttagttaaatattttaatgaaagagcctgtttttgtacatctaaagttttatatttgagtagaagtccatgtagtttgtttgaaataatcaagaaaattgaaaaatgattttggtaggatataaacttatgtttaaagtaattattatgtgaacattctgaatttttaaatattattgtttcactctgtggatctttaatttctaagaattattgaaaagctggtttagcttatagtttgtgggatagatattaaaatttgatgtctctagtctgaagaaatttacaacaaacttgcattaacaagttactggacaatatctaaacctaaacgcatcaaggatcttag

SEQ ID NO: 722186 - DNA, 621 bp, Homo sapiens
tgaatgtttctccatctgttccatagatggtagcgtccggcagttacatcctcagttctcctaattttacaaactctcaatcatttaaccatatacaattataagatgacttctcagcccaagactcaatcctataaatcccacaattatcttaaatactatatatctgtatgatacccaaggtttcctgagtttttccagtttttttcttacttctcrtttaatatccatttaaccacaggctgcaccttcatcctgtctgacttcaggaagcttagtacctcctcaagttacaatgtcctcagagggagcttaaattgctgctcattatttattatatggaacttttgctttgctttgattggccaccaaatcatggcttctcttttgtctgaggcctttcagttcatgcatgacatttatcctgccttttgctgggagtgccctgccaactgtccttctacccagacatggtcagtcgtaatgtgctggggtccactcatcctttttatgttctttttttattgccccttagagaaagtggaaaatctcctagtatcaaaatatctgttaggggcaacatatcttttcttcaatatatgaaaaagtcttttgctttat

SEQ ID NO: 722187 - DNA, 2459 bp, Homo sapiens
  misc_feature 777, 778, 779, 780, 781, 782, 783, 784, 785, 786, 787, 788,789, 790, 791, 792, 793, 794, 795, 796, 797, 798, 799, 800,801, 802, 803, 804, 805, 806, 807, 808, 809, 810, 811, 812,813, 814, 815, 816, 817, 818, 819, 820, 821, 822, 823: n = A,T,C or G
  misc_feature 824, 825, 826, 827, 828, 829, 830, 831, 832, 833, 834, 835,836, 837, 838, 839, 840, 841, 842, 843, 844, 845, 846, 847,848, 849, 850, 851, 852, 853, 854, 855, 856, 857, 858, 859,860, 861, 862, 863, 864, 865, 866, 867, 868, 869, 870: n = A,T,C or G
  misc_feature 871, 872, 873, 874, 875, 876: n = A,T,C or G
ttcaacaagacgtctctaaggaaatactatgtggacatgtgttcaggaagcagtattcagtggtaatggcagaaattcattctgcagtaaatgtttaaaacggttgacagttttaatatgttttacctaaagatacagtcattttactgaagattacttacaccgtgggaaataaaaaatgttcttagtagactgaaaaatctatgtccccaaatctcagaggaatcaatgagcattttattcagcctgcaatgagcagttgtgtgaaagaattccaggacttgcagagcaaattaaacattaatacaaattcccatcatgtcactttgtgtgtgtgtctgtgtgtgtgtgtgtgtgtgtgtatgtgtatctatatatatatatgtaagtttgacctgattttcttgatagtgggtgaatgtgcaacatttggaagaataaacttaaactgttaatttgatgagttactatgaatataaaaaagaacaaaaaccaatcaaatttatggcatgatatttctcttcttttaagacagttgaatcacacctataaaatattatctgatgtgtaagctacatttttagaaaggtggtgactgtagacacagtgttctaaaacataaaattatgtggcacttcattgagtgtttaccttttcaagggtcagcggtaacattttcattgatccttaatgaacacattgattttcctaattaatcaggcatattcttaaatatcttggatacaaattcactaaatttttttctttctatcattnnnnnnnnnnnnnnnnnnnnnnnnnnnnnnnnnnnnnnnnnnnnnnnnnnnnnnnnnnnnnnnnnnnnnnnnnnnnnnnnnnnnnnnnnnnnnnnnnnnnatgtgtatatatgtataccatatatatgtatatatgtataccatatatatgtatatatgtataccatatatatgtatgtatgtataccatatatatgtatgtatatgtataccatatatatgtatgtatatgtataccatatatatgtatgtatatgtataccatatrtatgtatgtatatgtataccatatatatgtatgtatatgtataccatatatatgtatgtatatgtataccatatatatgtatgtatatgtataccatatatatgtatgtatatgtataccatatatatgtatgtatatgtataccatatatatggtatacatatatatacacacacatgcatacacacacatatatattaaatatatatgaatatatatgtttttcagcatctgtgtcattacattataataggttgtccgtacatctgtgtcccctattaatcagcaagcttcattaggaaagtgattggatcccctgatttctattccttatatctaatacactactggactacaatacagactttaaattgattggttgagtgagggaatggatgaatacccagcatttttcttcctcaatgtatggaaagaaataaaagcattactttttgaatattaaaatatgccagtacccgaatttaagactttatttaccatataccatgtattctcccatatatttcctagaaaaaaagaaaaattattaattccacgtaactaatgtggaagccaaggcttaaaatcattaatatatccaaagattatacgaatagtaaatagtgaagatgaaatttgaatgaagataccttgcactgcataacctatgttagtaggggcagataacctgaaatacggatgttggcaaaggaaaaagcctgactcagattgggaattttcagacaaatctcagactctaagctaccaaaaaccatcaagaagaacattccagacctaataactcttatcttgtatattttagaccagagctgagcttggaacgttgctttcatgtagattttgtcattctaatcttggccatactgtattacttcacatggcataaacaagttttaagttttctctctctgttcaaaattcacaaactgccaacttccacttttgaattcataatatataatgagccagagcagtccagataagagattggaggggcaaagaggaaggagaagatggggaaaatatataataacaatataatttcatgctgtttcatgctttcttgctatatttttgtgttataaatttctaaatttgtaacaggtgagctaacactagcaattgataaaacacaatccatttaataaaaagaggttaaataaaatgtaatatgaaaacaagtgcacacatgtgagccatatattactttattccagctatttccttgtataccatgccaataagaataaataaaagaaaatttggcctccaaatatgttatgtacttgctgtttttatttatttattttatatgggttatagcctatgagaagttctgaagagctaacaataaccttcttcatacaaactgggttttcactcaatgaaaaata

SEQ ID NO: 722188 - DNA, 2459 bp, Homo sapiens
  misc_feature 777, 778, 779, 780, 781, 782, 783, 784, 785, 786, 787, 788,789, 790, 791, 792, 793, 794, 795, 796, 797, 798, 799, 800,801, 802, 803, 804, 805, 806, 807, 808, 809, 810, 811, 812,813, 814, 815, 816, 817, 818, 819, 820, 821, 822, 823: n = A,T,C or G
  misc_feature 824, 825, 826, 827, 828, 829, 830, 831, 832, 833, 834, 835,836, 837, 838, 839, 840, 841, 842, 843, 844, 845, 846, 847,848, 849, 850, 851, 852, 853, 854, 855, 856, 857, 858, 859,860, 861, 862, 863, 864, 865, 866, 867, 868, 869, 870: n = A,T,C or G
  misc_feature 871, 872, 873, 874, 875, 876: n = A,T,C or G
ttcaacaagacgtctctaaggaaatactatgtggacatgtgttcaggaagcagtattcagtggtaatggcagaaattcattctgcagtaaatgtttaaaacggttgacagttttaatatgttttacctaaagatacagtcattttactgaagattacttacaccgtgggaaataaaaaatgttcttagtagactgaaaaatctatgtccccaaatctcagaggaatcaatgagcattttattcagcctgcaatgagcagttgtgtgaaagaattccaggacttgcagagcaaattaaacattaatacaaattcccatcatgtcactttgtgtgtgtgtctgtgtgtgtgtgtgtgtgtgtgtatgtgtatctatatatatatatgtaagtttgacctgattttcttgatagtgggtgaatgtgcaacatttggaagaataaacttaaactgttaatttgatgagttactatgaatataaaaaagaacaaaaaccaatcaaatttatggcatgatatttctcttcttttaagacagttgaatcacacctataaaatattatctgatgtgtaagctacatttttagaaaggtggtgactgtagacacagtgttctaaaacataaaattatgtggcacttcattgagtgtttaccttttcaagggtcagcggtaacattttcattgatccttaatgaacacattgattttcctaattaatcaggcatattcttaaatatcttggatacaaattcactaaatttttttctttctatcattnnnnnnnnnnnnnnnnnnnnnnnnnnnnnnnnnnnnnnnnnnnnnnnnnnnnnnnnnnnnnnnnnnnnnnnnnnnnnnnnnnnnnnnnnnnnnnnnnnnnatgtgtatatatgtataccatatatatgtatatatgtataccatatatatgtatatatgtataccatatatatgtatgtatgtataccatatatatgtatgtatatgtataccatatatatgtatgtatatgtataccatatatatgtatgtatatgtataccatatatatgtatgtatatgtataccatatatatgtatgtatatgtataccatatatatgtatgtatatgtataccatatatatgtatgtatatgtataccatatatatgtatgtatatgtataccatatatatgtatgtatatgtataccatatatatggtatacatatatatacacacacatgcatacacacacatatatattaaatatatatgaatatatatgtttttcagcatctgtgtcattacattataataggttgtccgtacatctgtgtcccctattaatcagcaagcttcattaggaaagtgattggatcccctgatttctattccttatatctaatacactactggactacaatacagactttaaattgattggttgagtgagggaatggatgaatacccagcatttttcttcctcaatgtatggaaagaaataaaagcwttactttttgaatattaaaatatgccagtacccgaatttaagactttatttaccatataccatgtattctcccatatatttcctagaaaaaaagaaaaattattaattccacgtaactaatgtggaagccaaggcttaaaatcattaatatatccaaagattatacgaatagtaaatagtgaagatgaaatttgaatgaagataccttgcactgcataacctatgttagtaggggcagataacctgaaatacggatgttggcaaaggaaaaagcctgactcagattgggaattttcagacaaatctcagactctaagctaccaaaaaccatcaagaagaacattccagacctaataactcttatcttgtatattttagaccagagctgagcttggaacgttgctttcatgtagattttgtcattctaatcttggccatactgtattacttcacatggcataaacaagttttaagttttctctctctgttcaaaattcacaaactgccaacttccacttttgaattcataatatataatgagccagagcagtccagataagagattggaggggcaaagaggaaggagaagatggggaaaatatataataacaatataatttcatgctgtttcatgctttcttgctatatttttgtgttataaatttctaaatttgtaacaggtgagctaacactagcaattgataaaacacaatccatttaataaaaagaggttaaataaaatgtaatatgaaaacaagtgcacacatgtgagccatatattactttattccagctatttccttgtataccatgccaataagaataaataaaagaaaatttggcctccaaatatgttatgtacttgctgtttttatttatttattttatatgggttatagcctatgagaagttctgaagagctaacaataaccttcttcatacaaactgggttttcactcaatgaaaaata

SEQ ID NO: 722189 - DNA, 2459 bp, Homo sapiens
  misc_feature 777, 778, 779, 780, 781, 782, 783, 784, 785, 786, 787, 788,789, 790, 791, 792, 793, 794, 795, 796, 797, 798, 799, 800,801, 802, 803, 804, 805, 806, 807, 808, 809, 810, 811, 812,813, 814, 815, 816, 817, 818, 819, 820, 821, 822, 823: n = A,T,C or G
  misc_feature 824, 825, 826, 827, 828, 829, 830, 831, 832, 833, 834, 835,836, 837, 838, 839, 840, 841, 842, 843, 844, 845, 846, 847,848, 849, 850, 851, 852, 853, 854, 855, 856, 857, 858, 859,860, 861, 862, 863, 864, 865, 866, 867, 868, 869, 870: n = A,T,C or G
  misc_feature 871, 872, 873, 874, 875, 876: n = A,T,C or G
ttcaacaagacgtctctaaggaaatactatgtggacatgtgttcaggaagcagtattcagtggtaatggcagaaattcattctgcagtaaatgtttaaaacggttgacagttttaatatgttttacctaaagatacagtcattttactgaagattacttacaccgtgggaaataaaaaatgttcttagtagactgaaaaatctatgtccccaaatctcagaggaatcaatgagcattttattcagcctgcaatgagcagttgtgtgaaagaattccaggacttgcagagcaaattaaacattaatacaaattcccatcatgtcactttgtgtgtgtgtctgtgtgtgtgtgtgtgtgtgtgtatgtgtatctatatatatatatgtaagtttgacctgattttcttgatagtgggtgaatgtgcaacatttggaagaataaacttaaactgttaatttgatgagttactatgaatataaaaaagaacaaaaaccaatcaaatttatggcatgatatttctcttcttttaagacagttgaatcacacctataaaatattatctgatgtgtaagctacatttttagaaaggtggtgactgtagacacagtgttctaaaacataaaattatgtggcacttcattgagtgtttaccttttcaagggtcagcggtaacattttcattgatccttaatgaacacattgattttcctaattaatcaggcatattcttaaatatcttggatacaaattcactaaatttttttctttctatcattnnnnnnnnnnnnnnnnnnnnnnnnnnnnnnnnnnnnnnnnnnnnnnnnnnnnnnnnnnnnnnnnnnnnnnnnnnnnnnnnnnnnnnnnnnnnnnnnnnnnatgtgtatatatgtataccatatatatgtatatatgtataccatatatatgtatatatgtataccatatatatgtatgtatgtataccatatatatgtatgtatatgtataccatatatatgtatgtatatgtataccatatatatgtatgtatatgtataccatatatatgtatgtatatgtataccatatatatgtatgtatatgtataccatatatatgtatgtatatgtataccatatatatgtatgtatatgtataccatatatatgtatgtatatgtataccatatatatgtatgtatatgtataccatatatatggtatacatatatatacacacacatgcatacacacacatatatattaaatatatatgaatatatatgtttttcagcatctgtgtcattacattataataggttgtccgtacatctgtgtcccctattaatcagcaagcttcattaggaaagtgattggatcccctgatttctattccttatatctaatacactactggactacaatacagactttaaattgattggttgagtgagggaatggatgaatacccagcatttttcttcctcaatgtatggaaagaaataaaagcattactttttgaatattaaaatatgccagyacccgaatttaagactttatttaccatataccatgtattctcccatatatttcctagaaaaaaagaaaaattattaattccacgtaactaatgtggaagccaaggcttaaaatcattaatatatccaaagattatacgaatagtaaatagtgaagatgaaatttgaatgaagataccttgcactgcataacctatgttagtaggggcagataacctgaaatacggatgttggcaaaggaaaaagcctgactcagattgggaattttcagacaaatctcagactctaagctaccaaaaaccatcaagaagaacattccagacctaataactcttatcttgtatattttagaccagagctgagcttggaacgttgctttcatgtagattttgtcattctaatcttggccatactgtattacttcacatggcataaacaagttttaagttttctctctctgttcaaaattcacaaactgccaacttccacttttgaattcataatatataatgagccagagcagtccagataagagattggaggggcaaagaggaaggagaagatggggaaaatatataataacaatataatttcatgctgtttcatgctttcttgctatatttttgtgttataaatttctaaatttgtaacaggtgagctaacactagcaattgataaaacacaatccatttaataaaaagaggttaaataaaatgtaatatgaaaacaagtgcacacatgtgagccatatattactttattccagctatttccttgtataccatgccaataagaataaataaaagaaaatttggcctccaaatatgttatgtacttgctgtttttatttatttattttatatgggttatagcctatgagaagttctgaagagctaacaataaccttcttcatacaaactgggttttcactcaatgaaaaata

SEQ ID NO: 722190 - DNA, 602 bp, Homo sapiens
aggtcaggagttcaagaccagcctggccaacatggtgaaacccagtctctactaaaagtacaaaaattagacgggcatggtagcacacacctataatcccagctacttgggaggctgaggcaggagaatttcttgaatctgggagacggagctttcagtgagccaagattgtgtcattgcactccagcctggcggagagagtgagcctctgtctcaaaaaaaaaaaataataataataataataataataatgtacacatagccacagactycaaggcagttgggaaacgtaagaagaatctaaaaattcccctggaaggaatagcaatgggtgttgaagaaccttttgggacctccaccccatcagatgatacatctgcaccaggaggccttgggggctttgaaagcaagggggcttatttctcttaaggagatttttctcaagtcttttcaattgcacagttacctaagcatagtaagttatattatttacatgcttataaaaatatatctttaaaatgagtccattggcatgtttctgtcaattattttcaccatgttacactacaacaaccgtgattttttttttttttttttttttt

SEQ ID NO: 722191 - DNA, 602 bp, Homo sapiens
aggtcaggagttcaagaccagcctggccaacatggtgaaacccagtctctactaaaagtacaaaaattagacgggcatggtagcacacacctataatcccagctacttgggaggctgaggcaggagaatttcttgaatctgggagacggagctttcagtgagccaagattgtgtcattgcactccagcctggcggagagagtgagcctctgtctcaaaaaaaaaaaataataataataataataataataatgtacacatagccacagactccaaggcagttgggaaacgtaagaagaatctaaaaattcccctggaaggaatagcaatgggtgttgaagaaccttttgggacctccaccccatcagatgatacatctgcaccaggaggccttgggggctttgaaagcaagggggcttatttctcttaaggagatttttctcaagtcttttcaattgcacagttacctaagcatagtaagttatattatttacatgcttataaaaatatatctttaaaatgagtccattggcatgtttctgtcaattattttcaccatgttacactacaacaaccgtgatttttwttttttttttttttttt

SEQ ID NO: 722192 - DNA, 602 bp, Homo sapiens
aggtcaggagttcaagaccagcctggccaacatggtgaaacccagtctctactaaaagtacaaaaattagacgggcatggtagcacacacctataatcccagctacttgggaggctgaggcaggagaatttcttgaatctgggagacggagctttcagtgagccaagattgtgtcattgcactccagcctggcggagagagtgagcctctgtctcaaaaaaaaaaaataataataataataataataataatgtacacatagccacagactccaaggcagttgggaaacgtaagaagaatctaaaaattcccctggaaggaatagcaatgggtgttgaagaaccttttgggacctccaccccatcagatgatacatctgcaccaggaggccttgggggctttgaaagcaagggggcttatttctcttaaggagatttttctcaagtcttttcaattgcacagttacctaagcatagtaagttatattatttacatgcttataaaaatatatctttaaaatgagtccattggcatgtttctgtcaattattttcaccatgttacactacaacaaccgtgattttttttttttwtttttttttt

SEQ ID NO: 722193 - DNA, 1124 bp, Homo sapiens
aaatggaatggaatagaacaatataagaacatgtcccacttagtaagggtaaagcggcagtcatgttttaattacacatataggtatgtctgtactagatcatattgtaaaaatgtaattcttactctggattgagatgaaaattttacggaagttgcagatctaatgggatggctaaatcagtgtctatccatttttctacacttaacaataacatttaagaatctggaggattgaacactggaaaataccagggaatctacagtaaaatttagctatgtggctaaaagttattcagacaaaattagggaaaattaattcaagccagcttacataaaatcgctggaaacctaaatagtacttaaagaatgtaggtatgacagcacactgccagggcccaaactgtgtcactggttggctgygtgatcaaaagctccgcaacttagcatctccaaacctagggttcctcgtctgttaaatggggataaaagtagagttactagaagaattaaatgaattattataatggattgttagaaataaattattgagattgggtgcagtgactcacacctgtcatctcaacactctgggaggctgaggcaaaaagattgctttaggccaggagttaagaccaggctaggcaacatagccaaaccccatctccacaaaaataaaaagtaagaaattagcctggtatggtggcttgtacctatagttctaatgactccggaggctaagatgggaggagcccttgagtccaggagtctgaggatgcagtgagctatgactgtgccactgcacttcagcctgagtgacaaagtaacactctgtctcaaaaaaaaaaagaaagaaagaaaaagaaaagaacaaagagaggaggaaatgaattacacagcactcagcacgagtgcctagcacaaagtaagcacttttagctgctattttatttgccattgaaattggtagttattattgttgcttataacaggcaaaaatatattgttgtctaaataaccttatctcacaaaataatactcagtacaccaagaagaccaaatagccaccttccccagtttagccatccagcctattaaattcccagtgacttcaaacaccaaatc

SEQ ID NO: 722194 - DNA, 629 bp, Homo sapiens
gctgcttttgaaaaataaacataaaagttaccaatctgtatgactgacttttgcaacactttctcattgaaaacacatattctacaaaaaaaacattatttttgtaaccttatcatttgggactcactttatctagcagatctaagtacttatacrtttttacgtatgttcccatctataaattatctgttatattttcaatgacattttcttcttctaataaaagcatgctcaattttaactatttgtcttaacttattttggagattcaaggtacatttggttgttgtttttattattttattttattttactttaatttctgggatacatatgcagaatttgcaggtttgttacataggtatacatgtgccatggtggtttgctgcccctatcaaaccgtcatctaggttttaatctgcatgcattaggtatcagtcctaatgctctcctttccctttccccccacgccccaacaggccccactgtgtgttgttcccctccctgtgtcaatgtgttctcgttgatcaactctcacttatgagtgagaacatgcagtgtttggttttttgttcctgtgttagtttgatgaggatggtggtttccatgttcctacaaaggatatgatc

SEQ ID NO: 722195 - DNA, 629 bp, Homo sapiens
gctgcttttgaaaaataaacataaaagttaccaatctgtatgactgacttttgcaacactttctcattgaaaacacatattctacaaaaaaaacattatttttgtaaccttatcatttgggactcactttatctagcagatctaagtacttatacgtttttacgtatgttcccatctataaattatctgttatattttcaatgacattttcttcttctaataaaagcatgctcaattttaactatttgtcttaacttattttggagattcaaggtacatttggttgttgtttttattattttattttaytttactttaatttctgggatacatatgcagaatttgcaggtttgttacataggtatacatgtgccatggtggtttgctgcccctatcaaaccgtcatctaggttttaatctgcatgcattaggtatcagtcctaatgctctcctttccctttccccccacgccccaacaggccccactgtgtgttgttcccctccctgtgtcaatgtgttctcgttgatcaactctcacttatgagtgagaacatgcagtgtttggttttttgttcctgtgttagtttgatgaggatggtggtttccatgttcctacaaaggatatgatc

SEQ ID NO: 722196 - DNA, 629 bp, Homo sapiens
gctgcttttgaaaaataaacataaaagttaccaatctgtatgactgacttttgcaacactttctcattgaaaacacatattctacaaaaaaaacattatttttgtaaccttatcatttgggactcactttatctagcagatctaagtacttatacgtttttacgtatgttcccatctataaattatctgttatattttcaatgacattttcttcttctaataaaagcatgctcaattttaactatttgtcttaacttattttggagattcaaggtacatttggttgttgtttttattattttattttattttactttaatttctgggatacatatgcagaatttgcaggtttgttacataggtatacatgtgccatggtggtttgctgcccctatcaaaccgtcatctaggttttaatctgcatgcattaggtatcagtcctaatgctctcctttccctttccccccacgccccaacaggccccactgtgtgttgttcccctccctgtgtcaatgtgttctcgttgatcaactctcacttatgagtgagaacatgcagtgtttggttttytgttcctgtgttagtttgatgaggatggtggtttccatgttcctacaaaggatatgatc

SEQ ID NO: 722197 - DNA, 655 bp, Homo sapiens
tacatgtatatttacctgaccaatttgttttactctgtattttaagttatcaggtgaaatggttttggaataaattaatgagttgtttgttctgaataaatgtgcatgttacaaatgcaaacacgtgtatgtattatacaactatgcagcttcaagagctgacttatttctatcagctttttattcacttaaaaaaatcaggctactgaagcatattagaatttaattacaccaattagtactgccacatcagacatatgatgtgccttcaattaagaagtacctaatgggtattagtacaatttagcttcataattaaagttctaagaacagcacaaattaaacattatgattacaaaacattaaaaatctactggtgaaattaaagctgaatatttaacttctccttttgagctgattttaaaaaagaaaatcaggattatataaaatgcaatgttattattgaagcattctgaatttaaaaacagaaattaagctcacatgcccataaatatgtgcatatataatgattaaatatttagtaaaatacccaacctaacacttgtgtcatctaataagcattaaaggttatcattttggagtttcacttgattgggctttgttttgttttgtttyttttcatagaaatatttga

SEQ ID NO: 722198 - DNA, 925 bp, Homo sapiens
ttagatagaagttaatggcttttttcccttcgattgaggtctagtatcaccttttccagaaaacatgatttcatttctcaagatggcataatgtactgatttttctatttgcctataaattcctataattttatacatattattacctttatcttatttacagtatgacaatttttttttctgcttcccttatacgtagtatattgctctaccaatagttcttgaaatatttgctgctgttaaacagaagaacccatcaaagaaaaatatctctagggcaagtaagatctgcaacagaaaaaataaatgggacttggataaaaacagactttggatgaaaaaaacataaatctaaatttttaaaaaattaacaataacatcaacaattatctaattattgcccaatgtaaaattcagaaaattgacacacttttccaaataaaccctgaaatgcagttgtgaacactgggtcactgtaatgaaataatatgtgcatcttttctatgattaatttctctcctttcagagatgctctaatgtattttctgctgaagtaaataaaacactttacttttaattatgccccatgagagagaacatctcttctaattaagtttacaaaactaggtaatcttatttatctaggaggtatagcaactatgcatatagcttaactgtagaagcataatcaaagcttytaattttatcaagtgatgttaaatttggaatacaaatgtatgtgttaactggaaggtggatgaagataaaattttaatattaacataatactaagaaatacctatatgtattttaaataccttttcaaaagttaagtgtttgcagttgtgatcatttaattatgagtgtgttggcttccttacacaaatcatgaatactcttccagaaaacaagccaattccaggga

SEQ ID NO: 722199 - DNA, 624 bp, Homo sapiens
cctcagaagctgtcaagggaaaatacttcttatctatgtggtcttcttcctcttcatcgggcggtggctttgctggaggtggtggacgttccctctgcagaagagaaaaaaataaatattttgcgatctcttttttaagtatctaattttttggtttgccctcatcttagcccttagaaatgaaaaaaataatgtatggaactcccctgagagactaaagtcaaggtttcgtctctgaacagatggagaactctgtgcatacatacacaattcaattagcatgctctayggtttttgatgtctgtagcagagatcataaacacctctttcatatcctagaccacagtgagaaatgccagtactgagaacacataactgccttgttagaaaatttccttcataatactgatacataaaactttaccttaggaaaatcagtggttcacttttcagtctactctagaaagaagaaacactggatcaaaagaaatcaacctgtgaaatttgttctaacaaatcaaagttactgaggaagtaatgaggaaagtaatcaaggacaaaaatgttaattcctgttgaaatgttaacgctctgatactggtctactcccatttattagcaaaa

SEQ ID NO: 722200 - DNA, 591 bp, Homo sapiens
tacctcaagagctaagggaacaaaaagaagttggaatgatcaaaactcagaagtctgaagatggccccagggctggggttgttctttgcggaggagacactgctcagagcctggggtctgggagctggatgcagaactcgggaggggacatggccagctcgtgctggtgtctctgaatgggcatcatcaggctggttatgggagtgctgggaaaatgacaagctggaaccaactgctgctactgacaccacctgtcattctcagagtggagacctgttgctagaacgctgacaggaacccaggagcacaggaaggagcccatcgtgaccctgcacyacagagcaggggcgggggtgggggtggggggcagggggatgtaaaagctgaggaccatcccagcacacttgctttggagttacgtagagctccgttaggattcagtcagttttggaatggttaggggtgatttcattttttcactacatgtgggatctggcagaatcttcagtctcctggtcttgtttctggaatggagtgggtcacgaacacctcacaggagtctctcccaggagacttgagaggatcacttta

SEQ ID NO: 722201 - DNA, 584 bp, Homo sapiens
aaagcagaaaaaatagtatatatggtataattatacctatgttgaaagtacgcattgaaaataaaaagtagaaggaattagagtaactgttagcaatggttagtggaactataggtaatttttctttttcttctctttttacatttaaaaagaaacttgagctcaaagctgcttccctctagcttccaccccatggtataaaattggttaattccagtcaacaaacaaggggagcacacaggaagggcaacttaactagcctggaagtgcagggtcattcatctgctatcaccctcctccccccttgtcttcccttcatcacagaacatggcgtgggaactcctcagcactctgtcacctcctctcatttctctagcccttgggtcgcaacagagttgaaaaagagatctttgcttcataaacaataaggtgaaaagtaaaattctgagaaaatatcaagaaactcagaatacctaaaactcacakatggcagcgtatggcagggagggtctcatgtcaggggacagtttttgtgactgtgaagtccaaggagtgagtaggtgggtgtaagtggatggctaagg

SEQ ID NO: 722202 - DNA, 851 bp, Homo sapiens
agttggttgtctcttatcaggaaggaaggctggtcggttgtgtcaaaaccactaaacggagggacagcgtcaggcagttggttgaaagcagtgatggtytttggaaaaggctggtgtctgcttatcctttaggaaagaaaacttaatggcagtgagccagggagggattataatgaggcattacagacctcacatcctatcattgcccagaactcagcttccaaggtttctctggggtccccttggccaaggtgggggtcagttctgttggttggggggctgagaattttactttcatttctcaaaatgaattaagctcaataagcacttaacatatagaaagtgccttcaaaatggtatcatttattattagtatcattattgttgctgctcttattttcctaggtcacatagccagtttcaaggtatctcacaatacttatattcaacaaatatttattaggcacctacttgttccaaacactgttctgtgcactggggatatattaacaaacaaaaacaacagattcctgcccttggagagcttccattttagtaaggagagacagatcaattataaacctgataactaagagaaattttcagtaaatcagaagatgactatcacaatggagaaaaggataactatgagggtggagagacaggaaactaaacactggggaccctgagtgaggggtagggcagagaatacaaaatagagtagacttcattgagagggtgacatttgagttaaatgtagacctgaagaaggggaagtaggtagtcatgaagatatttgagggaagaggattctaggcaagagaaagagttagtgcaagggccttaaggtg

SEQ ID NO: 722203 - DNA, 1530 bp, Homo sapiens
ttaaattgagataaacaccctcatagtatttcttttttaaatgcattcttgctttgggactctagatggctttgcataatcaatgtaaataggaaccttggtgtgaagataatataattcttaattatctcttcatttttctgtttgaaaactttcttctgtaagcaccactggttagagaagaaaggactgttttggtttattcagggttggataaaaatattagactcataattcttgattgggctttgattttcctttcagaaatggatataaattattaggaaaatgctgaagtgactgaatgcactctttctgtgccatctagaatgtgtgtgtattattgcttggaaacttgatgctttcagtctgatggaaacagctcttccagtctatagtttaattgtggataagcaaaactctgctttttttctagagaaatttcacagataagacatagtaatacagaatatctccagtactaggaatgtgtaagattctgtttaagcatctggagtctgaagaaaatatctaaatggaaataaattctttatcattatatttgttcttcagcatttccaagtaccaaaatgtacttggggatagcagctttgcttaaaagcttttcactgtttcattgaatttgggaagggcctgaaagctttcagaaagataattttcttataaatagtgtacaagtgagcaagttgctctttagtgagcatttttaatggtttctgaggctggccaaaaaactctatatctttaccctatgcagccctagaagctgtagcagccttaccttaagttcttttcttagtaaagcagaaaatgagcagttcccaccctgtgtaaagctgagaagatcttgaatgatgcatgttgaggaaacttggatactgatactgctggcartttacatagaccccagtgccaaagaattaaagagtcttgagttttcttaaaagaggccagcttttaaaaagttaagtatgttttctttttgcagtgacctgagctcttaaacctaagtagagaattaagacttgctcagctttgtgaagcagtcaacttacttgtacgcaccatagaatactcttgttagagaagtgaacacattatgaccaattaaccatggaaagtgagtgccctgggaaaattttacatagttaaaacaaaacacatagctttcttaggaactggaattgcctttcctctattatacctggagtccaacaaaggctatgcctttgtgccagtccttttacaatgaatcaaccaattgctcaattgtattcttgtggaggaggaggataacattcttttatgatcccagtttagatcagtttaccacccaaagcatgatatttgattacccttattaggtttctttgcatagctacaaatgttactaatggtttggccttgtctagccattaaaaaaaagtctgcctctgtgatgacttaacagtcagtgctgtaaaaggcactattgcttggaactctggaaatacgagctcaaagagaata

SEQ ID NO: 722204 - DNA, 1821 bp, Homo sapiens
  misc_feature 882, 883, 884, 885, 886, 887, 888, 889, 890, 891, 892, 893,894, 895, 896, 897, 898, 899, 900, 901, 902, 903, 904, 905,906, 907, 908, 909, 910, 911, 912, 913, 914, 915, 916, 917,918, 919, 920, 921, 922, 923, 924, 925, 926, 927, 928: n = A,T,C or G
  misc_feature 929, 930, 931, 932, 933, 934, 935, 936, 937, 938, 939, 940,941, 942, 943, 944, 945, 946, 947, 948, 949, 950, 951, 952,953, 954, 955, 956, 957, 958, 959, 960, 961, 962, 963, 964,965, 966, 967, 968, 969, 970, 971, 972, 973, 974, 975: n = A,T,C or G
  misc_feature 976, 977, 978, 979, 980, 981: n = A,T,C or G
tttactctctgtyttcattaccatgatcttattcttccaggagtcttgaccctaggcaaaaggtctgatttttcactgcaggcgctacctaaaagacccattaactcttcaaataaaacatcaatgacagtttatactctaagattctttgacctcctcaccttaaaatcctccccttgctattgccaccaatcttgggctgctgtattgagaatcttgcccaatcttgccctcttgccccctctcatattgaaagacctgccctaaaccacaattccaattctcagatgctgccctcactttcccagcaccaagacactaacaaagctttgcaagtattttctcttactgcattaaacagttaactcagctttgtcttatcaacgggttgtgttggtcatacaggagaaaaaccgcttttgatgttaattttatcaaagatgtttgctttacaagcatatcaaatgtcttaaagtaatttggctttaaaaatgggtagaaaataaggagttgcaacatgtttctttcaagtaaatggtagtttctacttgataaatacaacattattgccctaccagttagtagggaatggaacggccacactaagctacttctaaacatcttaagaacaagaagtaacaggagaaccccatggagaagttgctatacaattcttaccatggacaactgccctgaatgcccagccttcctgaagactcgtgttgatgcggaaagatagggagagtagggaaccacaaacaactggtggcaacacaagagacacaagagaggtggccctgccttcttagggcagtggtacatggttaggcttggactgtctaacaggttccctcatttcctgtaatctttgagaagtaaagnnnnnnnnnnnnnnnnnnnnnnnnnnnnnnnnnnnnnnnnnnnnnnnnnnnnnnnnnnnnnnnnnnnnnnnnnnnnnnnnnnnnnnnnnnnnnnnnnnnntttttctccttttaaagaaactgtagtatctaaagaaccatggcaggtaggtttgaccagtttgtacctgctagaatggtttaacatatagttcctggttccttttgtcctgagtcatcagtgtgagcttgtgtctactctaggagagagcaaggaagagagaacatttcggaactggatgaattccttgggagtcaacccatacattaatcatttgtacaggtaaatattttattgtgcttcagctttactgtcagggtccaacttttcaagtttcaaactgtaggcatgtttaaatggaacattttctcaagttgcaagaattttagccaatttttagagtttcaggatgctgggaattggcaatacaatggattttaaaagaaagctactattcaaaaaaggaataatagttatgtttttgatgatatacgtaaatcagtaaagataatccttttttatagttattgattgtaaaaataatttcaactttaacagattagagtaacagtaataactgataaattgttgttatatcagtatttttattatgtcatttttcatttatttttgccaaaaccttaattattccataatttttgtgtatatttttttctaatttgtaaaagtaacttgttttccttgaataattgttatagcttatctcattctttcttgtttaaaaaatgataacacattattgacattagtagggctaagaaaatattttactaaatcaactcctgggctaacgatgcatctttctaagtgtggatgagaggaaaccattcttctctctttattatacaatctaccagcctgccttgataaagtgcaaaa

SEQ ID NO: 722205 - DNA, 1821 bp, Homo sapiens
  misc_feature 882, 883, 884, 885, 886, 887, 888, 889, 890, 891, 892, 893,894, 895, 896, 897, 898, 899, 900, 901, 902, 903, 904, 905,906, 907, 908, 909, 910, 911, 912, 913, 914, 915, 916, 917,918, 919, 920, 921, 922, 923, 924, 925, 926, 927, 928: n = A,T,C or G
  misc_feature 929, 930, 931, 932, 933, 934, 935, 936, 937, 938, 939, 940,941, 942, 943, 944, 945, 946, 947, 948, 949, 950, 951, 952,953, 954, 955, 956, 957, 958, 959, 960, 961, 962, 963, 964,965, 966, 967, 968, 969, 970, 971, 972, 973, 974, 975: n = A,T,C or G
  misc_feature 976, 977, 978, 979, 980, 981: n = A,T,C or G
tttactctctgtcttcattaccatgatcttattcttccaggagtcttgaccctaggcaaaaggtctgatttttcactgcaggcgctacctaaaagacccattaactcttcaaataaaacatcaatgacagtttatactctaagattctttgacctcctcaccttawaatcctccccttgctattgccaccaatcttgggctgctgtattgagaatcttgcccaatcttgccctcttgccccctctcatattgaaagacctgccctaaaccacaattccaattctcagatgctgccctcactttcccagcaccaagacactaacaaagctttgcaagtattttctcttactgcattaaacagttaactcagctttgtcttatcaacgggttgtgttggtcatacaggagaaaaaccgcttttgatgttaattttatcaaagatgtttgctttacaagcatatcaaatgtcttaaagtaatttggctttaaaaatgggtagaaaataaggagttgcaacatgtttctttcaagtaaatggtagtttctacttgataaatacaacattattgccctaccagttagtagggaatggaacggccacactaagctacttctaaacatcttaagaacaagaagtaacaggagaaccccatggagaagttgctatacaattcttaccatggacaactgccctgaatgcccagccttcctgaagactcgtgttgatgcggaaagatagggagagtagggaaccacaaacaactggtggcaacacaagagacacaagagaggtggccctgccttcttagggcagtggtacatggttaggcttggactgtctaacaggttccctcatttcctgtaatctttgagaagtaaagnnnnnnnnnnnnnnnnnnnnnnnnnnnnnnnnnnnnnnnnnnnnnnnnnnnnnnnnnnnnnnnnnnnnnnnnnnnnnnnnnnnnnnnnnnnnnnnnnnnntttttctccttttaaagaaactgtagtatctaaagaaccatggcaggtaggtttgaccagtttgtacctgctagaatggtttaacatatagttcctggttccttttgtcctgagtcatcagtgtgagcttgtgtctactctaggagagagcaaggaagagagaacatttcggaactggatgaattccttgggagtcaacccatacattaatcatttgtacaggtaaatattttattgtgcttcagctttactgtcagggtccaacttttcaagtttcaaactgtaggcatgtttaaatggaacattttctcaagttgcaagaattttagccaatttttagagtttcaggatgctgggaattggcaatacaatggattttaaaagaaagctactattcaaaaaaggaataatagttatgtttttgatgatatacgtaaatcagtaaagataatccttttttatagttattgattgtaaaaataatttcaactttaacagattagagtaacagtaataactgataaattgttgttatatcagtatttttattatgtcatttttcatttatttttgccaaaaccttaattattccataatttttgtgtatatttttttctaatttgtaaaagtaacttgttttccttgaataattgttatagcttatctcattctttcttgtttaaaaaatgataacacattattgacattagtagggctaagaaaatattttactaaatcaactcctgggctaacgatgcatctttctaagtgtggatgagaggaaaccattcttctctctttattatacaatctaccagcctgccttgataaagtgcaaaa

SEQ ID NO: 722206 - DNA, 1821 bp, Homo sapiens
  misc_feature 882, 883, 884, 885, 886, 887, 888, 889, 890, 891, 892, 893,894, 895, 896, 897, 898, 899, 900, 901, 902, 903, 904, 905,906, 907, 908, 909, 910, 911, 912, 913, 914, 915, 916, 917,918, 919, 920, 921, 922, 923, 924, 925, 926, 927, 928: n = A,T,C or G
  misc_feature 929, 930, 931, 932, 933, 934, 935, 936, 937, 938, 939, 940,941, 942, 943, 944, 945, 946, 947, 948, 949, 950, 951, 952,953, 954, 955, 956, 957, 958, 959, 960, 961, 962, 963, 964,965, 966, 967, 968, 969, 970, 971, 972, 973, 974, 975: n = A,T,C or G
  misc_feature 976, 977, 978, 979, 980, 981: n = A,T,C or G
tttactctctgtcttcattaccatgatcttattcttccaggagtcttgaccctaggcaaaaggtctgatttttcactgcaggcgctacctaaaagacccattaactcttcaaataaaacatcaatgacagtttatactctaagattctttgacctcctcaccttaawatcctccccttgctattgccaccaatcttgggctgctgtattgagaatcttgcccaatcttgccctcttgccccctctcatattgaaagacctgccctaaaccacaattccaattctcagatgctgccctcactttcccagcaccaagacactaacaaagctttgcaagtattttctcttactgcattaaacagttaactcagctttgtcttatcaacgggttgtgttggtcatacaggagaaaaaccgcttttgatgttaattttatcaaagatgtttgctttacaagcatatcaaatgtcttaaagtaatttggctttaaaaatgggtagaaaataaggagttgcaacatgtttctttcaagtaaatggtagtttctacttgataaatacaacattattgccctaccagttagtagggaatggaacggccacactaagctacttctaaacatcttaagaacaagaagtaacaggagaaccccatggagaagttgctatacaattcttaccatggacaactgccctgaatgcccagccttcctgaagactcgtgttgatgcggaaagatagggagagtagggaaccacaaacaactggtggcaacacaagagacacaagagaggtggccctgccttcttagggcagtggtacatggttaggcttggactgtctaacaggttccctcatttcctgtaatctttgagaagtaaagnnnnnnnnnnnnnnnnnnnnnnnnnnnnnnnnnnnnnnnnnnnnnnnnnnnnnnnnnnnnnnnnnnnnnnnnnnnnnnnnnnnnnnnnnnnnnnnnnnnntttttctccttttaaagaaactgtagtatctaaagaaccatggcaggtaggtttgaccagtttgtacctgctagaatggtttaacatatagttcctggttccttttgtcctgagtcatcagtgtgagcttgtgtctactctaggagagagcaaggaagagagaacatttcggaactggatgaattccttgggagtcaacccatacattaatcatttgtacaggtaaatattttattgtgcttcagctttactgtcagggtccaacttttcaagtttcaaactgtaggcatgtttaaatggaacattttctcaagttgcaagaattttagccaatttttagagtttcaggatgctgggaattggcaatacaatggattttaaaagaaagctactattcaaaaaaggaataatagttatgtttttgatgatatacgtaaatcagtaaagataatccttttttatagttattgattgtaaaaataatttcaactttaacagattagagtaacagtaataactgataaattgttgttatatcagtatttttattatgtcatttttcatttatttttgccaaaaccttaattattccataatttttgtgtatatttttttctaatttgtaaaagtaacttgttttccttgaataattgttatagcttatctcattctttcttgtttaaaaaatgataacacattattgacattagtagggctaagaaaatattttactaaatcaactcctgggctaacgatgcatctttctaagtgtggatgagaggaaaccattcttctctctttattatacaatctaccagcctgccttgataaagtgcaaaa

SEQ ID NO: 722207 - DNA, 1821 bp, Homo sapiens
  misc_feature 882, 883, 884, 885, 886, 887, 888, 889, 890, 891, 892, 893,894, 895, 896, 897, 898, 899, 900, 901, 902, 903, 904, 905,906, 907, 908, 909, 910, 911, 912, 913, 914, 915, 916, 917,918, 919, 920, 921, 922, 923, 924, 925, 926, 927, 928: n = A,T,C or G
  misc_feature 929, 930, 931, 932, 933, 934, 935, 936, 937, 938, 939, 940,941, 942, 943, 944, 945, 946, 947, 948, 949, 950, 951, 952,953, 954, 955, 956, 957, 958, 959, 960, 961, 962, 963, 964,965, 966, 967, 968, 969, 970, 971, 972, 973, 974, 975: n = A,T,C or G
  misc_feature 976, 977, 978, 979, 980, 981: n = A,T,C or G
tttactctctgtcttcattaccatgatcttattcttccaggagtcttgaccctaggcaaaaggtctgatttttcactgcaggcgctacctaaaagacccattaactcttcaaataaaacatcaatgacagtttatactctaagattctttgacctcctcaccttaaawtcctccccttgctattgccaccaatcttgggctgctgtattgagaatcttgcccaatcttgccctcttgccccctctcatattgaaagacctgccctaaaccacaattccaattctcagatgctgccctcactttcccagcaccaagacactaacaaagctttgcaagtattttctcttactgcattaaacagttaactcagctttgtcttatcaacgggttgtgttggtcatacaggagaaaaaccgcttttgatgttaattttatcaaagatgtttgctttacaagcatatcaaatgtcttaaagtaatttggctttaaaaatgggtagaaaataaggagttgcaacatgtttctttcaagtaaatggtagtttctacttgataaatacaacattattgccctaccagttagtagggaatggaacggccacactaagctacttctaaacatcttaagaacaagaagtaacaggagaaccccatggagaagttgctatacaattcttaccatggacaactgccctgaatgcccagccttcctgaagactcgtgttgatgcggaaagatagggagagtagggaaccacaaacaactggtggcaacacaagagacacaagagaggtggccctgccttcttagggcagtggtacatggttaggcttggactgtctaacaggttccctcatttcctgtaatctttgagaagtaaagnnnnnnnnnnnnnnnnnnnnnnnnnnnnnnnnnnnnnnnnnnnnnnnnnnnnnnnnnnnnnnnnnnnnnnnnnnnnnnnnnnnnnnnnnnnnnnnnnnnntttttctccttttaaagaaactgtagtatctaaagaaccatggcaggtaggtttgaccagtttgtacctgctagaatggtttaacatatagttcctggttccttttgtcctgagtcatcagtgtgagcttgtgtctactctaggagagagcaaggaagagagaacatttcggaactggatgaattccttgggagtcaacccatacattaatcatttgtacaggtaaatattttattgtgcttcagctttactgtcagggtccaacttttcaagtttcaaactgtaggcatgtttaaatggaacattttctcaagttgcaagaattttagccaatttttagagtttcaggatgctgggaattggcaatacaatggattttaaaagaaagctactattcaaaaaaggaataatagttatgtttttgatgatatacgtaaatcagtaaagataatccttttttatagttattgattgtaaaaataatttcaactttaacagattagagtaacagtaataactgataaattgttgttatatcagtatttttattatgtcatttttcatttatttttgccaaaaccttaattattccataatttttgtgtatatttttttctaatttgtaaaagtaacttgttttccttgaataattgttatagcttatctcattctttcttgtttaaaaaatgataacacattattgacattagtagggctaagaaaatattttactaaatcaactcctgggctaacgatgcatctttctaagtgtggatgagaggaaaccattcttctctctttattatacaatctaccagcctgccttgataaagtgcaaaa

SEQ ID NO: 722208 - DNA, 1821 bp, Homo sapiens
  misc_feature 882, 883, 884, 885, 886, 887, 888, 889, 890, 891, 892, 893,894, 895, 896, 897, 898, 899, 900, 901, 902, 903, 904, 905,906, 907, 908, 909, 910, 911, 912, 913, 914, 915, 916, 917,918, 919, 920, 921, 922, 923, 924, 925, 926, 927, 928: n = A,T,C or G
  misc_feature 929, 930, 931, 932, 933, 934, 935, 936, 937, 938, 939, 940,941, 942, 943, 944, 945, 946, 947, 948, 949, 950, 951, 952,953, 954, 955, 956, 957, 958, 959, 960, 961, 962, 963, 964,965, 966, 967, 968, 969, 970, 971, 972, 973, 974, 975: n = A,T,C or G
  misc_feature 976, 977, 978, 979, 980, 981: n = A,T,C or G
tttactctctgtcttcattaccatgatcttattcttccaggagtcttgaccctaggcaaaaggtctgatttttcactgcaggcgctacctaaaagacccattaactcttcaaataaaacatcaatgacagtttatactctaagattctttgacctcctcaccttaaaatcctccccttgctattgccaccaatcttgggctgctgtattgagaatcttgcccaatcttgccctcttgccccctctcatattgaaagacctgccctaaaccacaattccaattctcagatgctgccctcactttcccagcaccaagacactaacaaagctttgcaagtattttctcttactgcattaaacagttaactcagctttgtcttatcaacgggttgtgttggtcatacaggagaaaaaccgcttttgatgttaattttatcaaagatgtttgctttacaagcatatcaaatgtcttaaagtaatttggctttaaaaatgggtagaaaataaggagttgcaacatgtttctttcaagtaaatggtagtttctacttgataaatacaacattattgccctaccagttagtagggaatggaacggccacactaagctacttctaaacatcttaagaacaagaagtaacaggagaaccccatggagaagttgctatacaattcttaccatggacaactgccctgaatgcccagccttcctgaagactcgtgttgatgcggaaagatagggagagtagggaaccacaaacaactggtggcaacacaagagacacaagagaggtggccctgccttcttagggcagtggwacatggttaggcttggactgtctaacaggttccctcatttcctgtaatctttgagaagtaaagnnnnnnnnnnnnnnnnnnnnnnnnnnnnnnnnnnnnnnnnnnnnnnnnnnnnnnnnnnnnnnnnnnnnnnnnnnnnnnnnnnnnnnnnnnnnnnnnnnnntttttctccttttaaagaaactgtagtatctaaagaaccatggcaggtaggtttgaccagtttgtacctgctagaatggtttaacatatagttcctggttccttttgtcctgagtcatcagtgtgagcttgtgtctactctaggagagagcaaggaagagagaacatttcggaactggatgaattccttgggagtcaacccatacattaatcatttgtacaggtaaatattttattgtgcttcagctttactgtcagggtccaacttttcaagtttcaaactgtaggcatgtttaaatggaacattttctcaagttgcaagaattttagccaatttttagagtttcaggatgctgggaattggcaatacaatggattttaaaagaaagctactattcaaaaaaggaataatagttatgtttttgatgatatacgtaaatcagtaaagataatccttttttatagttattgattgtaaaaataatttcaactttaacagattagagtaacagtaataactgataaattgttgttatatcagtatttttattatgtcatttttcatttatttttgccaaaaccttaattattccataatttttgtgtatatttttttctaatttgtaaaagtaacttgttttccttgaataattgttatagcttatctcattctttcttgtttaaaaaatgataacacattattgacattagtagggctaagaaaatattttactaaatcaactcctgggctaacgatgcatctttctaagtgtggatgagaggaaaccattcttctctctttattatacaatctaccagcctgccttgataaagtgcaaaa

SEQ ID NO: 722209 - DNA, 1453 bp, Homo sapiens
  misc_feature 664, 665, 666, 667, 668, 669, 670, 671, 672, 673, 674, 675,676, 677, 678, 679, 680, 681, 682, 683, 684, 685, 686, 687,688, 689, 690, 691, 692, 693, 694, 695, 696, 697, 698, 699,700, 701, 702, 703, 704, 705, 706, 707, 708, 709, 710: n = A,T,C or G
  misc_feature 711, 712, 713, 714, 715, 716, 717, 718, 719, 720, 721, 722,723, 724, 725, 726, 727, 728, 729, 730, 731, 732, 733, 734,735, 736, 737, 738, 739, 740, 741, 742, 743, 744, 745, 746,747, 748, 749, 750, 751, 752, 753, 754, 755, 756, 757: n = A,T,C or G
  misc_feature 758, 759, 760, 761, 762, 763: n = A,T,C or G
tgagccatcacaatgtaaatatacctttgcaaccaccactcaggacaaaatatagaacagaagctccctcttgtaactctcttgtaaccctgcttaattattccctccttgcttctccccaaaggtaaccaccattttgacttcttatattttagattggctttgcctccttttaacatttatataaaacaacaatgtagtacacattctgggggtttatctcttttgcttaatatgttggtgagattcttctgtgttttgcatgtatttgtagtttgttttcatttctgaatagtattccattgtattagaatatactgcaatgtgtttatccattctattattgacagacatttgatttctgctaattggctattatgaataatgatgctataaacattctttgacatgttacattgttttgagggtcacccatccatccatttttgcttctatagttcagggtaaaattgtttggtcataggatatgtatggtgatcttaagacatgtccataaattcttcaaccctcctcccttgaaaaggaggagactaaatccatgaccctcaagtgtgggctggacttagtgacttgcttctagtacatagaatagcagaagtggtagtgtattacctccaggcctaggtcataaaaggtactaccnnnnnnnnnnnnnnnnnnnnnnnnnnnnnnnnnnnnnnnnnnnnnnnnnnnnnnnnnnnnnnnnnnnnnnnnnnnnnnnnnnnnnnnnnnnnnnnnnnnnaatgaaactccttttttttcatgaccatacacatacacaaacaaaaccctcatgctctaccatccctactcccacaaattttgataggaacctcacataggaccatgctcctctattgacatttccattttagaacctcaaacctagagcattaatgtaactttttttgaataaaaagaaaatttttaggcttcaaggcagaaatggtatttaaaacttatgggaaaagtaaatcaggaaaacaacatcaaaaaggaactactttgatatttttgaggctaaatggaaacattaataaaggaagttggacttatagaaacattgttgttattgaatatttgctgcaataagcaagacaaggtgtaataataagaaaaagctggatcagcaaggttgacaagacaaggttgcaaattataattattgtttatacaactgttcactgaagggcakagaccagcgccatagaggctaagaagaatgtactctgtaaaagaatgactggctcttcaggatttctacaacttacacctgttcctgttctccagaacaatgtttactaatgcttactatctctaatctggtttccatgatctatccatactgagaaaggagggtttggataagtaaataaaatactatcataatcagagagatataacttctcctgtgttttaataaaatggcatt

SEQ ID NO: 722210 - DNA, 1973 bp, Homo sapiens
taagatagtctactgatatactcaaatactcacatttatcttcttagaaagcacccatgtatatcttccacatgatagttatggcttaaaaaaaattcaaatttatgttgctgctgtcccatctacccatctctacaatagaagattctaaaaagtgattttgtcaccagaaacccacattttctcccatctggaccttgaagtttcctttaactttgctttagtgattgggcaagtcatctttctttctgtggctttaagaattgcccatgataaagtaaaagagccataacctcaaggaaaccatttattaggcttaatcaaaacataatactcttgtttatgtcttcaacacattgtttatggagagagtgagccacaatgcacagacactatcacgatgctccggtgaagatgggtgatttaatgcccaagagcacaactgaatccactctagagaccaataggtgtggctcaaccatagcttcaaaatttcagaggaagttcagaaaccccatatgggtttgctttgctttttctattccttttaaccaaagctgccttcatcatgtataatctttctttttttctgagacaggttcttgctatgccacccaggctggagtacagtggcccgatcacagctcactgtagcctcaaactcctggactcaggtgatcctcccaccttagccccctgagtagctgcgactacaggcatgtaataccacacctggctgacttttttaaaaaaagcattatagagatggtgtctcaccatgttgcccaggcttcaccatgtatatttctttctttttttttttttgagacagagtctggctcctttgcccaggctggagtgcagtggtgtgatctcagctcactgcaacttctgcatcccaggttcaagcaattctcctgcctcagcctcccaagtagctgggattacagtcacatgccaccacgcccagataatttttttgtattttagyagagacagggtttcaccatgttagctaggccggtctcgaactcctgacctcaggtgatctgccggcctcagtctcccaaagtgctgggattacaggcgtgagccaccgcacccaccccaccatgtatatttctgacagcctcttcacaaggctgataactatgtgatattcttgacaggtccccagtgtctctctcagcttggccagggcccacccacctacccctctgtagaatctcgaaacaacacctcagcatcctgggagactggcatgataatattcgtttttcagagcaagaaccaaactgacaaggaacagccataggaggctcagatcagggctatctccgctcagtgacagggaggtctgtctctttgggagaggttgaagacagctaaactggagtggttgccagggggagagggggatccagaacacaataaacaaccacactggattctgctacagtcacagcatcccagagctagaagagagcctgaaaatcatcaagcatggtggttatcaagcagttgttgctgatgtgttcaagcagtggaattctttttgaaattaaatcttctgtggacccctggcatagaaaacaattaaaattgaggaagaggttgctgagcagtgaaaacatcctcatcgtttgatagaaagattcctctcacggcatacggagccctgaaacactgctgtgggaagtttcccaggctccatttgaacatggggttctcaaaagaacagtgacagggagctcactcccactaaggctcactccaccataggtagcccagactagcagagggtatcttcctggcacagacctggaatctgactcctgctagcttatattcatggatgttagcttacctttgaggccaaataaattagcttgtatccccatttcacatgggaaaatcttcatatattcaaaactagcaggttgtcttttagacatgcccttcattacatggca

SEQ ID NO: 722211 - DNA, 1973 bp, Homo sapiens
taagatagtctactgatatactcaaatactcacatttatcttcttagaaagcacccatgtatatcttccacatgatagttatggcttaaaaaaaattcaaatttatgttgctgctgtcccatctacccatctctacaatagaagattctaaaaagtgattttgtcaccagaaacccacattttctcccatctggaccttgaagtttcctttaactttgctttagtgattgggcaagtcatctttctttctgtggctttaagaattgcccatgataaagtaaaagagccataacctcaaggaaaccatttattaggcttaatcaaaacataatactcttgtttatgtcttcaacacattgtttatggagagagtgagccacaatgcacagacactatcacgatgctccggtgaagatgggtgatttaatgcccaagagcacaactgaatccactctagagaccaataggtgtggctcaaccatagcttcaaaatttcagaggaagttcagaaaccccatatgggtttgctttgctttttctattccttttaaccaaagctgccttcatcatgtataatctttctttttttctgagacaggttcttgctatgccacccaggctggagtacagtggcccgatcacagctcactgtagcctcaaactcctggactcaggtgatcctcccaccttagccccctgagtagctgcgactacaggcatgtaataccacacctggctgacttttttaaaaaaagcattatagagatggtgtctcaccatgttgcccaggcttcaccatgtatatttctttctttttttttttttgagacagagtctggctcctttgcccaggctggagtgcagtggtgtgatctcagctcactgcaacttctgcatcccaggttcaagcaattctcctgcctcagcctcccaagtagctgggattacagtcacatgccaccacgcccagataatttttttgtattttagcagagacagggtttcaccatgttagctaggccggtctcgaactcctgacctcaggtgatctgccggcctcagtctcccaaagtgctgggattacaggcgtgagccaccgcacccaccccaccatgtatatttctgacagcctcttcacaaggctgataactatgtgatattcttgacaggtccccagtgtctctctcagcttggccagggcccacccacctacccctctgtagaatctcgaaacaacacctcagcatcctgggagactggcatgataatattcgtttttcagagcaagaaccaaactgacaaggaacagccataggaggctcagatcagggctatctccgctcagtgacagggaggtctgtctctttgggagaggttgaagacagctaaactggagtggttgccagggggagagggggatccagaacacaataaacaaccacactggattctgctacagtcacagcatcccagagctagaagagagcctgaaaatcatcaagcatggtggttatcaagcagttgttgctgatgtgttcaagcagtggaattctttttgaaattaaatcttctgtggacccctggcatagaaaacaattaaaattgaggaagaggttgctgagcagtgaaaacatcctcatcgtttgatagaaagattcctctcacggcatacggagccctgaaacactgctgtgggaagtttcccaggctccatttgaacatggggttctcaaaagaacagtgacagggagctcactcccactaaggctcactccaccataggtagcccagactagcagagggtatcttcctggcacagacctggaatctgactcctgctagcttatattcatggatgttagcttacctttgaggccaaataaattagctkgtatccccatttcacatgggaaaatcttcatatattcaaaactagcaggttgtcttttagacatgcccttcattacatggca

SEQ ID NO: 722212 - DNA, 588 bp, Homo sapiens
agagctgtactgggattattttccatggtgagaaatagaaaagctacagcataatgagtgagttcttttgcatctctggttattaaggaaaacaaccaaacatgatttggaagagggttttaaaaaattcagtttcagcagattttctcactcttatttgtatgtatagaggacttaaaatgaaaggactatatatctccatttcacagatcaggtcatttaggcacggggccccgagagttaagaaagatggctaggggaaagagaaaaaaaagtctcagccagaggtgagagagagcagctcaggaacctggagccggacggcaatggtgggggatcgcgttttccttctgtgacactctcctcaagggtgacgctacccctgccaaatagggaggaggaatgattttttttttccttcataaaaacaagtcagaaaggaaataaaatccacatttaaaactcccaactgttttttgaaacgagtattttcttcatttcttttccaaggcagacagagcaggtgttaaggctgagttmctcttgtcatgtgaaacaaagatggccctgactaccatgtactgggcg

SEQ ID NO: 722213 - DNA, 1032 bp, Homo sapiens
gtttctatttgtcatgttttaacatctcagagcaaggcaccttaagacaatttcactgtttctcaacaagtcatttacggtctgtttcatgcccatgcttttgctttgtgtgtccctctcattctacctgtctattcctgcatattcttcagaactctgctttaatgctatctactcagacaagttgttctaatcaccccgccagaagttataccccattattttattatcaaacttagcaattttgttgtttctattatttactatgcttctagttattatgtttgttcagtttatttctgattcctaaatagaaggtgaaccaccctggggaaatcgtcaggtcttcctggtttattaatggaattcaagcgcctaagctggaagataagcttagggatcatctttaagtagtggaaagaatgcattgctcaggagtgcagcaggaagctaaatgcaaagggaagggggaccagaagggagcctgttgctgatgaggaataaatgaatgcttagcattgccttaaataagtataagaaaacaacataaatttaaataatacctacattagcttaattgattaggaatcaaagtaacgggtggggatctttcataaattaatctctgagaaattggagagaaaaaggcagcatctagtgattgaagaaacagcagaaatgtattataatttttacttttccgccaktacattggttttcctatgacagaaataatttatttaatcaatgctctttcttaagaatagaatactgtagctactcagtgagctagtgttgctcccagaggcagcagtaaagtgataagagtaggaaaattatgcctaaattaagaaagtgatttacagtagcagctctgagagcaacagagttagcaaggagtgtttgagctccagatatttatcagcttagagcaaaccacctcatagcaggagaaacagcaggatggtctgagtaagaaattataaaacagaaggaaatgtgcaggaaaatgtagtcaggtgtagaaaatca

SEQ ID NO: 722214 - DNA, 639 bp, Homo sapiens
ttttatgtagaattacttcttgaaaattcttttttttactattatcaagtcatcccagaaaaataagcccctcctttttcctcatcagaatcactttatgctgtaatgatttatttattcatatgggtttaggcattgagaggaaaagacaggcagacatagattatggcatggagaaatgtatattggaagaaatattgtgggttaagtaattaaaacttgacctctgttcttctggtctttcaaaatcagtctgaagtgttaaacttcagtgacttgtttttgttttttttttwaatccaaaatgtctaaatgtactaaagacatttctgagagaagaatacacctctgcttccttctttgttctttctttcaatcaggcttataagtgacttcagaggagccctagcctggagccaactgttgtttgtatgctgtgggaaggagagtatagctgtattcacaccagacccaatacatatattccacaggcaaaatcattaccagaattttacagttttatattaaaaggtacaaagaactgccagcaagtttctaattggctgaataagtgcatgtggttttccccttcaaagtcacatagcccacgcattctttgacatcccaataatacttagc

SEQ ID NO: 722215 - DNA, 1670 bp, Homo sapiens
tttcctttgtcttcttgtgtccttctctctctctctctctctctctcctttctctctctttctctctctctgtctctctcacacacacacaccaccaccatctaatattctttatatttctgtgtctataagacttcagtgggaaagtttcctttttactcttttctctgaatttttagaatttactggtggttgtctcagccttaattggaactttcttctaaaacatcccaactcagtgaaagtactgtgaaagtcacacctttaattttttctctccactaagctgagttttaacttaccttaccagatgaaattgaaaaacatcagtcttccaaggctacacaccctagatttctggactctgtttcctttcaatactgctcataaatgggccagctttttctgagatcatctcttttttgtaaatcttgccaagtccagccaacagcaaccaacacatacaatcagcattctgttttcaacctcttcccttggaggtggaagttcattaaataactgattagccttccaagtaagagcaaataacagttgtacccagtgatttttctcaccatgatatccatttctgtctttctactcttctatctcagtttccttatcagccactggaccttcttggtaccagcacctgtatcagtcgggttaggcggtgacaacaatcccaaatcttagtggtttatgtaagtaaatagttatttcttttcatgtcacatgtctatggcaggttaactgggagcctgttccacatcttctcattctagtcctcaggttgatagactccactatttgacatgtcaccattttcatggcagagaagaggaaatgtcacactgactcttgaaatttctgccctgaataacatggcgtatcagcaaaaacaaattgctcagccacatctaatttcaaagtggctggaaaagtgcaatcctcccaagatctcagaaggtggataatcaaaatatttactagcccctaatgtttacaacagtgcacccttatgttcccaaatacttgtttcactcttcttgtcacatgcaagatattctcacttctcctgtgaggggaagttattagtcagaatacaattgttctatgtatctttctatcacttcctacataggactgtattgtcaggaatgatattcattaccaggatataaaaccatttcttttttctttttatttttttgaaatggagtcttgctctgtctctcaggcaggaatgcagtggcacaatctcaactcactgcaacctccacctcccgggttcaagcagttctcctgcctcagcctcctgagtagctgggactacaggcatgtgccaccacgcccggctaatttttgtatttttagtggcgttgttggggttttgccatgttggccaagctggtcttgaactcctgacctcaggtgatccacccgcctcggcctcccaaagtgctgggattacaggtgtaagccaccgcgctcagccaaaaccatttatattaaaaggaggtttagaaaaacactctaaatattattataatgcatttggagtgaatttttaaaagtctgatttccctcagatakttttaatatgtctgagtttatacaattgtccttgtttctagtatttattgtatgtaaactattatacatctaaa

SEQ ID NO: 722216 - DNA, 1027 bp, Homo sapiens
tgtagactttttttttaagagaattgcaccactcagaatgtcctgccttcattcctcccttacccttactgaatcccaaggaggtagaagagggataaattacacctatttcaccagaagagtttgtttttttttttttaatggtcattcagagagatggcaatgtccctgcattggggtaatagatggcctattgcctgacttttctccaaatttgcaaatgtggcagaataaaaataggtctgtcaggagaagaggttactttcaaagataatcaggtctaggaagttgatgaatattctctgagccagcagtgaacaagtgagagaaaaagtggtccaaagcttctcagtatattgataaacagttactgccagaaggcaaggagattccttcagctaatgtttacatgtggtaaaagacaaactcatgccaagaagggaccctgaaagattacctgaagcacaacgtagattgcccattcacagaaattagaactaaagggttgcagttgttacctcccaagcaccttcaaatcgtcatacattttcaccatctccagacccagtaagcctgaagccaacagtcagacaagaaagattcctctcacccagtctgcctaccaggcaatatcctccacttgcatctcacacatttacagctagccagtggggacctaagggtactgggcaaaggaaagccaatctacatgagggaaaggtgaaatatatcttacccttgaatgctgattaattttggacttgaaccttctaattataaaattgagacagatttttttgacattcrctaatctgaatagtactgttaccttaatgtgtgtgaatacgtcttaagatctttcttaaatttttataaataggggaacatgtaaattaattgaaaaaaatgagtatttaacattttctatatgtaatcatgataatggagtgttggcttattacatttgatttaattgtttaaatgattatcatatgctataatatttatcaaagactgttgccccaat

SEQ ID NO: 722217 - DNA, 1063 bp, Homo sapiens
tctgtccccatattgaaggtgaagaaaataaagctcaataccattaacaaattcagctaggtcagtatcagaactaaacattgaaccaagattcgtgatttcatacaccatagccagtccagctggacaaataggatctgaatttggatagaatagcaactggtaataataggcaaaattcagccaaagacaactagtgagcattttaacagatgagtagggaacaytgacataggaccaataagcttcaaagatccagacaagtgaatagtgtcagtgggcccaacagcaggcatcaagattccagtgatgcgacaggattttgagggtacatttttaaggttttaagaaatactgataaggacagggtaagattcaaatcttagaggaagcaataagtgtccaaagtaaaggagaatatcaagacaagagctgacaaaaagtaactaactagtataaagccaacaaaagaaatgttgaggcaaagatttcgttttaagaatgatggacttgtgtattcaggtggtcagacaaagcagacttatttgcaaagtgactggacactgtaattgcttagctcctgaaattgaaatgttttcacttcacaaaatataggggcaaagttaagacagatacattgtaaatttatgtttgcccatggtataatttaaggaatgcgtggacttaaagtccaataaaaccctatgactcttttatttacttgccaatttttaaaaccatttgagtcttaatggtttaatatagattgatggaattttattgagggaggaaaatgtactcatggaatgtgattctaagatttgtaatccaatatcttatgggactcactgtcttagacttattctattatcgaaaagtatgaaaatccgaattgtttttgccttcattgaagacaatgctcaaggcaaatatttgtttctacccagcacttgattctaaatcatacttgggtttctacctttgtaagctgggccaaattacatattattctttagggcctttcttgaagttttaccttaggatgctaactagagagagacag

SEQ ID NO: 722218 - DNA, 1063 bp, Homo sapiens
tctgtccccatattgaaggtgaagaaaataaagctcaataccattaacaaattcagctaggtcagtatcagaactaaacattgaaccaagattcgtgatttcatacaccatagccagtccagctggacaaataggatctgaatttggatagaatagcaactggtaataataggcaaaattcagccaaagacaactagtgagcattttaacagatgagtagggaacactgacataggaccaataagcttcaaagatccagacaagtgaatagtgtcagtgggcccaacagcaggcatcaagattccagtgatgcgacaggattttgagggtacatttttaaggttttaagaaatactgataaggacagggtaagattcaaatcttagaggaagcaataagtgtccaaagtaaaggagaatatcaagacaagagctgacaaaaagtaactaactagtataaagccaacaaaagaaatgttgaggcaaagatttcgttttaagaatgatggacttgtgtattcaggtggtcagacaaagcagacttatttgcaaagtgactggacrctgtaattgcttagctcctgaaattgaaatgttttcacttcacaaaatataggggcaaagttaagacagatacattgtaaatttatgtttgcccatggtataatttaaggaatgcgtggacttaaagtccaataaaaccctatgactcttttatttacttgccaatttttaaaaccatttgagtcttaatggtttaatatagattgatggaattttattgagggaggaaaatgtactcatggaatgtgattctaagatttgtaatccaatatcttatgggactcactgtcttagacttattctattatcgaaaagtatgaaaatccgaattgtttttgccttcattgaagacaatgctcaaggcaaatatttgtttctacccagcacttgattctaaatcatacttgggtttctacctttgtaagctgggccaaattacatattattctttagggcctttcttgaagttttaccttaggatgctaactagagagagacag

SEQ ID NO: 722219 - DNA, 583 bp, Homo sapiens
cctaccaatttgcaaatgatctcctcctacattaccacttttgaaaggcatattttaaagtatgtaacactgaattgatgataatgattttcagtttagcaatttatggtttcacacatgaatgaatataattcaggttttcttggctttaaggttagctttccctgttgacctttttttcgttttttgttgttgttcttgttgttgttgttgttgttgttgttgttgagacggagtttcacttttgttgcccaggctggagtgcaatggtgtgttctcagatcactgcagcctctacgtctcaggttcaagtgattctcctgcctcagctccccaagtagctgagattacaggcactcgccaccacacctggctaatttttctgtatttttagcagagatggggtttcaccatgttggccaggctggtctcgaactcctgaccgcaggtgatccacccgcctcggcctccaaaagtaccctattgacttttgacatattayacttagcgacaagtttttactgcattggcaatttgtgatgccaaaagtaccatttactgaaataatacatagtaatgaaag

SEQ ID NO: 722220 - DNA, 669 bp, Homo sapiens
tgggtttttttttctgcattggaattgggtgtgatgtgcctttttatgttcacttttttccataatgttatttcataggcaacatttcatagaatctttcaaaataaataaagccctctgttgtagaaaaagcaaaacagaaaaaccccaacatagtgtactcacattttccagggacaagccttgtgttatagtttcacgttaatctccagatyctgttaagccactaaataccagtttctttttctgtattaaattttgtgtgtgtgtgaagttgagtatctgggactatcaaagggcagtagataaatagagtttaaaagcagggcctatgcaatcagtcaggatatcctgctttatggtctttctttgctttaacttacatgttggctctaaagaacattttgcaaaattaaaaatgggtttgaaaatcagtctactggtctagataataatgtggactacttttgggctgaatggagtgtcatatcaatgcccatttagaagatgccagatttctttgctgtcccgagggaattccaatatttttccaaatcttagaagaatgtccaagctcttaatttttagtaagaatactattgatgtcttgtctctgttactaactagtttgatttgaggaagaagaggattggggaaagtcagatacta

SEQ ID NO: 722221 - DNA, 2329 bp, Homo sapiens
tgcatatattttcatactttgttgcattgctcgaatgcctctatgccctctcatcttatgtcccctagaggccacttccaaaaagagaataaaggctcccctttgttgattctagtccttttctgaattcagtagggaagttctataatagatataggtaagtttcactccaataatctctcttcaggttaataaaatgtctcactgctcactccatgtaggagtcctttatcttccagtcatatgaggcctatattttcagactattccattagctattgtctaagaactggtaaaaattcatatgctattgttattgtcattatctggttcttctgaagagtgactgttctgaattctctctaggtcaaatactaacaatgacttgggaatagtatttcatcacttttaccacagtttactcatctataggaagaaaagtcttactaagtgatttttgcagagtttctagctctagacttctataatattaaaaaaactcttgacatatatctattcgtatttaatgtacacacaccacggtttgtggtgtgtgtgttggttgagagggctatgtttgtatgtatgtgtttgtgtctgtgtgcgtatataaatactgtttttgctttttaagtaaattgttatttctgagaattcaagtattgtacacgaaatgtgacatctactagaaaattacagtgacaatctaagtgttaatatctaaaatatagcttaatagactttgctaagacactttaattcaataatgtcctttcttcccaataataccccaaactatcaattctggattttttttcacttttttggccttaaacatatagagttgcttttgtcccatggatctatttattttcttgcttatctgtatttcttttcatttcaaaaaacttgaaaatcgcatgctgcataaaattaatttttcaaaaagaataaagtaagcaaacagttaatcacaatgcatttaattcatagatactatccattttatttcgttcataatatcgaggtcatttttagtaaacatcacttgaattattaatttcttactttgaattaactttggtagatatattttaaactaggacgctctcacatttcataaagtttgtttggtgaacatctgcccctgctcctagaagttatgtgggcaggagagtgttatttcatttgtgagctttagttcacccacagtctatttccagcacccctcttaattgggtctgtgggacactgtccctaacgcaccagaagtttctccattccacagatctctcactccaactttaaattgctttgcgaaatggggaacaattacaataactgttgcataacaaatatgtactgttccacatctatggaacctgacatcttttgttgaacctgactttaattcataatgctgacgtaaatactaggaaatagtacctggttcttctaggagggagacataatttatcattgtaaaggtaagtcctgaataccatgaaactgtaccttttatatttataattaaagctattattacatgtggatttatggtgtgaatatcattaggcaatacagctatcaatgtggtattattatcaaatatggctatgataataatattatcattattatgatctgcatagtgctggttaatccataaagcagtttccatatgctagctgaattttttctcaaaacaaacctgtgagaaaagtagggcaggtatttccataactatttaacaaatgaaaaaygagttacatattagaagaaaaaataacctcaaaactaggatttttgtttctgaatcccaagcactttttaactaggctaaccccatgccatatctgttcaagtgtgaattaggtgatgcctttatactggcagtgcataaaccagttaatctctttataagttggcagcttattagtactgacagaaagatatattttctgttttttttttaacagattacttgctgcaaataaacactttgtgcatattaaagttctgaacattaatctgtaaatactgcacagggaaattgcctaagagcctagaaaaacccatctattatgtgtagccaccgtgttaggccataggtgtagaggaatgggcaagacaagcaagctccttccccatgtctcgtgttatctcacaatacatgagagaaccaatttaaagagctgggataagaagaaaaccaagggtagcaagacaggcttggcttaaggtggattgaattggtgagataatttcttcctaggaggggaaggcttggagcagatggcagaagaagctgtttaggtagcctaaaatg

SEQ ID NO: 722222 - DNA, 1512 bp, Homo sapiens
gtgtgcttaatgtttgtgattacctggaattagtttttttttctaaaattggtgtagaaactgagtggttaacagttttaacatcccttcctcctcttcagccaaataacagcatcatgctgtggtcactactgcctgatcctgaaatgtttaagtaaggatggaaataaaaataactgtgtagctttgatttttaataaaaatttccagtacctacctttgtagagattctgaatagaactgggaatctgatacttgagtaagaaaagtgttctgatgtgtgctaacagcacttggattaagatcaccagcacacttcctactcattgaattctttccttctacatggttccattcctaatccattcatctacaactgagtaatttcttgcaagctctgtcttgctcagtctgggacctcttgtaatcattatctgtaattgcatcatattccctacacctaaggcttaggaaggttatatgtatgcagcaagaggtaccttctccctaggataaagccatcacccacataaatccaaggaaccttctctgataaagaactaatgtgtgcacattggcctcaatactctatagctccagagagggtggaaaagacaaggaaaagtacatcaatatgtaacattggtaaaattataatttatgtaattttgctcacatatatttatgaatctgtttctacaatatgtatctgcattcatatattatttatcttgcaatataatttcactcctcagctttaattaactggtcaattcagcatgctttaagaaaaataataacatgataggtgtgtgttgatgaattcactgagacaatcaaagtacaatataagtatattctaatcttatatccatagatacttcaggatctcccaattgtacctctattccacctcatacataggattacaatagtgccaacccttgttatgatatatttgcacacacacagatattttmtcatcccccacatataacattccaaataaagaaaatcactcagccgggcgtggtggctcacgcctgtaatcccagcactttgggaggccaaggcgggcggatcacaaggtcaggagattgagaccatcctggctaacaaggtgaaatcctgtctctactaaaaatacaaaaattagccagacttggtggtgggcgcctgtagtcccagctactcatgaggctgaggcaggagaatggcgtgaacccaggaggcggagcttgcagtgagctgagattgcgccactgcactccagcctgggtgacagagcaagaccctgtctcaaaaaacaaaacaaaacaaaacagaaaaacccaaaatcactcatatttcattacagttaaaaccatgttttttccactttaacatgttggaaactaggaagagttccaaaattgatgctgttttggttttacaaattattaggggtgtgtgtgtgtgtgtgtgtgcatgtgtgtatactttgagttgtatccacactaattaaaaaacata

SEQ ID NO: 722223 - DNA, 563 bp, Homo sapiens
aaaaaaaaaaaaaaaagccgggtgtggtggtgcatgcctgtggttccagctactcaggaggctaaggcaggaggatcaccagagccaaagaggtcaaggctgtaatgagctgtgatcgtgtgccactgtactccagcctgggcgacaaggcaagaccctgtttcaaaaaaataagataaaataaaatagctaaaaaatactctcttcttgagcactgtagttttattcttttacttgaatttctgtgatttactataatattaaaatactacaaaattatgtatctttttgaagaatgtaagatttttgtcctacctgtccatttgtatctgcttaaacgtggcttcctgagagttggttatattaatatcttttgtactctcttagactgaaaaatcttttttttttgatgtttttcagatgatttcatccagtcataagtctaaatttgtcaatamgttttatagttagatttttgttcacattctttatcaaactcttgtttcgtaaaagtagattatatatattattgttaatggatgcaaaataaaactttctggaga

SEQ ID NO: 722224 - DNA, 447 bp, Homo sapiens
ggaactgtttgaaagtacaatatggagttcagaatcatcattttaattgatgtcacttctgttastttttgtccctagtaaagctttcatttctcagcctgacttttaccctggtttgtctttttaactttatttttcattactacttattgtgtggttgatggggtactggtgtgacttaaattagaatgtctgggtcttgagacttagtgtattagtggtgtggccttattagcaagacttttagcccttttgagtctgttatcccttcatccataaaagggaaacattgtctttcatagttagaattaagacttttaaacatgaaagtttgtgcaaatgctgtttgttttgcattaacctcaggctctagccaaatcagtgtatttgattttcctccagcataccagggacgtcctgcttttttgatctgtgagatcacctccc

SEQ ID NO: 722225 - DNA, 2101 bp, Homo sapiens
gtacctctgctcctattatatggctcttgcagaacttgaaaaaatatttaatcagagtttagtcgggtcaaattttaaagtgccaaggcttttgtttaatattgaaaaatatggatgaacttagaaactgaccaaaagatattattaggagtgtaagataactggaagtaaaacaggtgtttgccttcatttggttatatagatgagaaaggatgtagaggtctcttcttgtattaattttagattaatttataaccatttagtaaccattttagctaaaatcagcgtaaaaagaaagggcaataagaatttaagagttttaaactttcctctagcttgttttagtattacatttttgttactacatagttaaaatcacaaagagatacatgaattggaacataattacatgtaatttaaacagaaacattgatcattatgaaataaaattgataaaagtgaaaaaagaatggttaaaattttatttatcaaaaaacaaagtagaagaatgtcttaattattatgtaagcacaaccattcattcaataagaatataatgaattcgtacagcatgctggaggctatgcaagtcactatagatacagaaatgcatgaggcatatgccttgccctatataaacttacagttcaagtgggaaagagagacggagagacaagataacacgtaaactgctatataacatggtaaatgtaatgaatgtctgtttaagtgtcactgtgcccagaatattagacaacaaatggtgaatagttacacaggtaccataagacattgtttctgcctgaggaatatggatcttactggagagtgtattagtgaagtggagataagtgtgggtgggcagatgccaggagagttatttcagaggcttttaagagtgtcgtcattgagaacagatagggtggtggttaccagaatagcagaatgtatatttgagataggtcatggagaaagaatgccagaattcagtgaaagggaaaaatagaggcagttgcatagttggcgtacaggaataggcagacagctttgctactgactgtgatggagagattacacatttccttgcagtgttgccaaattaatctgcttgtttcatggttaggtagaacataatctgcacagtgtcatctgagagacacagtggtgttatctccttctccccatattctatgtgttcctgacacatgtaggataccccctaatctgcccataataatagcctgacaaattttagaaatgtattagttagcctctactcactatatactataactaactccaaagtctttcctaagaatataaaaaaccctaagacacagtaacatattaagtcatttctaaatcttaatgttttaactgatatggattgttggattgtaactgggccacttataagagatatatgtttggaatgtggacagatatccatagctgaagtatggatgacccttagggaatgagggtcaggatgaaatatgaataattaaaacaattaaaattctcctgtgggtgacttgtgtttgggatatccaggaaggacaactgcgtcaaatcactgagggggcctcaagaccattacagtgtccttagtccttatttgcagttaaaagttaatgacaaatgtcatctggaagtgggatcagaactagacttgcagaaaatctcatatgtttccaggtgccactacatacccatgtaattctaattctggggaaatgagaaaaaatacatatacaaatttaactaacccttagagacaaaaaataatgtcagaattttctttccaggatttgccatatgtccctttcctgataggaattcctcttayaaatagattatgccatggcacacagtaccacttatacaggtagtgacgtttcctactcataggaaaaagacacccagtggaagtacatgcattttaccattaagacgatatatataaatgtgacatttcctgaacgtaactattggtagacatgtctgagaacaagtaaaatctattcagtgtttagtttttttttcctcagaatgatggaattcttaaatccaaaatgtttcctgtattgaattccactcc

SEQ ID NO: 722226 - DNA, 958 bp, Homo sapiens
aatgtcccccggggtaggggtattatccacacttgaaaaccactgggctaatagaaggctgaaggaaaaatgtttctggttgcaagaggcttgcattaaggatgtgagtaaggatattgctctataacaaayacaaatgggactaactcagatttaggggccctgtcatgtgttccagtcctcctttgcacatgtccttacttagctattctcattaatgtaccataatccctggttttcttattttacttgcccattattttacatataataagaatgtaatcaatgttggtgagttaatgaatgaatatggtaggtacgatgtaagatgataactttggggctgtggctgggtgtttccttttctaaggatccttgcagaatcagatatgcaacaatggagagcaggccacagccatttaaaaaaagttgctttagtggtaagttgttccaagtaatgttcctcattatcaagtatccagtgcttgtcatgtgctaaacatcctactatctgccaacataatacactgtaggcttttcttaagaaccttacactctaaaaagggggaaattggtaaacactactggtggaatatttatctcataaacagataaaagttacataaactcataaaatgaggaaggggttacacggctctgggtgagggcctgtgcctcattccatatcactagtaaatacttgtaggttccagatctataaaataatgggatacatccatttggtatccggagcttttgaagtttctaggattctaaagggattacatctaaaatatgggcctccagctccatattgatggtgaaggttgcatctttgcaacatcttcttttgtgggtactctgaccaagagctaatattgatgagtacctatgatgacagggcccagagagactcttggtacacacacctcatatcatactcataacaaccttgcaa

SEQ ID NO: 722227 - DNA, 958 bp, Homo sapiens
aatgtcccccggggtaggggtattatccacacttgaaaaccactgggctaatagaaggctgaaggaaaaatgtttctggttgcaagaggcttgcattaaggatgtgagtaaggatattgctctataacaaacacaaatgggactaactcagatttaggggccctgtcatgtgttccagtcctcctttgcacatgtccttacttagctattctcattaatgtaccataatccctggttttcttattttacttgcccattattttacatataataagaatgtaatcaatgttggtgagttaatgaatgaatatggtaggtacgatrtaagatgataactttggggctgtggctgggtgtttccttttctaaggatccttgcagaatcagatatgcaacaatggagagcaggccacagccatttaaaaaaagttgctttagtggtaagttgttccaagtaatgttcctcattatcaagtatccagtgcttgtcatgtgctaaacatcctactatctgccaacataatacactgtaggcttttcttaagaaccttacactctaaaaagggggaaattggtaaacactactggtggaatatttatctcataaacagataaaagttacataaactcataaaatgaggaaggggttacacggctctgggtgagggcctgtgcctcattccatatcactagtaaatacttgtaggttccagatctataaaataatgggatacatccatttggtatccggagcttttgaagtttctaggattctaaagggattacatctaaaatatgggcctccagctccatattgatggtgaaggttgcatctttgcaacatcttcttttgtgggtactctgaccaagagctaatattgatgagtacctatgatgacagggcccagagagactcttggtacacacacctcatatcatactcataacaaccttgcaa

SEQ ID NO: 722228 - DNA, 1170 bp, Homo sapiens
tgactgtatttgaagataatgtctttaatcaagtaaggttaaattgttacaggtagttaggcgtgagcgggcaggagagggctctccccgccacccactagaagtcttgagtgatggttcagtaattgttgcattgcctctctaaaagtgatacattggcagccggtgctagggagaggccattcagtgatggtccacacctgttaacgttaaaaactgttaattagaggcagacctcatggagaagaaatttcctgggcgtgcacattaacagacaaaaatagcggagtgtgatcttcggcgtatcctctacctgaaaaaggaagaaagcctcagataagcatgcgtacaatttactgaacacactacatgagctcacttcccaagggtaagaagggctctggccgggcgcggtggctcatgcctgtaatcccagcactttgtgaggccgaggcgggcggatcacgaggtcaggagatagagaccatcctggttaacacggtgaaaccccgtctctactaaaaaaaaaacacacacaaaaaaattagccgggtgtgttggcgggcgcctgtagtcccagctacgccggaggctgaggcaggagaatggcgtgagcccgggaggcggagcttgcagtgagccccgagatcacgccactgcaagaatccaatcaagggaaagaggctataaaggtcatagcatcacggttaaacggggctttttaccttctttaatcttcatgagccctcttggatctcttctaagtgaactttcctttctttcctgttctaaggccttttaagtaaacttccactcctgctctaaaatgtgcctaggtctcttgttctgctttatgcccctcagtctagttgtttcttctgaggaggcaagatttaaagttgcggcmgacctgtgcggatttgctactggtaactcctggtaactccggtctcttccaccactaacaaaatgaggtccttgaggtgggctctaattcagtatgaccggtatccttacaaagaggagatgaggacctaggcacactcagaggaaagatcgcttgaagacacaaggagaagatgacactgtacaagctaaggaaagaggcctcagaagaaaccaaccctgctgacacctgggtcctggacttctatcccacagaactgtgag

SEQ ID NO: 722229 - DNA, 1170 bp, Homo sapiens
tgactgtatttgaagataatgtctttaatcaagtaaggttaaattgttacaggtagttaggcgtgagcgggcaggagagggctctccccgccacccactagaagtcttgagtgatggttcagtaattgttgcattgcctctctaaaagtgatacattggcagccggtgctagggagaggccattcagtgatggtccacacctgttaacgttaaaaactgttaattagaggcagacctcatggagaagaaatttcctgggcgtgcacattaacagacaaaaatagcggagtgtgatcttcggcgtatcctctacctgaaaaaggaagaaagcctcagataagcatgcgtacaatttactgaacacactacatgagctcacttcccaagggtaagaagggctctggccgggcgcggtggctcatgcctgtaatcccagcactttgtgaggccgaggcgggcggatcacgaggtcaggagatagagaccatcctggttaacacggtgaaaccccgtctctactaaaaaaaaaacacacacaaaaaaattagccgggtgtgttggcgggcgcctgtagtcccagctacgccggaggctgaggcaggagaatggcgtgagcccgggaggcggagcttgcagtgagccccgagatcacgccactgcaagaatccaatcaagggaaagaggctataaaggtcatagcatcacggttaaacggggctttttaccttctttaatcttcatgagccctcttggatctcttctaagtgaactttcctttctttcctgttctaaggccttttaagtaaacttccactcctgctctaaaatgtgcctaggtctcttgttctgctttatgcccctcagtctagttgtttcttctgaggaggcaagatttaaagttgcggccgacctgtgcggatttgctactggtaactcctggtaactccggtctcttccaccactaacaaaatgaggtccttgaggtgggctctaattcagtatgaccggtatccttacaaagaggagatgaggacctaggcacactcagaggaaagatcgcttgaagacacaaggagaagatgacactgtacaagctaaggaaagaggcctcagaagaaaccaaccctgctgacacctgggtcctggacttctatcccrcagaactgtgag

SEQ ID NO: 722230 - DNA, 657 bp, Homo sapiens
cgccataaatgactttgtactttacttcatcctcttcattaacataggacgtacccaaagtatctaatggagtcctaaaaattcagtaacggggcttgagtttctatgctcaggcccactctcgcactgtggagtgtactttccttttcaataaaacccttcattccttccttgcttagtttgtgcgttttgtccatttctttgttcaagatgcctagaacctgggcaccctcccccggtgatatttgctttgattgaaacctctgttggatggtgcatccttaaagaagggaaaattttgagcaactgctttcctaacacccaaaaccctatgcagtgatgggtgacgcaggagtgagcatctacaagccgggtcatgagaattccttccctgaattttagaattggctataaaaaaattccagactcagtctgctttttccaaaatatcataaagatgtgactctggagtgyttgtggtcgtgatttctgacagaaagatttaagaaactgcagaaattcattctcactgaggaaaaaagaaaaagataaaaatagcagaattagccagtcagaaaatcatacaacagtttgaaacagaatgttagacatgacatgtctgtatattgaaatcatgttatatattaagagagagaa

SEQ ID NO: 722231 - DNA, 890 bp, Homo sapiens
cccttttttggtttcatttccgtgatcagtattttattgtttccaggaatcagtcttgatagtaggaaacatattttggtagatttgttagatttatacataattgcatgtgtggacatttaaaacttttaatttccaactggtcattgctactctatggaaacaaaattgttttctgtaaactaaatttgtagtcagtgatcttgctcaacgtaactgttagttctatttggaaactatgtatataaaaaaataaagtgacatcattaaaatcctaacagggaaaaagaaccctgtaaacaaagactcctacattcagcatgttaagtagttcaattttattttaatgtagacatgaataattaaaatcaatatcatgaaccccaaggtaatcattaatttttaagagatataaataatgagtcaatgttggtgayaatttggttaaaaataatataaaacagatagtataaaaggaacagaaacagaaagaataaaatatgagaaagatggtagacattatttcaataatatcattaataattcaataaaattgaaatacacttgagcatacatttaaaaagatgacacttaaatggccaaaaatataaataaatgttcatctaacttattataaaagcttagaagagtcaggattctcatatactataccagaaataagaatttctacaactttggaaattttttaataaatttgaagataaatatattttaactcattcatcttacttttagatatatgccccctaaaaatacgtacatctgtattaaagacaagcaaaaatattcatggcctgagtatacataatagccgaaatctaggaacaacctaaaagttcattcagtacaaaaataggaaaataaatttt

SEQ ID NO: 722232 - DNA, 890 bp, Homo sapiens
cccttttttggtttcatttccgtgatcagtattttattgtttccaggaatcagtcttgatagtaggaaacatattttggtagatttgttagatttatacataattgcatgtgtggacatttaaaacttttaatttccaactggtcattgctactctatggaaacaaaattgttttctgtaaactaaatttgtagtcagtgatcttgctcaacgtaactgttagttctatttggaaactatgtatataaaaaaataaagtgacatcattaaaatcctaacagggaaaaagaaccctgtaaacaaagactcctacattcagcatgttaagtagttcaattttattttaatgtagacatgaataattaaaatcaatatcatgaaccccaaggtaatcattaatttttaagagatataaataatgagtcaatgttggtgataatttggttaaaaataatataaaacagatagtataaaaggaacagaaacagaaagaataaaatatgagaaagatggtagacattatttcaataatatcattaataattcaataaaattgaaatacacttgagcatacatttaaaaagatgacacttaaatggccaaaaatataaataaatgttcatctaacttattataaaagcttagaagagtcaggattctcatatactataccagaaataagaatttctacaactttggaaattttttaataaatttgaagataaatatattttaactcattcatcttacttttagatatatgccccctaaaaataygtacatctgtattaaagacaagcaaaaatattcatggcctgagtatacataatagccgaaatctaggaacaacctaaaagttcattcagtacaaaaataggaaaataaatttt

SEQ ID NO: 722233 - DNA, 722 bp, Homo sapiens
gtttttggatttgggacatgtccctcaaaccctcattatattaatacatactggaggatgtgttatcagcaagacttgagcattttttccctgaaattttcttatatttcataacaaaaaaatacattcaacatcaatagctgctgtatacccatgttggtgcaataagactgatgctgaataacaacctgtatatttctcaagccctttttcacattccttagttccattattcccaatataaaacatctcctttaagaaaaatctttaatgcttggctagataaaattgactyttcctatggaagcacctgacctagattgaatccatgcattgaaagacaatcacagaaagtgcaggaaactttttataataaaataaatttgaactctgcaggttagactgcattggtctgggatgtagacgtagaatgggtatttgtagctttaagtgaatgcagataatttttgctggttagtgttgacaaatgaattcttctgcatgagatttttaatggcaaagaaagccattgtgacgtttatgctgctataaaaaagatcataaaataattcatgtgataatagtactttcctaaaatatataatgtcatgtgaatgaatagtaacaatggtttactataatcataataatgaatttaataggtcattcattaagaggctgaaagaaatattcaagaaaattcattgaggtaatgtgacaga

SEQ ID NO: 722234 - DNA, 722 bp, Homo sapiens
gtttttggatttgggacatgtccctcaaaccctcattatattaatacatactggaggatgtgttatcagcaagacttgagcattttttccctgaaattttcttatatttcataacaaaaaaatacattcaacatcaatagctgctgtatacccatgttggtgcaataagactgatgctgaataacaacctgtatatttctcaagccctttttcacattccttagttccattattcccaatataaaacatctcctttaagaaaaatctttaatgcttggctagataaaattgactcttcctatggaagcacctgacctagattgaatccatgcattgaaagacaatcacagmaagtgcaggaaactttttataataaaataaatttgaactctgcaggttagactgcattggtctgggatgtagacgtagaatgggtatttgtagctttaagtgaatgcagataatttttgctggttagtgttgacaaatgaattcttctgcatgagatttttaatggcaaagaaagccattgtgacgtttatgctgctataaaaaagatcataaaataattcatgtgataatagtactttcctaaaatatataatgtcatgtgaatgaatagtaacaatggtttactataatcataataatgaatttaataggtcattcattaagaggctgaaagaaatattcaagaaaattcattgaggtaatgtgacaga

SEQ ID NO: 722235 - DNA, 1598 bp, Homo sapiens
catatacacacatatttttaaggcataataacattgagattccgtgggggaagaaaatttaaaatacaacttcaaggagaaaaaaaagctgtaaaatttctggtcaaagaagtattttttgttcatgtattttttaaaatggatagctgaatcaaattactatatttatatttcactggatataattaagagtggtrtaactgttttatattcaaatgtcatacaaatataccagaaattaagtcctttgcagctatttaaatgtaaaatagatatcagatacacttaattttagatctctattaaagcagtgagaatatacaatttttaaaatttttttaaggattaatacgctaacaaacatgttcaaaaacaatgctatattggaacatatgctactggatccacataaagtgtaaatataatggaatttccgtcatgactacttagtctatctcaatgaatttaactgatctcaacacattctctatcaacaatctacgaacaatatgctcatatgctagactttgtcagacattatgtaatgcatcaataaataatgccttttactttctgtttactttaagcatatctgtattagttaccattcacatttccttttttattatctcatttctgtctttcccattatgaaaaggctttctaataccattttgattctcagtatttccaaggactaatcctcatgcatcatagaactggctggaggacagatctctgaaattcctatttatgaggctcaaatcttataacagcttcaaagtttcctggattgatttctacaaataagtcctttattaaagattttttgtgattcaaaatagacatgatgaaaaaaagatcctcggcactagtcacatacctgtttataatttatatatatatatatatacacacacacacacacacatatatatatatactgaaaatatacatatatgttcttatatgaaatccaatttcccttcagtgggaaattataaaaatattcaagtatatttaatcaaatagctaaacaattctcatttaaatactatttgatggcaaattgcagattatgttatccaatttgttatagtaacattaaattactgaattacttgtaagactatttaaaatgcaattataaagtcttttgatgcttttcttgattgataagtattacagaaatattgaaagctgcaacaaactttgttcacttaatctagagtgtgtttctcatctaaaatcacttcttttttagctttaattaggtataatcaatataaaaaatcttcttcagtttggacatatgcatgtatctgtgataccattaccacaaccaaggtgctaaatatatccatcacctccaaaaatttccttgtgttcttttctgaggtttgtttgtttgttttgttatgttctgtttctgttttcatttggctttggtaagaacacaaataagatctataccctcaacatattttgaagtatatagtaccatattgttaactataggtactgtattgtacggtagatctctagaacttattcatcttgcatgacaggaactttatacccattgaaaaataatttcc

SEQ ID NO: 722236 - DNA, 1520 bp, Homo sapiens
  misc_feature 659, 660, 661, 662, 663, 664, 665, 666, 667, 668, 669, 670,671, 672, 673, 674, 675, 676, 677, 678, 679, 680, 681, 682,683, 684, 685, 686, 687, 688, 689, 690, 691, 692, 693, 694,695, 696, 697, 698, 699, 700, 701, 702, 703, 704, 705: n = A,T,C or G
  misc_feature 706, 707, 708, 709, 710, 711, 712, 713, 714, 715, 716, 717,718, 719, 720, 721, 722, 723, 724, 725, 726, 727, 728, 729,730, 731, 732, 733, 734, 735, 736, 737, 738, 739, 740, 741,742, 743, 744, 745, 746, 747, 748, 749, 750, 751, 752: n = A,T,C or G
  misc_feature 753, 754, 755, 756, 757, 758: n = A,T,C or G
ttgcattgtgcagcagagggacaattactttggctgaggcatcaataatggatggaattttatctcaccattaaatgttaaaattgtgaggaagcagcgtggaaacgtttatgtcatactagatgaaatgcataaattaaaactgaactcacataataaagagaatggtggaccatacatatacacsagctgtgtctcttccagataggctttagttccataattacagaagatactcaagaaacaaaaacgtaactagcttcccatgttaatcctttcaccaggtagtagaccccaagcctctaaattgcagcgcccacccacattttccatttatagtttatccaattaatcatctttttgtgccaaaacgcttgttcttcccaccacatccagcttcatattttcaaagaattggcagcactcggcaaaataaataaataaataaataaataaataaataaataaaataaataagggaacagagaaataagtttttaaagtttaaggagttacgggttttccctccgctcacctttcaattttttttcttaaatgttatacctattttacaacctccaaactgaaaatgcagttaaaaataaaaaggtcaatatcctgcgtctaccttgtcccggactctcgagctccacaaaacnnnnnnnnnnnnnnnnnnnnnnnnnnnnnnnnnnnnnnnnnnnnnnnnnnnnnnnnnnnnnnnnnnnnnnnnnnnnnnnnnnnnnnnnnnnnnnnnnnnnctggtgtgtgcatttttatactacattggaactgacccagtaaataagatgtgtatcaacagttgggccataaattagtgtaaccttagttctctttggacttaacttgctgttctctgcctcatattatgtcttttttccctggcttaccatctttcttgtgcttctttaaagtagcttttaactgaagttctattttcatatcttctctcacaagtttttagtttgataattagaaaaatagtgatgcagggagtttggaggggatctcattttgagggaaataatgtattaaattgttttctcattgctgtataacctgttttcacaaaaataatctttagtgactcttgggacctttctgaatttgtaatagcattttgtgtttgtctccattgaccaataaacttcagttttcttcactcggagtgtctttaaattttcaggtttatcaattatatcttgtacaatatgtgttatctattatataactatatgaacatttaaaaatgcagtttaggagtgtgaacttttctatccttttttccaaagattgtaagaagaaattaatttgatttctctattatttccttttagtttcaagtgcttctttgagctgtcattttcaaaacaggttatactaactattgggctaccttcctatttttggtatgtgtagagaatttcttcctaatgattttggattactctagatgatgtgtctttaattatttattgatattcttaatttttagtttgttt

SEQ ID NO: 722237 - DNA, 1520 bp, Homo sapiens
  misc_feature 659, 660, 661, 662, 663, 664, 665, 666, 667, 668, 669, 670,671, 672, 673, 674, 675, 676, 677, 678, 679, 680, 681, 682,683, 684, 685, 686, 687, 688, 689, 690, 691, 692, 693, 694,695, 696, 697, 698, 699, 700, 701, 702, 703, 704, 705: n = A,T,C or G
  misc_feature 706, 707, 708, 709, 710, 711, 712, 713, 714, 715, 716, 717,718, 719, 720, 721, 722, 723, 724, 725, 726, 727, 728, 729,730, 731, 732, 733, 734, 735, 736, 737, 738, 739, 740, 741,742, 743, 744, 745, 746, 747, 748, 749, 750, 751, 752: n = A,T,C or G
  misc_feature 753, 754, 755, 756, 757, 758: n = A,T,C or G
ttgcattgtgcagcagagggacaattactttggctgaggcatcaataatggatggaattttatctcaccattaaatgttaaaattgtgaggaagcagcgtggaaacgtttatgtcatactagatgaaatgcataaattaaaactgaactcacataataaagagaatggtggaccatacatatacacgagctgtgtctcttccagataggctttagttccataattacagaagatactcaagaaacaaaaacgtaactagcttcccatgttaatcctttcaccaggtagtagaccccaagcctctaaattgcagcgcccacccacattttccatttatagtttatccaattaatcatctttttgtgccaaaacgcttgttcttcccaccacatccagmttcatattttcaaagaattggcagcactcggcaaaataaataaataaataaataaataaataaataaataaaataaataagggaacagagaaataagtttttaaagtttaaggagttacgggttttccctccgctcacctttcaattttttttcttaaatgttatacctattttacaacctccaaactgaaaatgcagttaaaaataaaaaggtcaatatcctgcgtctaccttgtcccggactctcgagctccacaaaacnnnnnnnnnnnnnnnnnnnnnnnnnnnnnnnnnnnnnnnnnnnnnnnnnnnnnnnnnnnnnnnnnnnnnnnnnnnnnnnnnnnnnnnnnnnnnnnnnnnnctggtgtgtgcatttttatactacattggaactgacccagtaaataagatgtgtatcaacagttgggccataaattagtgtaaccttagttctctttggacttaacttgctgttctctgcctcatattatgtcttttttccctggcttaccatctttcttgtgcttctttaaagtagcttttaactgaagttctattttcatatcttctctcacaagtttttagtttgataattagaaaaatagtgatgcagggagtttggaggggatctcattttgagggaaataatgtattaaattgttttctcattgctgtataacctgttttcacaaaaataatctttagtgactcttgggacctttctgaatttgtaatagcattttgtgtttgtctccattgaccaataaacttcagttttcttcactcggagtgtctttaaattttcaggtttatcaattatatcttgtacaatatgtgttatctattatataactatatgaacatttaaaaatgcagtttaggagtgtgaacttttctatccttttttccaaagattgtaagaagaaattaatttgatttctctattatttccttttagtttcaagtgcttctttgagctgtcattttcaaaacaggttatactaactattgggctaccttcctatttttggtatgtgtagagaatttcttcctaatgattttggattactctagatgatgtgtctttaattatttattgatattcttaatttttagtttgttt

SEQ ID NO: 722238 - DNA, 1520 bp, Homo sapiens
  misc_feature 659, 660, 661, 662, 663, 664, 665, 666, 667, 668, 669, 670,671, 672, 673, 674, 675, 676, 677, 678, 679, 680, 681, 682,683, 684, 685, 686, 687, 688, 689, 690, 691, 692, 693, 694,695, 696, 697, 698, 699, 700, 701, 702, 703, 704, 705: n = A,T,C or G
  misc_feature 706, 707, 708, 709, 710, 711, 712, 713, 714, 715, 716, 717,718, 719, 720, 721, 722, 723, 724, 725, 726, 727, 728, 729,730, 731, 732, 733, 734, 735, 736, 737, 738, 739, 740, 741,742, 743, 744, 745, 746, 747, 748, 749, 750, 751, 752: n = A,T,C or G
  misc_feature 753, 754, 755, 756, 757, 758: n = A,T,C or G
ttgcattgtgcagcagagggacaattactttggctgaggcatcaataatggatggaattttatctcaccattaaatgttaaaattgtgaggaagcagcgtggaaacgtttatgtcatactagatgaaatgcataaattaaaactgaactcacataataaagagaatggtggaccatacatatacacgagctgtgtctcttccagataggctttagttccataattacagaagatactcaagaaacaaaaacgtaactagcttcccatgttaatcctttcaccaggtagtagaccccaagcctctaaattgcagcgcccacccacattttccatttatagtttatccaattaatcatctttttgtgccaaaacgcttgttcttcccaccacatccagcttcatattttcaaagaattggcagcactcggcaaaataaatarataaataaataaataaataaataaataaaataaataagggaacagagaaataagtttttaaagtttaaggagttacgggttttccctccgctcacctttcaattttttttcttaaatgttatacctattttacaacctccaaactgaaaatgcagttaaaaataaaaaggtcaatatcctgcgtctaccttgtcccggactctcgagctccacaaaacnnnnnnnnnnnnnnnnnnnnnnnnnnnnnnnnnnnnnnnnnnnnnnnnnnnnnnnnnnnnnnnnnnnnnnnnnnnnnnnnnnnnnnnnnnnnnnnnnnnnctggtgtgtgcatttttatactacattggaactgacccagtaaataagatgtgtatcaacagttgggccataaattagtgtaaccttagttctctttggacttaacttgctgttctctgcctcatattatgtcttttttccctggcttaccatctttcttgtgcttctttaaagtagcttttaactgaagttctattttcatatcttctctcacaagtttttagtttgataattagaaaaatagtgatgcagggagtttggaggggatctcattttgagggaaataatgtattaaattgttttctcattgctgtataacctgttttcacaaaaataatctttagtgactcttgggacctttctgaatttgtaatagcattttgtgtttgtctccattgaccaataaacttcagttttcttcactcggagtgtctttaaattttcaggtttatcaattatatcttgtacaatatgtgttatctattatataactatatgaacatttaaaaatgcagtttaggagtgtgaacttttctatccttttttccaaagattgtaagaagaaattaatttgatttctctattatttccttttagtttcaagtgcttctttgagctgtcattttcaaaacaggttatactaactattgggctaccttcctatttttggtatgtgtagagaatttcttcctaatgattttggattactctagatgatgtgtctttaattatttattgatattcttaatttttagtttgttt

SEQ ID NO: 722239 - DNA, 1062 bp, Homo sapiens
gctaggtctaaaaaacccatcctagtctgataaactcatctttccagcttaatctcgcactatttcctcaacatccatatactatatttttctctaaagtctgcatctgtttatgactgttctcaaatcacttgcttgtaactgcctactcttccttcaaccagtcacttcaaacgtcatcagttttgtgaagtcttctcttccccactccaaatggaattaattgcaattccataatacttatattgtggtactcctcatattatattgagattatttgtttctgtgtttcttttctcccactattttgtgagattcttaaattcaagaaagctgtcattcttatctacttcttgcacctcatacagtttctggtacatgggagatattcattagggaaactgtgatatgagtaaatatcagaaatgtacatctctagtcttgatctctcttacaaagagtaacttataaatgtccggatgattcttgaatattttcacttgaatgcctttccatttattttgtttaaaagctgaatttatcataaaacttgaacgtgtatatttttattggtgttattcatacttgccaaaatttggaagcaaccaacatgtctcccagtaggtagatggataaataaactgcattacatccatgcartggaatattattcgttgctaaaaagaaatgagctgtcaagccataaaaagacatggcagaaacttgaacgcatatcaccaagtgaaaggtctaaaaaaggtacacacaataagattccaactacttgacaccctggaaaagtcaacgctacggagacaggaaaaagatgagtagtttccagaggctagatgagaggaaaccatggacaggcagagcacagaggaattttaggacagtgaaaccactctgtattataaaataatggtggatacatgtattacatttgtccaaatccatagactgtgcaacacagagagaaccctaatgtaaactatggactctaggtgatgatgatgtgtcagtgtaggcgcatcaattgtaacaaatgtaccactctggtgg

SEQ ID NO: 722240 - DNA, 597 bp, Homo sapiens
tttgtgccgtgccctctgcgcctccctgctcccagctcctcgatgccacttgctgttgtcctcattctgcattttctccctgcgttgccttcctggtcagaactcagtccccctccccatgcctggcatagtgctgtgggcaaggtctgcaggccgcaggcttgtcaacayggagacccagatctccctttccagagaggcaggggctgtcatgggaaagaggcttggggtcagaaaaacctggtttcattccagcgctgccactttctactcctgcaacttggatcaagttatttctaagcctcaatttacttgtctacgaagtggagctatgaagacatagctccagggttagcatgagaattaaatgagaaaatacagtgcctggtgccagttgctacttactgagggccaatctcttctgcttccatctaactgctccagaacttgataagctgctcaagcagctaccattttcaaagcacctcatttgtgctaggagggttgctgtcagctcccatcatgcagtgatgagtctgagcagcccctgcccttagggagctccagcagtgggtccagcaccctcttcctgctgca

SEQ ID NO: 722241 - DNA, 597 bp, Homo sapiens
tttgtgccgtgccctctgcgcctccctgctcccagctcctcgatgccacttgctgttgtcctcattctgcattttctccctgcgttgccttcctggtcagaactcagtccccctccccatgcctggcatagtgctgtgggcaaggtctgcaggccgcaggcttgtcaacacggagacccagatctccctttccagagaggcaggggctgtcatgggaaagaggcttggggtcagaaaaacctggtttcrttccagcgctgccactttctactcctgcaacttggatcaagttatttctaagcctcaatttacttgtctacgaagtggagctatgaagacatagctccagggttagcatgagaattaaatgagaaaatacagtgcctggtgccagttgctacttactgagggccaatctcttctgcttccatctaactgctccagaacttgataagctgctcaagcagctaccattttcaaagcacctcatttgtgctaggagggttgctgtcagctcccatcatgcagtgatgagtctgagcagcccctgcccttagggagctccagcagtgggtccagcaccctcttcctgctgca

SEQ ID NO: 722242 - DNA, 597 bp, Homo sapiens
tttgtgccgtgccctctgcgcctccctgctcccagctcctcgatgccacttgctgttgtcctcattctgcattttctccctgcgttgccttcctggtcagaactcagtccccctccccatgcctggcatagtgctgtgggcaaggtctgcaggccgcaggcttgtcaacacggagacccagatctccctttccagagaggcaggggctgtcatgggaaagaggcttggggtcagaaaaacctggtttcattccagcgctgccactttctactcctgcaacttggatcaagttatttctaagcctcaatttacttgtctacgaagtggagctatgaagacatagctccagggttagcatgagaattaaatgagaaaatacagtgcctggtgccagttgctacttactgagggccaatctcttctgcttccatctaactgctccagaacttgataagctgctyaagcagctaccattttcaaagcacctcatttgtgctaggagggttgctgtcagctcccatcatgcagtgatgagtctgagcagcccctgcccttagggagctccagcagtgggtccagcaccctcttcctgctgca

SEQ ID NO: 722243 - DNA, 619 bp, Homo sapiens
tacagagttccaacttcactatctgacccaaatcttctctctgcttctctcaaactttggaacctcggacaagttaactttgtctcctgaggcttgtttctccatctctaacccaaggatatctctgctgcttactcagggttatagtgagaattaaaggaggctatgggcgtttttatttttatttattttttttgagatagggtctttctctgttgtccaggctggagtgcagtagcatgatcttggctcactacagcccctgcctyctgggttcaagcaattctcatacttcagcctcccaagtagctgggactacaggtgcatgccaccacacccagctaatttttgtatttttattggagacagggtttcaccatgttggccaggctggtctcgaactcctgacctcaggtgatctacccatctcggcctcccaaagtgctgggattacaggtgtgagccaccgcacccggcctgctattctgacttttaaagtagtaatagctcctgttgattgggtaccgattgtgtgcagtccctatcctagcacttcatagacaccaagaaccccatgacaacaccctgtaaagtctttctactacccatgggcttcact

SEQ ID NO: 722244 - DNA, 619 bp, Homo sapiens
tacagagttccaacttcactatctgacccaaatcttctctctgcttctctcaaactttggaacctcggacaagttaactttgtctcctgaggcttgtttctccatctctaacccaaggatatctctgctgcttactcagggttatagtgagaattaaaggaggctatgggcgtttttatttttatttattttttttgagatagggtctttctctgttgtccaggctggagtgcagtagcatgatcttggctcactacagcccctgccttctgggttcaagcaattctcatacttcagcctcccaagtagctgggactacaggtgcatgccaccacacccagctaatttttgtatttttattggagacagggtttcrccatgttggccaggctggtctcgaactcctgacctcaggtgatctacccatctcggcctcccaaagtgctgggattacaggtgtgagccaccgcacccggcctgctattctgacttttaaagtagtaatagctcctgttgattgggtaccgattgtgtgcagtccctatcctagcacttcatagacaccaagaaccccatgacaacaccctgtaaagtctttctactacccatgggcttcact

SEQ ID NO: 722245 - DNA, 643 bp, Homo sapiens
ttggtctagtgtctcagaacacaagagatacacatgttccagatataggttctggaagagtatcaggcccttggtcagagagaggcaggagccaggagggagcttgggaatctggctttctgaaatgcacacaacccagaagaaactctattttaagtttttggacattataaacaatgacttaatttatttctaccttaaaatagctggattggacttttctcaataacytttaagaacggcatatttataaaacaaattgataacagaacttttagaacaaaaagtttgggacaaatttcataaaaataaatttaaaataggtgacttgtcaataataaaaaggtacaaagttacttatcaaaaggcgtagggtatttaaaaaactcgtgacttacagtgaaagtgagtaaggtggaggtattactgtctagatttttaactagttaatgtctaccgtgtaagcctgtatctgaaacactggtgaaaaattacggaggcaaagtgaagagtctgtaaaattaggtccaaacactggagagagcaaggagtaggaagtgcagagaaaacactgtggtcttagaactctctatcttcctgagaaatagcccagttgggctgaggtctgggctggtggacacca

SEQ ID NO: 722246 - DNA, 651 bp, Homo sapiens
tggaaaaataggaatgtttgctcctatgctcaaaacgtgacacagctgtcgggggcrccattcattatatataaatacaacgtaacctccatggagaacacactgtggatggtgtcccctagaggagtactgcatacttctttgctgtagtacagcaggtcctcaaacagcaatggttttgttcaacatcattgtgtcataacttttaggaggggaataaaaaccagttctcggttggggccactctctgtgtggagactgcatgttctctcatgctgtgtgggttttctctgggtactctcacatcccaaagatgtgccgttaggtgaactggggtatctacatggtcctaatctgagtgtgtgtgtgtgtgtgtgtgtgtgtgtgtgtgtgagagagagagagagagagagagtgtgtgtgtgtgtgtgtgtgtgtgcacctgcaatgggatggtgtcctgttcaaggtcgattcctaccttgcagcttgcagagctgctgggatgggctgtggccaccctcaaccctggactggaataagcaagttggaaaataaatgagtgaataaatacaaattcttataaaatacaaatctgttaaagcaggtgataatcacacaaacgtacaacaataaacactgcaggacaac

SEQ ID NO: 722247 - DNA, 651 bp, Homo sapiens
tggaaaaataggaatgtttgctcctatgctcaaaacgtgacacagctgtcgggggcgccattcattatatataaatacaacgtaacctccatggagaacacactgtggatggtgtcccctagaggagtactgcatacttctttgctgtagtacagcaggtcctcaaacagcaatggttttgttcaacatcattgtgtcataacttttaggaggggaataaaaaccagttctcggttggggccactctctgtgtggagactgcatgttctctcatgctgtgtgggttttctctgggtactctcacatcccaaagatgtgccgttaggtgaactggggtatctacatggtcctaatctgagtgtgtgtgtgtgtgtgtgtgtgtgtgtgtgwgtgagagagagagagagagagagagtgtgtgtgtgtgtgtgtgtgtgtgcacctgcaatgggatggtgtcctgttcaaggtcgattcctaccttgcagcttgcagagctgctgggatgggctgtggccaccctcaaccctggactggaataagcaagttggaaaataaatgagtgaataaatacaaattcttataaaatacaaatctgttaaagcaggtgataatcacacaaacgtacaacaataaacactgcaggacaac

SEQ ID NO: 722248 - DNA, 651 bp, Homo sapiens
tggaaaaataggaatgtttgctcctatgctcaaaacgtgacacagctgtcgggggcgccattcattatatataaatacaacgtaacctccatggagaacacactgtggatggtgtcccctagaggagtactgcatacttctttgctgtagtacagcaggtcctcaaacagcaatggttttgttcaacatcattgtgtcataacttttaggaggggaataaaaaccagttctcggttggggccactctctgtgtggagactgcatgttctctcatgctgtgtgggttttctctgggtactctcacatcccaaagatgtgccgttaggtgaactggggtatctacatggtcctaatctgagtgtgtgtgtgtgtgtgtgtgtgtgtgtgtgtgwgagagagagagagagagagagagtgtgtgtgtgtgtgtgtgtgtgtgcacctgcaatgggatggtgtcctgttcaaggtcgattcctaccttgcagcttgcagagctgctgggatgggctgtggccaccctcaaccctggactggaataagcaagttggaaaataaatgagtgaataaatacaaattcttataaaatacaaatctgttaaagcaggtgataatcacacaaacgtacaacaataaacactgcaggacaac

SEQ ID NO: 722249 - DNA, 651 bp, Homo sapiens
tggaaaaataggaatgtttgctcctatgctcaaaacgtgacacagctgtcgggggcgccattcattatatataaatacaacgtaacctccatggagaacacactgtggatggtgtcccctagaggagtactgcatacttctttgctgtagtacagcaggtcctcaaacagcaatggttttgttcaacatcattgtgtcataacttttaggaggggaataaaaaccagttctcggttggggccactctctgtgtggagactgcatgttctctcatgctgtgtgggttttctctgggtactctcacatcccaaagatgtgccgttaggtgaactggggtatctacatggtcctaatctgagtgtgtgtgtgtgtgtgtgtgtgtgtgtgtgtgtgagagagagagagagagagagwgtgtgtgtgtgtgtgtgtgtgtgtgcacctgcaatgggatggtgtcctgttcaaggtcgattcctaccttgcagcttgcagagctgctgggatgggctgtggccaccctcaaccctggactggaataagcaagttggaaaataaatgagtgaataaatacaaattcttataaaatacaaatctgttaaagcaggtgataatcacacaaacgtacaacaataaacactgcaggacaac

SEQ ID NO: 722250 - DNA, 654 bp, Homo sapiens
aacaagtgtaaaaaatttagagtaaaaatattcaaatagttaagatattatttaagatgtaaaagtaatatcttgttttaatacttcaaataattttaatgtgaattataaagcagttataaaagcaaattctaccaaaaatttttttaaaaaaacagatctaagtaaattagaaaatatacattataccaaagcagatacacacttgaaaatcttcartattaaacaactgttatatgagtttatttttatggcagaaaaaatataatacaaagatcttcaaaattagcattaaataatttaatttttatctttgaagatctttttaaaattttttatgtaacttaatattaatgtggaaactaaactaattattgccaaatattttcaaaaccactaaaactagaatataataattgatcttggcaattttagaaattccttcctgaaacataaatactctaagtacagtcatgtgctgcttaaaaatgaggatacattctaagaaatgagtcaggcaactttgtcgtatagaccatgacagagtgtacttacacaaacctacataattgtatagtctactccatacttaggctacatggtatagtctactgctcctaggctacaaacctatatagcctgttactgtactga

SEQ ID NO: 722251 - DNA, 572 bp, Homo sapiens
gactcaaaagaatgcaaccttttgtctcttatctacttctaacctggaagcccccacttcaagttatcctgccttaccagactgaaccagtgcatatccttcacatattgattgatgtctcgtgtctccctaaaatgtataaaacaaactatacccccgaccaccttggacacatgttatcaagacttcctgaggctatgtcactggtgtgtccttaaccttggcaaaataaactttctaaaatgacwgagacctgtctcagacattttgggttaacatgtataagtgctttgaatgctaatgtcattggattccagtgaagaaaacaaaccaaaatataattcttgcttgaagcaagcatgaattatgagagaacaaatagttttaaagaaatggaagaaggtacaagatgtgaatattaagtaaaagtaaggtgaagaagctggatcaatacaagacaccataagcatttaagtcacgaagcacaagttgccgaatctgaattctgaggagggtatgtctatggttgtatccctaattacttccatataggtcttcttctcaacttcttc

SEQ ID NO: 722252 - DNA, 1039 bp, Homo sapiens
gaaatttgctagttttcacatctaatagaaattataggaggcattcttggaatataattttggccagttttcacttaagcaatccttggccatctaaagtagaatattcaacatagagatgattaatcatttaataggtaatacaaatatragagatgtcataaataaattatatttcccaaagtaaaaatacagctcacagaaaatgagattatttgaaacactgtacatcttatggagagacaatagccaacagagcttatgaccatggggtctggagccaaactacttgaactgggatcaggtttctgtcatttactagctttgtgaccttaggaagtcattcaaattctctgtgcctcaatttcttctttatttgtaaaagaaggaaaattatgccatctatcttaaaaattaattataggattaaatagactatcatctacctggtatattgtaagtggtcctgatgatatcaatgatgacgataaagaaaaagatgataattattacctaggtcaatttattaatgtataagacactctgtttattatttagaattaggtatggagcagccattttcagagacataattggcctgtttagaaatagagtaaaagatgattaatttgtcaagcagaaaaagtctgagttaatttttctgagaaaatgctgttttatttctttcagttatctatttgtctaagtgtgcactttaattcacaagaggcacataaacataaatcattcattacttccttcattcaaatctacttgaagaatatagtgacgtacagtgaaccataatcagagatacttgtgtgttatttcaagtccactatattgacaattttttttacttttctcagtttctattatttatttcttatttcctttttttctcagttttatatttaagttgaggcttataggttcttataggaaataaataagatggcctgtgtataacacttgaccctgttctggttcttttggaagatgtcttgagggcatgagctatagtaaaattaaaaaaaaa

SEQ ID NO: 722253 - DNA, 1245 bp, Homo sapiens
aaaatgtttaataattaactcattaagtgatgtttgcttcaatgtagtggcatccttagcctcggttgaaactcctattattatctgttggtaaatactccctgacctggaccctaaggaaaggcaaaacaacttatttctagaaaaayggctttctatagtaaagttttccaagtccaagtgctgttcttccatcttaagtgatgtttggtgcaaaaaaaaaacatcgtatgtgtaatgaattctagacattttcttgaagagagctataggagactttgatctatgttcttttcatgggagatgggagaagcctacctctgcttagctttctgaaacctctttaggctttgacttgcattaatgaaatgaattccttcagtgcttatgttgcatgtattttaaaagcatgtaataaaaatctactacctaggctttatgtgagttactttattttaaaggcaaagagatcaaatcaattacagtcttgttactgagatctgcaacataaactctaagaaacctgcacatcatcacttctaaactactcctgtgaatttatgaattaagaataaaatgattaggcttctggttctgtaccagtaaacctggtttgttttgcatatataatctactcaaaaggcaagaataagtcttgtcaaacaaatactttgcattaactattattaagaaagaatctaatacaatattattgtatgcagattttatttatccaaacttagttttataaaggaaattgatacttttcctaggtgttcatacagctgtagaattttctttcctcttttctttctttctttttttttaacttagttttcttgctagaggcagagatgtttctggagcaaggcattaaatcaagctgttagctctgccccattattttatacacttcaggttgcaactggaaacacctacatagaaatttatatggttgcattaaataacttcaagctcaatgtgtttcttcaaggatgaactaaatgttcatatgcagcttgtacttaatagtcaagcagaagcacactgaagctacttaaagggtaagaaagagctgagaccttccatagttttcggtgctcaaaatgaaagtttcagtaatgacaaaaaaaaagtcctattaaacacattgctttttatggcctaatttttctgggagctgtattgatcaaaagtattttggcagctgaaactggacaacagaataatgtccaagttcttaca

SEQ ID NO: 722254 - DNA, 624 bp, Homo sapiens
gcgtaatgacaatatgaacttcaaatgaaaaacataagtttgctgtagaaatttaagcatctcagaatgaattggactttataccttatggccacatgaagtagttgttatgcctccttgaatcactggagacatcttcggtgtaagaaaatatttaaatatagctaaagctatattctcttcagtgtaagagaatatttaaatatagctatagtgaagagttgtttgtttcatttttaatcataaaaaagagattcaggtttttggcatacaaagataactcactttttcttccctcgagtagcttctctcaggttaagtttatatagatacacatatatawtatgcacatatgtgtatacatattatacacacatatataagcttaatatgtatatattatagctatacatatattacatatatgatacatgtatacatgtatataaatacacatcgagacacatgcatatatgtatgtatatacacatgtatatgcatatacgtatgtatctctcatatatgtatatatacatacatatataaatatatgtctgtgtctctcatatatgtatgtatccctatgtgaacaataattgtagtgtatgttcaagttcgtcatgt

SEQ ID NO: 722255 - DNA, 974 bp, Homo sapiens
cttgaaaaccattgtattttaaaattaagtacagctgagctgggtggctcatayttattatcccagcactttgagagccctaggcaggaggatcccttcaagtcaggagttcaagagcaactgggcaacaaagtgagactccgtctctccaaaaaataaaaataaaagaataagctgagggtgatggcgtgtgcgtgtagccctatctactctggagggaggctggagtcagaagatcaagtgagcccaggatttggaggttacagtgggctatgattgtgccaatacacaccaacctgggcaacagagcaagatcctgtttcaaaaatataaataaataagaataaaccaagtgcattattcttatagagtctattctcccaaatttgtcgattacaaataaaatttaaatcactaaaacatagttgttttggtgctcccatgctctgcaaatactcaacagtcattcaagtcatcaccttttgttagaattagcaatgtactaaaactacacgaggaaaatttggaatcagctgctccaagggtccatatcaagatttacagtttatgattatatcattttgcaccaaagtggagcttctgaattaaagtgcaaaaataactaagatgtaaaaataaacatatggtaagataatacagatcaaattattaaagagataatataattgttgaattaataattacatatttatgattcttaatatgtacttttgatgtaatgcaattgttagacttacctccaaaatactccttttaaataaatgaagcaattggtctaggtactaatattaccttaataatttttaaacgtttttaaaatagattttatgaaaactaggcgatataatcaaatggcttcaactttattataaatgaatctctggaataaataatcattattttttctacatttatcatgtcctcaaatgtcaaataaacagaattctagaaaa

SEQ ID NO: 722256 - DNA, 974 bp, Homo sapiens
cttgaaaaccattgtattttaaaattaagtacagctgagctgggtggctcatatttattatcccagcactttgagagccctaggcaggaggatcccttcaagtcaggagttcaagagcaactgggcaacaaagtgagactccgtctctccaaaaaataaaaataaaagaataagctgagggtgatggcgtgtgcgtgtagccctatctactctggagggaggctggagtcagaagatcaagtgagcccaggatttggaggttacagtgggctatgattgtgccaatacacaccaacctgggcaacagagcaagatcctgtttcaaaaatataaataaataagaataaaccaagtgcattattcttatagagtctattctcccaaatttgtcgattacaaataaaawttaaatcactaaaacatagttgttttggtgctcccatgctctgcaaatactcaacagtcattcaagtcatcaccttttgttagaattagcaatgtactaaaactacacgaggaaaatttggaatcagctgctccaagggtccatatcaagatttacagtttatgattatatcattttgcaccaaagtggagcttctgaattaaagtgcaaaaataactaagatgtaaaaataaacatatggtaagataatacagatcaaattattaaagagataatataattgttgaattaataattacatatttatgattcttaatatgtacttttgatgtaatgcaattgttagacttacctccaaaatactccttttaaataaatgaagcaattggtctaggtactaatattaccttaataatttttaaacgtttttaaaatagattttatgaaaactaggcgatataatcaaatggcttcaactttattataaatgaatctctggaataaataatcattattttttctacatttatcatgtcctcaaatgtcaaataaacagaattctagaaaa

SEQ ID NO: 722257 - DNA, 974 bp, Homo sapiens
cttgaaaaccattgtattttaaaattaagtacagctgagctgggtggctcatatttattatcccagcactttgagagccctaggcaggaggatcccttcaagtcaggagttcaagagcaactgggcaacaaagtgagactccgtctctccaaaaaataaaaataaaagaataagctgagggtgatggcgtgtgcgtgtagccctatctactctggagggaggctggagtcagaagatcaagtgagcccaggatttggaggttacagtgggctatgattgtgccaatacacaccaacctgggcaacagagcaagatcctgtttcaaaaatataaataaataagaataaaccaagtgcattattcttatagagtctattctcccaaatttgtcgattacaaataaaatttaaatcactaaaacatagttgttttggtgctcccatgctctgcaaatactcaacagtcattcaagtcatcaccttttgttagaattagcaatgtactaaaactacacgaggaaaatttggaatcagctgctccaagggtccatatcaagatttacagtttatgattatatcattttgcaccaaagtggagcttctgaattaaagtgcaaaaataactaagatgtaaaaataaacatatggtaagataatacagatcaaattattaaagagataatataattgttgaattaataattacatatttatgattcttaatatgtacttttgatgtaatgcaattgttagacttacctccaaaatactccttttaaataaatgaagcaattggtctaggtactaatattaccttaataatttttaaaygtttttaaaatagattttatgaaaactaggcgatataatcaaatggcttcaactttattataaatgaatctctggaataaataatcattattttttctacatttatcatgtcctcaaatgtcaaataaacagaattctagaaaa

SEQ ID NO: 722258 - DNA, 974 bp, Homo sapiens
cttgaaaaccattgtattttaaaattaagtacagctgagctgggtggctcatatttattatcccagcactttgagagccctaggcaggaggatcccttcaagtcaggagttcaagagcaactgggcaacaaagtgagactccgtctctccaaaaaataaaaataaaagaataagctgagggtgatggcgtgtgcgtgtagccctatctactctggagggaggctggagtcagaagatcaagtgagcccaggatttggaggttacagtgggctatgattgtgccaatacacaccaacctgggcaacagagcaagatcctgtttcaaaaatataaataaataagaataaaccaagtgcattattcttatagagtctattctcccaaatttgtcgattacaaataaaatttaaatcactaaaacatagttgttttggtgctcccatgctctgcaaatactcaacagtcattcaagtcatcaccttttgttagaattagcaatgtactaaaactacacgaggaaaatttggaatcagctgctccaagggtccatatcaagatttacagtttatgattatatcattttgcaccaaagtggagcttctgaattaaagtgcaaaaataactaagatgtaaaaataaacatatggtaagataatacagatcaaattattaaagagataatataattgttgaattaataattacatatttatgattcttaatatgtacttttgatgtaatgcaattgttagacttacctccaaaatactccttttaaataaatgaagcaattggtctaggtactaatattaccttaataatttttaaacgtttttaaaatagattttatgaaaactaggcratataatcaaatggcttcaactttattataaatgaatctctggaataaataatcattattttttctacatttatcatgtcctcaaatgtcaaataaacagaattctagaaaa

SEQ ID NO: 722259 - DNA, 664 bp, Homo sapiens
tatttaatctgacaggagagagagatgcttatgaaataatctaaacaataatatgatgtgattagtgtttcatttctaagtgtaagatgttctaggaacaaagaaattatttaatgaatcctaggaaagaggatagaattcaggaagtcttcacagagatgggggttgtttattggatgggtgggtgaggccatggaatgaaattttgagcaaagcacaagcaaagccagagacatgtaatagtttaaagtgtttggtgagcaggtactcttagggtatgaaattagaatgaggagggttgggaaaaggaatggagaaaatacttaaacaattgagcagggccactctgggaagggccctggacttcatcctccaggtatgtaaagtttaaaataggattgggggcagtggctcatgcctgtaatcccaacactttgggaggctgaggcgggtggatcacgtgaggccaggaatttgagacctgcctgaccaacatggcgaaattcatctctactaaaaatacaaaaattagctgggtgtggtggcacaagcccataatcccagctacttgggaggctgaggcatgagaatcccttgagcctggaggcagcrtttgcagggaggcgaggttgcagtgagcagagattcttccactgcactccat

SEQ ID NO: 722260 - DNA, 998 bp, Homo sapiens
ctcctcatattagctcatttctttatctcccaaccttcgtaggtgtaaaaggctgatttcctagagctaagcctgctctcccagcctctggaatttgccacaggcaagagacgggaaaacgcccgttcctcgcaaaggcctctccatttttcctaagagaactcctggagactttgtgcacgcctctcagctggcagccctcccagacgcatcatcctgtgtccaccgggcaaaccaggccctacagctctgtactgtcctgtggatgcccacctgcctacctgccattttccccacatgtcagtctatggctttgcctgaggaagaaagacaaatgcagattgccacttcactgcagtgtctagttttactgatatttatcgattcacccttacattcaacaaatggttactaacgcctattacatgctggactctgttccaggaacttgggatattgcagtgaacaaaacaagcaaaaatccctatcttcatggagtttacattttattgtaagccctaattaaataacctttaatcaagtaagattctgttttattttatcttattctaacgtggctctctatttgtcscaagatgccttttcctactcgatgacaggtttctgtttttaaccattttttaaatctgctttcccatttcttagaaagtgaataacattgtcattagtccattttcccaatagagatgttgaaggacaaaggataattgtatctgtcttttcccatagcactcgtacacatcatctccatgccagggagaagaactaggatttctaaaatctggagtacagattaaccatcagaaagcaaagcacagtgcttcacattcttactttccacttaagctctgcactggcagtaaaaatacaaacaaaatttcctataacttctccacaaggacccttcttggctgatttcttataactccattgtactggttcagacaaaagcaaccagggtcgtgacagtgaaatgc

SEQ ID NO: 722261 - DNA, 998 bp, Homo sapiens
ctcctcatattagctcatttctttatctcccaaccttcgtaggtgtaaaaggctgatttcctagagctaagcctgctctcccagcctctggaatttgccacaggcaagagacgggaaaacgcccgttcctcgcaaaggcctctccatttttcctaagagaactcctggagactttgtgcacgcctctcagctggcagccctcccagacgcatcatcctgtgtccaccgggcaaaccaggccctacagctctgtactgtcctgtggatgcccacctgcctacctgccattttccccacatgtcagtctatggctttgcctgaggaagaaagacaaatgcagattgccacttcactgcagtgtctagttttactgatatttatcgattcacccttacattcaacaaatggttactaacgcctattacatgctggactctgttccaggaacttgggatattgcagtgaacaaaacaagcaaaaatccctatcttcatggagtttacattttattgtaagccctaattaaataacctttaatcaagtaagattctgttttattttatcttattctaacgtggctctctatttgtcccaagatgccttttcctactcgatgacaggtttctgtttttaaccattttttaaatctgctttcccatttcttagaaagtgaataacattrtcattagtccattttcccaatagagatgttgaaggacaaaggataattgtatctgtcttttcccatagcactcgtacacatcatctccatgccagggagaagaactaggatttctaaaatctggagtacagattaaccatcagaaagcaaagcacagtgcttcacattcttactttccacttaagctctgcactggcagtaaaaatacaaacaaaatttcctataacttctccacaaggacccttcttggctgatttcttataactccattgtactggttcagacaaaagcaaccagggtcgtgacagtgaaatgc

SEQ ID NO: 722262 - DNA, 657 bp, Homo sapiens
tctcagatattggactgaaagttcatttgtcttttaaatggccatcctaatgttaagttcagaggttcttattcatttctagaaggaaataattaaatacattttttaaaaggagckggaaaaaatattcagagaagcataaaattttctgagaagtaactttgtgtcaggacaggctaaaacaataggcttagaatggtaaagccaatttctgaagtgatagcccccaaaaatcctgccaaaaataaattgactaaccaagacaaaataaaacaaactcaaaacaaaaacaatcagaaaacaaaggtaatgtttcagaattgttgaagttataacagccattgtgaatatccaataagacatataccatgaagtgagaccgaaagttattttgattgtggaacccttaacagggtaaatgttctgcaggctctcttcaggaaaagataaaagatgtatgattacagtctgtaaaatatgtaagatacaaaagtttcagagaattagaagctgattttagaaaagtaagattaggtgaatattctctgaaatttgaagaaaatattcacaaataaaatggaagtctttctgatgtggtatatattgaaaataaatggtataaagaaaagtttaaaaacttaaagggtacttctacct

SEQ ID NO: 722263 - DNA, 2164 bp, Homo sapiens
tgtcctgtttcagctgtggtttccctttagtgcatggtctaaaaaatttaaaataccaatatataatgataactaattgtttttggtataataactgtttatgtttttgaacctgagttctgagtctggttgccttgctctgtttgttactctgaagcaaagtccacatttaggctagggttttaccttattttaactttcttcctgtttttatactcagcaacctgcatggttcctggcactcaccaggttttcagtaaaaaagtatttttttttttttttttttttttttttttttgagacagagtctcgctctgtcaccaggctggagtgcagtggcaaggcgatctctgctcactgcaacctctgcctcctgggttcaagtgattctcctgcctcagcctcctgagtagctgggactatcagcacgcgccaccatgcccaactaatttttgtattttcagtagagacggggtttcacaatattggccaggctggtctcgaactccttaccttgtgatccgcctgcctcgacctcccaaagtgctgggattataggtatgatccaccgcacccagcctggtaacaaagtatttaatgagggagttgaattggttgaaaagaatctgtttattcaaactgtaatgcagtccacaaatttgaagttttctctttagatataaaagtgctaaatatcctaaaacaccatcccagctctctcctcatgtatgctttaatactggccaccaaagaggagtataatataatgaatggaacttctgaagacacccctaaacaactttggcactcctaaagtgaaacacttttctgtagagttaaaatatatagaatcctttcacctttaattgattgaaaatgatggtgcctggaactatttttgagaataattttgatctaaagggaaaaaaaatacatgtgtttcttctgagtgctgcttttccattttcctaatgggctcttcgctattgttttgtctgaatgcagttttttatttgtgttattccagacatggtcctaccacaagcatctttaaaccagacattaatagcatagttcacagtcattactgccagtgctcaaacacaaatattgcatttgtgtttgcaaaagctacacatcagatgttaattaagtgcatttggtttttttctgcttaaacaatctggcataaagagtttacatccatatcagttcaccataaggtctcaacaatatctaaatcaccagccatacagtatatgataaatacagtgtttccacacaagaaaataacagaattgtcaggaaracatcaggcctgttatatttctctgtgaaataatagcgactgaatctcagtttctttttctttttgataaaaaaatatttaactaggagtaaacaccaatatttagaatgataaatttttcattaaagcacacatggaaaacgaaatcataccaaagatttttttccttgtttttagcttgcttcagggcgttgtgacagttgtgttggaagaaaattggaatttcagccttgcagtgaggggatccgtgctgccaccagagcagctgagtgccaatctgcgggaggcgggagtggagcgaaactgcaaactgagaaacaaactttcacatcaggtttctaattttagagcaaaaagtggaattactttaattatatgacatttaactagaaatacgatttgctgggattaattatctctctcatttaaaataccttcttagtaggtttaaattaacataaaaaatcaaattcagcatttaaataaggtcaatgggactgctggatttaaacacagaatttgattcagtataattggatcaccgtattggttttgacttggaaggattaaatggaggaaattggaaaagcgtgaatttgggcagaaagagaaattttctcttctttttctttctttcttctttcaccttccaagggagagaagtttccccaccttggagaggaaactactaccctgattaggtcagaaacatctcagattcattaattgtctccgttttatcactacttgaataagaaatagtaataaaacaaaaatattgtgtaactaaagcttactagaagaatttaaaatacatataacaagggtctgtttgaaaaatgattattctgtgtt

SEQ ID NO: 722264 - DNA, 585 bp, Homo sapiens
agtcattttgttgatttactttttaaaaagaatataaatgtattattaccactgaactgtacccttaaaaatgataaagatggtacactttatatgtatattttaccttaataaaaattaaattaaatattgcttttaaacttcagaaacctttcttcagtaaaaaaatcagatgcttatatatagaagactagcttttatatggcttgactgtttgtgtttaattttttaatctattaaaaatttattttggcgtgtgatatagtgataatttaatgtgattttctccatagatgttaatttctattttacactccttaagaaaaaaatccatcctttctcaattgttttctatgcgtattcaatcatttggtaaatatttttgcattccagaatttgttcctgtattattttttcaattttattgctgtctttataaggatmttttatcaatgtctcattatttcaattgagatttataaataattttaatatctggcagaacaagcccactctcatttttcttcaatagttttcttggtttgttttttgcctgtttattctttcagatgaactttagaaaca

SEQ ID NO: 722265 - DNA, 2472 bp, Homo sapiens
atatttttgctatcttattaattttccctaaatttatttcaatgaaatatgcagaattttaaaaagattaggagatggtccaattgggtaaacttttacaaaatatgatcataattgccttttttctaagtaattattctaaaagagaataccaattataagagacacagtatctctttaaaatgtttaaatagtaaccatgaggcttagtgggtttaagaaagagaaagaccagcataagtgcttactgagcagggcaaagagtgttagattaatttgagaagtcaggaagctagctgagaatgttcaaaatgtctgaatttgttcttctaaaagaaaaagaatatcatgagaaatgagactgaaaggaagttccgtgattaagatgcactttgttacatagaagacaatgaaagaacagttttgaagacaacatgcactgtattgcatgcaaactctgtgataaactcacctatataaggagatgaaaaatctcacactactgaatagtgagaaataagttaaaactatcaaaaaccatgactaatattcagtgcaaaatattaaagtcaaaagggaaaatagttgttttttcatttaaaaattttttaaagttataaaatattctagaaaactggacataaaaataaagaggaaatcatctctattttcaccattttacaacatatttataatttcagtgttcatatgtgtatattttgcctatttaaagtaggacttgtacgtaattttgtaccatattatccccaagaaacattaaagcatgtgcatttttatattttattataatcattttatattttattacaatcacatatttactcttaatggttgcatattattctcaaatgtatgtgcataagtctattgttggccatttgagttatttctgattttttattatacataatacattcatcaacatcttcaaacatatgacctttyccatattttgtactatttccttagaatagattcctagaagtagtattaatgcattagacagtaagaattttttttataattattttccccacatactgccaaattgttttccaaaagggctataccgatttcaattgcaccaaagagtatctgaaagcaccagattcacagcatacttgccaacacagaacatgattatttttaacactgttatttagtaggtgaataactagtcctcatattcttcatataatttagtctagtagaccgcaggatggcaaaggagaaaatctgaaattaaggaacaatttaacagaaattctttattctcatggctatctttgtggtcaagatagttaaacagatgctgaaagatcatcaaatgagattagttcacaataaatgtgtatacacacaaagcacgctaatagataagtgcaaacctgggtaggggcctctagacaaatgccatgaaaccaggtatttggtccagccttattcagcattattaaccgtgcaactgaagacaaggaaggcaagataatcaaatgtgaaaataaatacacatacattttcacagtgaacaagcacacatacattttaaattagcaactccacttctaggtcctttagtttcttgtacacgtgtgaaataatatgcacaagagctttacagcattggttgtgttaaccaaaatatcagaaaaaatattaattgttcatcaggtaggaactgtctcataataaataaattatggcactttcaacaaaggtaatatgatggagttgagaaaatgaatgaggaagctcttgtaaactttgacagtcctccaagattgctgtgtttaaaaatcaggaagcaaaatatatatatatattaacaactgtctaaaaattggtgagaaaatatttcgtgtctgtatgtgcataggcacagtatctggaaagatactgtgatggttaattttatgtgccaacttgactgagctaaaggatacctaggtggctggtaaaacatttctaggtgtgcctgtgcagatggatgagatgagcatctgaatctgtagactgagtaacaaagatcatcttcactaacctagatgggcattatgcaatcctttgagggtgagaatagaacaaaatgtcagaggaagggtgaatttgctctcagcttgaggtgggacagctatcttctcccgtccttggacactgatgttcttagatcttgagctttcaaactcaacataaatttacactattgattccccacattctcaggccttcagactcagactgaatactaccagctttcctaattttccagcctgttgatggcagattatgagaattcttggtcccctaaccacataagccaattcttagaatctctctctctttctctgtctctcctgagccaattcttatagtctctccctctttctgtctctctgtctctgtctctctctctctcctctctctgtctctctttttctctgtatgctcaca

SEQ ID NO: 722266 - DNA, 2472 bp, Homo sapiens
atatttttgctatcttattaattttccctaaatttatttcaatgaaatatgcagaattttaaaaagattaggagatggtccaattgggtaaacttttacaaaatatgatcataattgccttttttctaagtaattattctaaaagagaataccaattataagagacacagtatctctttaaaatgtttaaatagtaaccatgaggcttagtgggtttaagaaagagaaagaccagcataagtgcttactgagcagggcaaagagtgttagattaatttgagaagtcaggaagctagctgagaatgttcaaaatgtctgaatttgttcttctaaaagaaaaagaatatcatgagaaatgagactgaaaggaagttccgtgattaagatgcactttgttacatagaagacaatgaaagaacagttttgaagacaacatgcactgtattgcatgcaaactctgtgataaactcacctatataaggagatgaaaaatctcacactactgaatagtgagaaataagttaaaactatcaaaaaccatgactaatattcagtgcaaaatattaaagtcaaaagggaaaatagttgttttttcatttaaaaattttttaaagttataaaatattctagaaaactggacataaaaataaagaggaaatcatctctattttcaccattttacaacatatttataatttcagtgttcatatgtgtatattttgcctatttaaagtaggacttgtacgtaattttgtaccatattatccccaagaaacattaaagcatgtgcatttttatattttattataatcattttatattttattacaatcacatatttactcttaatggttgcatattattctcaaatgtatgtgcataagtctattgttggccatttgagttatttctgattttttattatacataatacattcatcaacatcttcaaacatatgaccttttccatattttgtactatttccttagaatagattcctagaagtagtattaatgcattagacagtaagaattttttttataattattttccccacatactgccaaattgttttccaaaagggctataccgatttcaattgcaccaaagagtatctgaaagcaccagattcacagcatacttgccaacacagaacatgattatttttaacactgttatttagtaggtgaataactagtcctcatattcttcatataatttagtctagtagaccgcaggatggcaaaggagaaaatctgaaattaaggaacaatttaacagaaattctttattctcatggctatctttgtggtcaagatagttaaacagatgctgaaagatcatcaaatgagattagttcacaataaatgtgtatacacacaaagcacgctaatagataagtgcaaacctgggtaggggcctctagacaaatgccatgaaaccaggtatttggtccagccttattcagcattattaaccgtgcaactgaagacaaggaaggcaagataatcaaatgtgaaaataaatacacatacattttcacagtgaacaagcacacatacattttaaattagcaactccacttctaggtcctttagtttcttgtacacgtgtgaaataatatgcacaagagctttacagcattggttgtgttaaccaaaatatcagaaaaaatattaattgttcatcaggtaggaactgtctcataataaataaattatggcactttcaacaaaggtaatatgatggagttgagaaaatgaatgaggaagctcttgtaaactttgacagtcctccaagattgctgtgtttaaaaatcaggaagcaaaatatatatatatattaacaactgtctaaaaattggtgagaaaatatttcgtgtctgtatgtgcataggcacagtatctggaaagatactgtgatggttaattttatgtgccaacttgactgagctaaaggatacctaggtggctggtaaaacatttctaggtgtgcctgtgcagatggatgagatgagcatctgaatctgtagactgagtaacaaagatcatcttcactaacctagatgggcattatgcaatcctttgagggtgagaatagaacaaaatgtcagaggaagggtgaatttgctctcagcttgaggtgggacagctatcttctcccgtccttggacactgatgttcttagatcttgagctttcaaactcaacataaatttacactattgattccccacattctcaggccttcagactcagactgaatactaccagctttcctaattttccagcctgttgatggcagattatgagaattcttggtcccctaaccacatragccaattcttagaatctctctctctttctctgtctctcctgagccaattcttatagtctctccctctttctgtctctctgtctctgtctctctctctctcctctctctgtctctctttttctctgtatgctcaca

SEQ ID NO: 722267 - DNA, 747 bp, Homo sapiens
ttttttttttttttttttttgcaagcatatgtttctaaagcacgctaaagaaaaaggcttttcttccctttttcctattttaggtgttattctaggtaagaattttctgttcttatatagaacagaaaattgactgttagaataaagatgtaatgttcttggaaatgttgagtccagaatttggtaagaagtaataaacaagtakataaatcctcttcaatatatttatacttgtgattatgtatcaagcaaaggttgttgtaaagcctaaaaaatgtatgtatctttcttaaaatgtcttccgtttcttaaactttgcctttttaagttattcacttcaagaataaagaatgtgttgaccactgactatgaaaaaatcagtttaataatatggttttatcaaaatcattaaggattatggactcttacattatgtatctttgctttaagaacaagccccagtattttcattctactttgtaagttacattataattttaaaacttaatcctattttcattgccagttctatatcacaacatttccactttgagattctttctttacatatgttttgtttgctgcttttcaggagagagatatgggtgacacattttctaatttcatgaacaaataaatgacgagttaactaagttagaatttttaaattatagcattggctgtttaactctagaaataactatttcttcaacaaataagttgaagggaaaaaataagggggggggg

SEQ ID NO: 722268 - DNA, 747 bp, Homo sapiens
ttttttttttttttttttttgcaagcatatgtttctaaagcacgctaaagaaaaaggcttttcttccctttttcctattttaggtgttattctaggtaagaattttctgttcttatatagaacagaaaattgactgttagaataaagatgtaatgttcttggaaatgttgagtccagaatttggtaagaagtaataaacaagtagataaatcctcttcaatatatttatacttgtgattatgtatcaagcaaaggttgttgtaaagcctaaaaaatgtatgtatctttcttaaaatgtcttcsgtttcttaaactttgcctttttaagttattcacttcaagaataaagaatgtgttgaccactgactatgaaaaaatcagtttaataatatggttttatcaaaatcattaaggattatggactcttacattatgtatctttgctttaagaacaagccccagtattttcattctactttgtaagttacattataattttaaaacttaatcctattttcattgccagttctatatcacaacatttccactttgagattctttctttacatatgttttgtttgctgcttttcaggagagagatatgggtgacacattttctaatttcatgaacaaataaatgacgagttaactaagttagaatttttaaattatagcattggctgtttaactctagaaataactatttcttcaacaaataagttgaagggaaaaaataagggggggggg

SEQ ID NO: 722269 - DNA, 747 bp, Homo sapiens
ttttttttttttttttttttgcaagcatatgtttctaaagcacgctaaagaaaaaggcttttcttccctttttcctattttaggtgttattctaggtaagaattttctgttcttatatagaacagaaaattgactgttagaataaagatgtaatgttcttggaaatgttgagtccagaatttggtaagaagtaataaacaagtagataaatcctcttcaatatatttatacttgtgattatgtatcaagcaaaggttgttgtaaagcctaaaaaatgtatgtatctttcttaaaatgtcttccgtttcttaaactttgcctttttaagttattcacttcaagaataaagaatgtgttraccactgactatgaaaaaatcagtttaataatatggttttatcaaaatcattaaggattatggactcttacattatgtatctttgctttaagaacaagccccagtattttcattctactttgtaagttacattataattttaaaacttaatcctattttcattgccagttctatatcacaacatttccactttgagattctttctttacatatgttttgtttgctgcttttcaggagagagatatgggtgacacattttctaatttcatgaacaaataaatgacgagttaactaagttagaatttttaaattatagcattggctgtttaactctagaaataactatttcttcaacaaataagttgaagggaaaaaataagggggggggg

SEQ ID NO: 722270 - DNA, 747 bp, Homo sapiens
ttttttttttttttttttttgcaagcatatgtttctaaagcacgctaaagaaaaaggcttttcttccctttttcctattttaggtgttattctaggtaagaattttctgttcttatatagaacagaaaattgactgttagaataaagatgtaatgttcttggaaatgttgagtccagaatttggtaagaagtaataaacaagtagataaatcctcttcaatatatttatacttgtgattatgtatcaagcaaaggttgttgtaaagcctaaaaaatgtatgtatctttcttaaaatgtcttccgtttcttaaactttgcctttttaagttattcacttcaagaataaagaatgtgttgaccactgactatgaaaaaatcagtttaataatatggttttatcaaaatcattaaggattatggactcttacattatgtatctttgctttaagaacaagccccagtattttcattctactttgtaagttacattataattttaaaacttaatcctattttcattgccagttctatatcacaacatttccactttgagattctttctttacatatgttttgtttgctgcttttcaggagagagatatgggtgacacattttctaatttcatgaacaaataaatgacgagttaactaagttagaatttttaaattatagcattggctstttaactctagaaataactatttcttcaacaaataagttgaagggaaaaaataagggggggggg

SEQ ID NO: 722271 - DNA, 658 bp, Homo sapiens
gttcacataaaaatatgccattgcttcaagcctaacttttggcttctcaaaatagctcaccacactctatctccaaaagcttatgacatgtgtagggatgtgactagtaatcttacaaaatagggacctgaaagatttactgcaatttacctgaatgaaaactgatttaacactcactacccacattaagatgattttttaaaaatagctgttaccataattaacccagatttataaatcatctctaaaaaaatctggccccattgatccaatyggtttctgcacactcaattactaaagctgaacattctaaatagacttgcctgcccctttgtggttctgttgtgttgaccctacccttgttaaaagtatgtattctttattagactgctcatctttaaatgcctctcttcagcatttgttagttgtgtgacactgatattcccattttgagaccttcattcttcaactataaaataaaaatttaaaaagtactgcagttgaaaatgtcagttgtcttccaaacatctattcatccctttttcattgccaacagaaccccaatttgaggtctggaaatatgatcagctaaatgtatactacatctttctggctgccttaaagctaagggttgccatgtaacagttccaaccaacaa

SEQ ID NO: 722272 - DNA, 1673 bp, Homo sapiens
aaggcaagcttataggaaaattaatcacatgaggagtgttcattgactttctatagaaaaagtattgagataaatttgcaggtattcaataaagtagagtgcctatcaaaataggcagcctgcgttaggacgtcaccattttccatacatgtgtgtgtttttcttcctaaaaatattgtctatatatgccagaaacaattgtggctgaaataaatttcttgtatcaacaggatctcagcttataactttacatctgagaatgaagccaaacagaagtacttgcttttgtttgtggcattgctcccgatttatttgaatttagtcctgtcactggagttcaataaagtcaggcagtgaatccatatggatttgggtaatagattgatgttctgataatgagaatcaatccagaattaaaattaattttaggtgaagagtaaatacactgcttttagatactcatgaaactctgcttccttcttgtaagtaatgatgagaatgacatggatatgtgaagaatagaatgcagaataaaaacagaataaatcttcatgtgtttcataaacaaaatccagggctggtggtaagtatatcaaagcatttgtgttttatctttgaaggaaatatgaaatgttacaagtttttcattaatttatgtagacactaagtaggacctgagagagaaataataattatacaaaatagtgttttattggataaatgcttttttgttaaactattgtacttgagtgagaaattatggtgtgtattttctttatattcactattgtgcattttgagatgccattatgccaacagattataggcaaacctgatgattatgctctgaactgcatccattatatttattaaaccaccttttctactaccttttatgaatgtttaactatagaaacttcaacgttttaaaaatgatttatataatcaaatcattcatgtataattaattctactaattttcatgagtgtttcaggtcattttggcataattagccattgttgagggttttctcccccatcaattaaactaattgctttccacataggtatagattgaatattgatccccatttttttcagctcacttgcataagcaaattatgcctaattgccagcttactacatcattacacacttatcatcaattatacaaaaatatactctgctagacaaatgatttctttgtggcattttgaagggctttttaattgtgatgcttagaacagtattgtcattttaaaaaatattaaacaccatgtttaaaccaataacgcaataaagcgtgttattggttaacaaacataccagctcctggctagaccatcatttaccttggaatataaagagtktcttaaaacaatttgaaggaaactcattgttattaaatatagtaaatccaccaatgcaaatattagaataagttctttctaaattttttagcttaatctttatctttcccattccacatatttatttcttctctacctgacgaaaagtctttgagaagatctgaagaggtggtgaatttcaaagaatcactatacagaacacaccaacatttttaaaagtcaggagataaaagcaaccccattcatcatgcattctgtgcagagcattaatgtcttttagtgattttactgggcatttgtctt

SEQ ID NO: 722273 - DNA, 785 bp, Homo sapiens
aaggttaacaagccctcttttagagacattgatctctattcctatataatttttaagcctcatggtaatagagtctatcttggaatgtgaatgaagcataatgtaaacattacaagcaacaacatgtcacatttttagaatttacatcattcagaataccccttagtatcacctgaccccaaagcttagaatgattttgccaattttgcaaatatgaaaacttagattatgttattctttttctaatgggccaagaaaggtataacactacactgtcactttttttttacttctatactaattactttctgaatatatatagatatctaatctatctatctatctattcttttaccacttaaaaatattattttaatctgtttaaaactaaggcctagcattargagatatacctaatgctaaatgacaagttaatgggtgcagcacaccaacatggcacatgtatacatatgtaacaaacctgcacgttgtgcacatgtaccctaaaacttaaagtatcataataataaaattaaaaaaaaaactaaggcctaaaaataagaagtgctattttgtctgacagcaaaataaataagtagtttttaaaatagtaagctgaagtttaataattatgttaaaattatagtaacttttttctgcagtaattatttttgataaaaattaatgcaattacatgacataaaattaagatatagtttagtaagaaaaacacaaaacaataaccattgtagaatgaaaataagttttaatatatgaaagactta

SEQ ID NO: 722274 - DNA, 1467 bp, Homo sapiens
cctaaaagcataattgctaggtcatatggtaagaatacgttatgatttataaaaacctgccaaaccattttccacaatggttgtatcattttgtaatcttgtcagaagaaataagtgttcctgttgctgtgcctccttgtcgatatttggtgttggcaatgtgttgggatgtgatacatccattctaacaggtgcatatttcattgttgttttaatgggcagttcacatgtgtattttttttccttttctacagccgtattattccaacacttccacttgttgaatcgatggcctatgttgcttcattgggacggcagaaccaggtcttgaccataaagtaagtctttaattccaggcttttatatatgggagaagagtaattttttaaatccacaagaaatccttcacatattatgaatatatatggggcattatgtcaaaccacagtgtgaagggagaacatgccatctggagtgggggtttggaggcaccgggaaatgcctctgctttgaggagtcgtcgtccaggatttgagagagatttaaagtttattgttctagagaaggctttcattacccaagatttccccttccccaggctcttagccacagaagaaggggcgaggaggcagcaaggtgagtgagttgataggaaagggctgaaggaaaatgcttgaaaatactgtcagggctctggttgcttgagccttgcctcccactactccaccagcagagagcagcagaagagaagcaatggaatgggaagagctcctctataacttgtggaggggttcatttctcataggtgccatgggttctgcaaccagcaacacctgggaaagcagcatcttattctaagtcagagagaggctgagtccacttgccatgtccaagtggggcacctttgttctcactcgcagaaatatatagtatgagcctgtagtgccatagatggtagatgaagatggtctctacagacattggtcagtgttagctctcctcagcaggtatatggcagaaacagtcagcagacgtatggtggaaactcagaaaggacaggatcaatacacagaaggtagtggggaatgaagaatagggctgactggggacagtggttcatgcctgtaatcccagcactttgggacgccaaggcgggaggaatgcttgagcccaaaagtttgagaccaacttgggcgacatagtgagaccccttctctataaaaaacaaaaacaaacaaacaaaatagctgagggtggtggtgtgtgactgtggttccagctactcagtaggctgaggtgggagtatcacttaagcccaggaggccgaggctgcagtgagccgtgatcatgcctctatactccaaactggatggcagarttagtaagaccatgtctcagtaaaaaaaaaaaaaaagtaagaaaagaataaggctcagggcaaaagtaccatggcagaggctggtggtg

SEQ ID NO: 722275 - DNA, 629 bp, Homo sapiens
tgcttcattcattatcaggatattttaacagatgcttttgtcttttgttatattttattcatagtttgtgggcaaaaatatttcttccatatttccaagwcttaaagaaaatatattctaaaaataggcaattaggaaataactgggatgtaactctctgttctttaaacccctaactccccaaatagttgcttgggaaattgtattattctgtttcatactgctacaaagaactacctgagactgagtcatttacaaagaaaagatgtttacagatatacacagttccaaggctatacaggaagcatggcttgggaagcctcaggaaacttaaaatcatggtggaagggtgaaggggaagcaagcatgtctgccacatggtggaaggagagagagcaaaactaatatacattacgtagctactgcatgcaaggcacaaatatagcagtaaataaactatctaaaatttctgctcttaccgagcttccattttagtggaggggtaagaaaaagaacaaaataaataagcaaaagatgtgatcaaaattagtaagtgctgaagaagccaatggccatctacacataatggaagagcctatatttgttccaaaatctgttttattatgaaa

SEQ ID NO: 722276 - DNA, 629 bp, Homo sapiens
tgcttcattcattatcaggatattttaacagatgcttttgtcttttgttatattttattcatagtttgtgggcaaaaatatttcttccatatttccaagtcttaaagaaaatatattctaaaaataggcaattaggaaataactgggatgtaactctctgttctttaaacccctaactccccaaatagttgcttgggaaattgtattattctgtttcatactgctayaaagaactacctgagactgagtcatttacaaagaaaagatgtttacagatatacacagttccaaggctatacaggaagcatggcttgggaagcctcaggaaacttaaaatcatggtggaagggtgaaggggaagcaagcatgtctgccacatggtggaaggagagagagcaaaactaatatacattacgtagctactgcatgcaaggcacaaatatagcagtaaataaactatctaaaatttctgctcttaccgagcttccattttagtggaggggtaagaaaaagaacaaaataaataagcaaaagatgtgatcaaaattagtaagtgctgaagaagccaatggccatctacacataatggaagagcctatatttgttccaaaatctgttttattatgaaa

SEQ ID NO: 722277 - DNA, 605 bp, Homo sapiens
tgaaagtcctcacacaaagaacatgaggaaacagagtaagtaaacacataaatattataattaatgtccttagatatatgaaagtgaatccccattaattggaaaaaccaaaataagtaatgaaaattgtgtgaaaggaaaaaatgtagatagaaccgaatgtcagaatgaatggagctaaagagtaaaactaggaattctcccagaacttaaaaaattaacatatacattaatatatatgaaaaatagtataaagaattaagacatgaaactaaggccctaaaattttaataycagtgaattaagagtgataaaaggaaataacagagacaggaaaataattatcaaagaattaacaggagaaaattgatcagaacagaagggaagcattgaggagacccagcaggtatagagaagcatttttttaaaaaaaaagtaacaagagataaaagcaattagacatatttcaagtgagatttcagaacataggtgagaaaaattctaaactctctgaaaaaaacactgaacaaacaaacccaactgatctcttatagagcaagaattagtgtcattatatttctcattatcgaaactggttactgggc

SEQ ID NO: 722278 - DNA, 1499 bp, Homo sapiens
tgaaaaataggtttaaattttaaaataggggatacgtatcttctaaatgctgtaattaatagaaaatgctttagtacatggtctttaatttttttcttttttagccgagtatatgcaggtaactgcagttcagctgtgaatctgtgctgaaggatctaagtgcactatttctgttttccgagagagtttaaaaaaaatttcccccgctttttcatttccagattatgttcagttaattattagaatgctgaacattctgtccttaatactcaaaagttcctgacttctgggtaggcaaagggaagcataatggatccaagggaaattcttccagccctattttactggccttctcttcaagtacattcgtaagaaattctgtttaaataaattggattgtactttcaatttcagctaaatgcaatttggaagtggcttattagatactcataaaaatgttccggctttcggaagttaactttctgtgaaaataatagcaaaaaatgggttatgttaactatgtatttggggagaactgatttctaacacagaggctcagggaggatggagcaagggggtgcacactattgtcctagggtgctgcttttgactggggtagagcagcaaagagccgacctgggagttgtgggaatttagaatgttttggcctaagagaatgcttagtcaaggtgctgacagggttggtttccttctgaggcctctctctttggattggagatggccgccttcttgctgcttcttcacatggtcatccctctgtgcatgcacatccctcatgtctctcgtgtgttcaaatttcttcttataagaacaccagtcagagtgaactagggcctgcctaatgaccttatttaaccttaactacctctgtaaagcccctagctccaaatatagtcatattctgcggttttggaggttagggtttcaacatacgagttttggggcaacataattcagcccataacaacagtgaaagtgattttacatggtgtgtgtctgatttcaaagcctgtggtcttaacaacattacagttactacttgtgtgtgtgtgaagctactaaggaggttgaaggaaagggaatttaagcacatctttaatcatcaagaaaggtttaggccaggcrtgatgactcatgcctgtaatcctagcactttgggaggctgaggcgggcggacctcaaactcctgaggtcaggagtttgagatcagcctggccaacatggtgaaaccctgtctctactaaaaatacaaaaattagctgggtgtggtggcgcatgcttgtaatcccagctacttgggaggctgaggcaggagaatcgcttgaacctgggaggtggaggttgcagtgagccaagaggcggccattgcactacagcctgagcaacaagagtgaaactccatctcaaaaaaacaggtttagcaaagcagctctccatgtgagtagagctttgaaggatggacacactttttttcaatt

SEQ ID NO: 722279 - DNA, 1633 bp, Homo sapiens
actggaatcctgctggcacagaggatatatctgagtctctgttaatgctggagagacagtgccaccctcctggggcaagcccctccaagccctagattacgcaaaggtgcacacatgggcagcctcatgggcacatcctccaggtgcaggtgttggaaggacatttggggcagcaaaggcaacgtgtcctcaagaaatacgcatggctggtgcctaaaccaacagctcttgacagcatctgtggggtatgaggctgaattctcagcacggtgctaagcctgtgacacactttcaactgtttaattatcatagcagccctgcagggtaggcaattctagctctatttttgaactgaagaagctgaaatatggaaatgctaagtgactcgcccaaggtcacacagagaatgtgaggctgagcaaatttgggccagagcctgctccattctgaagctctcttctttcccatgacaattcaggggcccggtcagggaactctgcttgccttctaggagacaaggctgaacacagggctgagggttggacatgcgaggcccaggaaggcrtgacgagtatcatgttttcattatgcttttaaacactgaacacacacacacttaccattaaagaaaaacaaaacaaaacaaaatagtctgcgtcgcttagagacagggatgcaaaattctgagaattgcatccttacgccatctcatcatcactgtgtgaacatcatagagggcacctacacacacccagctggcatagcctcccacacacccaggctgtgcggtgagccaactgctcctcagctacatgcctgcaaggagaggcagtgcacactgccttccactcaggatcactgcgtcaggagctgtgtgtttgggctcaaattccatcctgcctggcgaagctgggtgaccttgggcaagtcacttaacctctgttgacagtttctttgtaaaatagggatactggtagccctacttctaggagagttctgaaaattaatctatttatgtagagcatttggaatgaacctgatgcatatattcgtggttttattatcctttataaaggcaaattattgaatcattaacaccgcatttgctcagctttaataggacactcatactcctgattctgctaagaaggatcacctggggcagtcatgatgctatccagcagtccttgcatctccctctacctcaggccctggtgctgcttctgcagctgcgaagctacttatctgcatggtgcccagtccctcttattaacctcttctgacagatgtagcagctggcacagccagtgtgtccctcagtggcacttggctggaagggacacttcccagtgaaatttcccaaatcccaggctctttgctattacaccatgctgcctcctgtattcaaggtttgtcgtcttaggaacaagtcactttagctccctccagtgaactgccccttgtgcacctcccccatccctatgctgtgctgtggacatgctgaggccaggcacattccacagaggtccagtaaaacctcaaaattacagagtaccccaggctctggagggctgagctctggtgggtgtgggggacttgggggctgtgaggccacagtagggctaagcgagca

SEQ ID NO: 722280 - DNA, 1633 bp, Homo sapiens
actggaatcctgctggcacagaggatatatctgagtctctgttaatgctggagagacagtgccaccctcctggggcaagcccctccaagccctagattacgcaaaggtgcacacatgggcagcctcatgggcacatcctccaggtgcaggtgttggaaggacatttggggcagcaaaggcaacgtgtcctcaagaaatacgcatggctggtgcctaaaccaacagctcttgacagcatctgtggggtatgaggctgaattctcagcacggtgctaagcctgtgacacactttcaactgtttaattatcatagcagccctgcagggtaggcaattctagctctatttttgaactgaagaagctgaaatatggaaatgctaagtgactcgcccaaggtcacacagagaatgtgaggctgagcaaatttgggccagagcctgctccattctgaagctctcttctttcccatgacaattcaggggcccggtcagggaactctgcttgccttctaggagacaaggctgaacacagggctgagggttggacatgcgaggcccaggaaggcatgacgagtatcatgttttcattatgcttttaaacactgaacacacacacacttaccattaaagaaaaacaaaacaaaacaaaatagtctgcgtcgcttagagacagggatgcaaaattctgagaattgcatccttacgccatctcatcatcactgtgtgaacatcatagagggcacctacacacacccagctggcatagcctcccacrcacccaggctgtgcggtgagccaactgctcctcagctacatgcctgcaaggagaggcagtgcacactgccttccactcaggatcactgcgtcaggagctgtgtgtttgggctcaaattccatcctgcctggcgaagctgggtgaccttgggcaagtcacttaacctctgttgacagtttctttgtaaaatagggatactggtagccctacttctaggagagttctgaaaattaatctatttatgtagagcatttggaatgaacctgatgcatatattcgtggttttattatcctttataaaggcaaattattgaatcattaacaccgcatttgctcagctttaataggacactcatactcctgattctgctaagaaggatcacctggggcagtcatgatgctatccagcagtccttgcatctccctctacctcaggccctggtgctgcttctgcagctgcgaagctacttatctgcatggtgcccagtccctcttattaacctcttctgacagatgtagcagctggcacagccagtgtgtccctcagtggcacttggctggaagggacacttcccagtgaaatttcccaaatcccaggctctttgctattacaccatgctgcctcctgtattcaaggtttgtcgtcttaggaacaagtcactttagctccctccagtgaactgccccttgtgcacctcccccatccctatgctgtgctgtggacatgctgaggccaggcacattccacagaggtccagtaaaacctcaaaattacagagtaccccaggctctggagggctgagctctggtgggtgtgggggacttgggggctgtgaggccacagtagggctaagcgagca

SEQ ID NO: 722281 - DNA, 602 bp, Homo sapiens
ctttccactgcctccacgttgagtcgtagctctctttagaggctaaagaatcctcaggttggtaggagcttcccctgctggtctctccagaccatctcttgccacccacccatcctgccccacccttattctaccccatgactttcctagagaagctgcatccctctcagctccagacttctgctcctgcatctaccagcattttttttcttacttggagactagcctctgagttcaaagctcctctcctgtcttcctaggctgagtgatgtctctcttctctgctcctgcctcgcgttgctcttctctgtcattgtacactcagtgatacagccactgtctgtgtccctcactgggccagaagagcctcttagctggcatctgagcctgattcacctcttcctccccacaacaaagctcacggatcccagagggtcattggtcagtwaccttttgtgagaaggtgaaggagtaaggggcagcttagcaagtgacagagtacgtgattgtctatgtgggtgtttgagaggatgggtgagtgggtgtctatgtgagttagtaggtagggtctaggtgggtgaatgaatgattaggtgcctaga

SEQ ID NO: 722282 - DNA, 1491 bp, Homo sapiens
gctgttttgaaagtactattsccaagacacccacgttggcattttcctctgtctaaaaaaattatcattgatggatttttcatggtctataaatctgtttcagttgaataaatacatttaacctaagatactggatcacaggaagtttgctgacaaattgtatagctgacaaccctctatatgtaaatataaggacagtagtgttttactttgccaacttgaaataagtaaagtttatgttccttattttctcacctacctggagacaaagccaggatatgcatatgagcaaatgactaacagcgatttttgaaaagaggtagttcaccaaggcagaaaatctctaaaaccatcagtgaacaagaatgtatcaaacgcttgcatatatattattttatttaattgccgcattacattgtagaaatagccgttattattctacttttaatgttagaaaactgttcaaagtcaaactacaggaaaataatgaagcttcacttgaagtctgtctgaagttaagaatatattctttctactaaaacattagtaactcagttctattaataaaaccatatataaaataaaaccctttgtatcatttcagggtaagtttgtaaattcagcaaaaggttgtcacacacatatgtaaattatccagtaaatattagcacacttactcgttttaccatgcatgtttattcacactgttaaaactcaggacttttgcattaaattgattttctaaatcatttgtatgaaagggtatcaaaatctctacaaagggttctggcaggacaaccctaagggctgagatagggtacttcccttttgctctgccactgttaacctcaatagagaatatagtttatagcttccttatcaggcaaaattaacatataataaatattttatctttgctgatacccaatgtgggtaaggttgcagatacatacactttgctggcagcaatgtgaattggttcagtacttatagaaaatatacataaatattcagtccggaaacataaaaaagcttattctttttgacccagtcattatactcctgggaatgtactctaaataatttaacaattattgaaaaagctgggcaatgttaggctcttttagattgcaaggaagagacatactcaggttatctaaggtgagggggctatataaatctatgaaggcaaagaagcccagaagaccctttcagcagctgggaagcctggagagctggagtgaccttcatcacctttctcaacagaaactccagtagctcagcaacatctctggtagcctgtctttcagaaagtctcatctattcctccccactttactgccttagcttctgtctctaatattacctcagtattggaatttcacatttcctctgctaaagtatgtttatattgagtgacaataataatgataataaggctataatataataataaaaagctataataataactaccttcttatttatttc

SEQ ID NO: 722283 - DNA, 1951 bp, Homo sapiens
acctctgttcaacactgtgctataagtgttattcagcacaggggcacaattaaaataaataagaggtttaaggaatgtaaagaaattaatcaaactgttcattgcagggcacattataatctatattaggcaaccaaaaagccacaaattattgaaagtaacaagtttagcaagattgtagacaaaaaatcaaatctaaaatcaaattatatttgattttatttatatatatatatatatatatagccttacgcctacaggcaagagatggacagatacgtagttttaaaaacatgccattcgaaacatcggtagacatacttgtaataggtaacataatagatgcaaacctttacagggaaacttaaaagaacttacaaaactttactgaagaatgaatgcctaaacaaatagagttgttgcattcatgtttagtgattccaaattgtaaagaccgatcacaattaaccatgtagtcaatatattctcartaaaacccatatcaagattttttatttgaatttagcatgctgattctgaaatttaaatttcagcacaattgagaaaatcaacataagatttgccttatcagagatcaatatttattataaagctttaataattagcacaatattttattggcacagggcaagctaaataaaataataaaaacaaaaataaaatatatgtagacaatatataaaggaaatgttacagcagcctcttttggtaaagacagaatattcaataagtgtgttctaatctggaaggttgtccatataggaaaaaaaaattgacattctatctctaccttacaacacctaaaaaatcaattttatataaataaaaaccataaatataaaagacataattgtaaaacatgggagagaaataaacaaaatatctttacgaatttcagttacggggataactgggccatgtgcctttcatcgtccagcaaagcttgtgcagatttgttccagggtggtgtgagtttttgacatcaccaagagaaaccaagtcccagtgttccatcattttgcaaatctgtctgtggcattttctgatgagccattgaccaaagcaagtcacatggattagaccagaatcggtgtaggagtggattttccaagagtgtggattcagaatggcatgaactaatggggtgaggactcccgcaacaaatactctacaacacatacatattttataaaactaaaatccaaaacagaaagaaaaaaaaaagacataaaacacaggttactggataccctttgctctgggagtacaaagtgagagtcataattgaggaaaaatacacaaagacacaaagctttagaatattttatttcttaagctagattgtaggcataagaatgtttactatataattctctatatgtatgctccaatattacttgtgttattaaatagttcataatacatttttaactaaattatccaaaagacagagaagcaagttactcataatttgttcttctgtaacaaaaaagtcaagagacaaaaaagcagcctcccaaagtgccgggattataggcatgagccaccacgcctgaccggtaaatgatatttttaacgtgctgttgaacttactgtgctactaatttattgaagatttttccatgtgtgttcattaaagccattggcctttagttttcctttttttgttgttgtgttcttgtatggttttgatgtcagggtaatgtggaccttgtacaatatgtttgaagtagtcctttttcaattatttggactagtttgaaaagaatttatatatcagtttttctttatatgtttgataggattcagcagtgagctatcaggtcctggattttcttttttgaagggatactttttattactgatgaaattttgtatttgttattggtttattctaatattctgtttatttatatttcagtctggctag

SEQ ID NO: 722284 - DNA, 1951 bp, Homo sapiens
acctctgttcaacactgtgctataagtgttattcagcacaggggcacaattaaaataaataagaggtttaaggaatgtaaagaaattaatcaaactgttcattgcagggcacattataatctatattaggcaaccaaaaagccacaaattattgaaagtaacaagtttagcaagattgtagacaaaaaatcaaatctaaaatcaaattatatttgattttatttatatatatatatatatatatagccttacgcctacaggcaagagatggacagatacgtagttttaaaaacatgccattcgaaacatcggtagacatacttgtaataggtaacataatagatgcaaacctttacagggaaacttaaaagaacttacaaaactttactgaagaatgaatgcctaaacaaatagagttgttgcattcatgtttagtgattccaaattgtaaagaccgatcacaattaaccatgtagtcaatatattctcagtaaaacccatatcaagattttttatttgaatttagcatgctgattctgaaatttaaatttcagcacaattgagaaaatcaacataagatttgccttatcagagatcaatatttattataaagctttaataattagcacaatattttattggcacagggcaagctaaataaaataataaaaacaaaaataaaatatatgtagacaatatataaaggaaatgttacagcagcctcttttggtaaagacagaatattcaataagtgtgttctaatctggaaggttgtccatataggaaaaaaaaattgacattctatctctaccttacaacacctaaaaaatcaattttatataaataaaaaccataaatataaaagacataattgtaaaacatgggagagaaataaacaaaatatctttacgaatttcagttacggggataactgggccatgtgcctttcatcgtccagcaaagcttgtgcagatttgttccagggtggtgtgagtttttgacatcaccaagagaaaccaagtcccagtgttccatcattttgcaaatctgtctgtggcattttctgatgagccattgaccaaagcaagtcacatggattagaccagaatcggtgtaggagtggattttccaagagtgtggattcagaatggcatgaactaatggggtgaggactcccgcaacaaatactctacaacacatacatattttataaaactaaaatccaaaacagaaagaaaaaaaaaagacataaaacacaggttactggataccctttgctctgggagtacaaagtgagagtcataattgaggaaaaatacacaaagacacaaagctttagaatattttatttcttaagctagattgtaggcataagaatgtttactatataattctctatatgtatgctccaatattacttgtgttattaaatagttcataatacatttttaactaaattatccaaaagacagagaagcaagttaytcataatttgttcttctgtaacaaaaaagtcaagagacaaaaaagcagcctcccaaagtgccgggattataggcatgagccaccacgcctgaccggtaaatgatatttttaacgtgctgttgaacttactgtgctactaatttattgaagatttttccatgtgtgttcattaaagccattggcctttagttttcctttttttgttgttgtgttcttgtatggttttgatgtcagggtaatgtggaccttgtacaatatgtttgaagtagtcctttttcaattatttggactagtttgaaaagaatttatatatcagtttttctttatatgtttgataggattcagcagtgagctatcaggtcctggattttcttttttgaagggatactttttattactgatgaaattttgtatttgttattggtttattctaatattctgtttatttatatttcagtctggctag

SEQ ID NO: 722285 - DNA, 962 bp, Homo sapiens
tgtacatttcaaaataaatacacgtacacaaacacaaacacacattctcagacactttccagtagctcaatggttaataaataaatcatgaatggaaatagaaagcatgtagaatygcataattatttgtttattgcagctcaagcagtacttgatgggaaatttatatggttaaatgttcacataagaaatggaggtctaaaaactaatgagctaatcattgatttaagaagttaaaaaagaacaaatgaatgtattataataaattagcagaaaaagaatacaataagaacaaacagaaaagattaacaatgccaaaagcacatttttgaagaaaaaaaaattgaaaatatcgggacaaagcaagccagaagaagaaagggagaaggcacgaataaacagtattaaaaatgttaagggcataaaactatcaataaagcacagtttgtgactcttaaagagagtataataaaaactttatgacaaatttagaaaaatcagaggaaatgaacatttttttctagaaaaatactgcagttgcttaaagataaatagctttaaaaaaatcctatagatataagaaatttaactagtagataggaagaaaagagtaagatggtagagtaggactttccagcaattgtccccctgcagaaacaccaatctgaacaactatccatgctcaaaaataccttcacatcagtgaaagaaaccaggtgggaggttacagtgcctgattatagctgaataataagaaaagcacattgaagggggtaagaaggacagttttacgttattcacattacgtttcccgaacttcaggtagtacagtgctgctatattgtccattttggagataaaaaggaacgtaaacatagaactttgtcttaaaacccaacattgaagccaccacagtagaacacagcaccaaacagacctccatggttcctgactacaggctg

SEQ ID NO: 722286 - DNA, 962 bp, Homo sapiens
tgtacatttcaaaataaatacacgtacacaaacacaaacacacattctcagacactttccagtagctcaatggttaataaataaatcatgaatggaaatagaaagcatgtagaattgcataattatttgtttattgcagctcaagcagtacttgatgggaaatttatatggttaaatgttcacataagaaatggaggtctaaaaactaatgagctaatcattgatttaagaagttaaaaaagaacaaatgaatgtattataataaattagcagaaaaagaatacaataagaacaaacagaaaagattaacaatgccaaaagcacatttttgaagaaaaaaaaattgaaaatatcgggacaaagcaagccagaagaagaaagggagaaggcacgaataaacagtattaaaaatgttaagggcataaaactatcaataaagcacagtttgtgactcttaaagagagtataataaaaactttatgacaaatttagaaaaatcagaggaaatgaacatttttttctagaaaaatactgcagttgcttaaagataaatagctttaaaaaaatcctatagatataagaaatttaactagtagataggaagaaaagagtaagatggtagagtaggactttccagcaattgtccccctgcagaaacaccaatctgaacaactatccatgctcaaaaataccttcacatcagtgaaagaaaccaggtgggaggttacagtgcctgattatagctgaataataagaaaagcacattgaagggggtaagaaggacagttttacgttattcacattacstttcccgaacttcaggtagtacagtgctgctatattgtccattttggagataaaaaggaacgtaaacatagaactttgtcttaaaacccaacattgaagccaccacagtagaacacagcaccaaacagacctccatggttcctgactacaggctg

SEQ ID NO: 722287 - DNA, 962 bp, Homo sapiens
tgtacatttcaaaataaatacacgtacacaaacacaaacacacattctcagacactttccagtagctcaatggttaataaataaatcatgaatggaaatagaaagcatgtagaattgcataattatttgtttattgcagctcaagcagtacttgatgggaaatttatatggttaaatgttcacataagaaatggaggtctaaaaactaatgagctaatcattgatttaagaagttaaaaaagaacaaatgaatgtattataataaattagcagaaaaagaatacaataagaacaaacagaaaagattaacaatgccaaaagcacatttttgaagaaaaaaaaattgaaaatatcgggacaaagcaagccagaagaagaaagggagaaggcacgaataaacagtattaaaaatgttaagggcataaaactatcaataaagcacagtttgtgactcttaaagagagtataataaaaactttatgacaaatttagaaaaatcagaggaaatgaacatttttttctagaaaaatactgcagttgcttaaagataaatagctttaaaaaaatcctatagatataagaaatttaactagtagataggaagaaaagagtaagatggtagagtaggactttccagcaattgtccccctgcagaaacaccaatctgaacaactatccatgctcaaaaataccttcacatcagtgaaagaaaccaggtgggaggttacagtgcctgattatagctgaataataagaaaagcacattgaagggggtaagaaggacagttttacgttattcacattacgtttcccgaacttcaggtagtacagtgctgctatattgtccattttggagataaaaaggaamgtaaacatagaactttgtcttaaaacccaacattgaagccaccacagtagaacacagcaccaaacagacctccatggttcctgactacaggctg

SEQ ID NO: 722288 - DNA, 615 bp, Homo sapiens
agcctcagaagcaaggtatgtgtgcatatatgcattgtctatctatatattttaataaggggtcaattttgagtaatggaagaccrttgtaggataacaccagttatccctcctaaccttgaaattcaaaaggaggggaggtgggagtgtagcagaaactacagcctccactggagaggattgcagaggatgcattcttagaggagataagggaagagaggcaacatatgttcaaaaggctgaggatttgagggagttttctcttcattgaaactcctgaggatactgctgaaggcagggaaaaggggtagagtcagagttagagggtaaagaggttcagattgtttgagggatgacagtttagatgtctggggattctcttcctttggcaaataagaagggagggaaggctgggggtgtggtccatggtggattagctctgagcatcttacaaggaatagtgggcacttggatctaacagggagacctagagattttagtatcttgaaataaatcttcccaaactgccacttttataatgttactctctatcctctttctcctgctctcatcctgaaacctgacaaacagtcaggatcaggatcttcttctttg

SEQ ID NO: 722289 - DNA, 822 bp, Homo sapiens
acctgtccagaagtatacccgatgcgagtacaccaaacgtacttcgccaatgatatgaagatatatatatatatatatatatacacacttaattcatgtaacagtaatatattaaagtattaacatactatataattatgatgatgttagcattactatacacacattatgggattattcccttcttccccttttgaggactggaacattatagttttatatctcacactaacagaaaactctttgatatattgcaattattcaatgcatgtttaataaataataagtaaacatggcataaaaataattttaattgtggacttttattattaaaacacttttaattattatttaattaacaattttaattatgaaatctgcattcaaagaatcatctgtatttattcagataacatcaagaatatgccaggaatgaaaaattraaaagtaaactgagtttctttttttttttatccccaaaatggtggattaggtgtttgtagcctctcatcaaatctttgtgactgttttgctatttccaaatgccacaaaagagcaaaatagagctcaagaatcaactctttgagctttaattccaaaaggaaaatgggaatacaccaaaatcatgatggtcacaccagatcccaaggaggagaatgtgggcaaacagcccctgtgacagtgtatagccaataaaagtgagtgaagtctgagtatgtgagagagcttggaatgcgtgcctcggtgtggagcagaaagtgggcctctacaccacaatcaccgtcaagagaaggtggggcagctcaggcgccaaaaaagaca

SEQ ID NO: 722290 - DNA, 886 bp, Homo sapiens
tcctctgtctttggtggttaaggttctattacctgaaaaattgtgtagccaaagcgccaataaccagcttgtacgtataaaaagttgatcctaagtagtactatatagaaataaatttaaacctaaaatgtttttgttttatattgacaccaaaatattttgcttttatatctgtacagtctgaaaattcaaaagagaagcaatttaaaggacttccatttacttctttcccctctaatctgcacaaaaggttaaatgtagcagtgcagcagttctggccatcaaaatatgattattgtactttaaaagcagccatgagaactctgctctttgatagacttcaacttgcaacaactaaggtaacatattatctggttctacccaaaaatacatatcctcatcctacttatcttagatcatgtgtaagattcagttatgtttaagctgtccttcggaaaaactcacaggttaatctttagcacccactctctactcactttaggtccttatccctgatgactactttatttcttgcagsaataatccagttccagaggagattaggagttgggtgagaggatagactctaatcttagagaaataaggtattgtacaagttatcaaggcctagcaatccaactactttgaccagaattattacagaaagttggaaaaagattaacttgatgcagagttatctgagctgtggacactgcgcttcttcagtttttcctaacaagtttgaacaggtcagtgttgtcacttgttaggaaaaactaaccatgattgaagtgtcacctttgggcagagctgaaatttacttgtttgatacatgatcttctcaaagtccagtgatcgctactttgaaaaggataccaagcagtta

SEQ ID NO: 722291 - DNA, 613 bp, Homo sapiens
accctcccccacctagttaactacaaatcacccttcagaacccagagctcacttatcacctccttgaagccaactcattaactccctgaaacaaagttactctactctaggatgtttctacagtatgacaaaaatttaacttgaggaattacgcagtgcaactataatagtgcacagcacaaagtaacatttattggactgtacaagaaaatctaattaaatatgaaacttattactaatttctaagaaaagtataggttttattattctacataaacacatgaattaaggaaagttttcagtttgctttcctatgtcattttccagtactccagacagaccacccctcaacccctgcaattcatctgatgtagaaaacaatttcaaggcaccttaataaaaaataatccctccttcctattgctctttgtaaaacctattacagattactgggtccaccacaatattttctgaagtgaaagacacagatcattatgctttaatcacctcttctccccttyagagcttacccccatttatgcagaaagcactaagtaattgtttatgaaatttcttatcttcaaacatacaaaacttgaccctatctcagggc

SEQ ID NO: 722292 - DNA, 648 bp, Homo sapiens
tccctcattttctgaactcctataagaaatatctgtcagctatcattgtaattttagtgatacttttgacagtatgagcatataatcagaaaacactgtgaaataaaaagtataactgagccatttataaactccattaacagtcaggtgcagtggctcaagcctgtaatcccaacatgttgggaggatgaggcaggaggatcacttgagctcaggagttcaagaccacactgggcaacaaagtgagatctcatctttacaaagtattaaataatcagccaggcatggtagtacacacctgtagtcaccgctactcagaaagctgaagtgggaggactgcttgagaccaggaagtcaaggctgcagtgagccgtgatcgtcccactgtactccagcctgggaaacagagcaagatcctatctcaaaaataaataaataaataaactccataatgtttcaaatgttgtgggtgcatatgtgcatgggcgcgcacacacacacacatacacacatacagagtccttatgaatgtaggttaattgaacaaatatatacgaaattatatgtcagctaaaaaactaaattctagggcaggtagtccagaatgtttatccayatctgaaagctaaatgaaagtaatcttatgga

SEQ ID NO: 722293 - DNA, 1272 bp, Homo sapiens
aaaattggagcattagccaatcattagaagatggaatggtaccaaaaacatagaaacattgaaataatatatatgtaagtttaaatactggtgctgttgattataataactggctatgttattgcttaacctttctgaacctcaatatccttatataccaaatgcagaaagcagtaggtattgtctgtttggcttctaagtaacaggcaaaacaaagtgcataaagaaccaataaaagtacgtaacgtacaataatgtaaaattggccacaaattctttcccttcctgtatccatgccctttsaatgtgatgtggccgtattgatcaaggctagaaactagttctccatttgggttgccatatgacttgttttggccactgtgtcattagcaaaagcttgaaaattttttgtatatcatcacttgcccttttgctgctctttgaaaacctgtaaccatcccatcatgaatgggtcaaccctagcctgctggataatgagatgaacatgcccatacccaagctaccagctgagcaaccatcacacacatgagagaagccaccgatcaccagcaggctacaaatatgtgggacagcccagctggactagctgaggcaacccaaaaccaacacacagaattgtggctgatgaagaagccattaaatcttggcgtgttttgttatactgcaaagttaattaatatatgttatgtatttacatatttatatatgtgtatgtggatatatattcatcagtatcaaggactctttgtgctactgatttaaaataaaatattttacttgaaatttaaaaacaaagcaaagaattgattaaaacaagtactaatccaagtttttgttttctttatttctttaatttttttcccttcctgaataccttgatattattgttttgacatcagtgagtttgggaagattggtgaaaacatcataagttaatgtgtttctctttacttaaaatactctgcctagtaaagtattcattttcccttctctttttaatttgtgtagatatttcctaaattgttgatatgatttgggattcaaaaaacacatatacttgctcatacaatgagatatcaagatcaaacccaccaaaggctaaaattaaaactcactaaacaatggaaaggatgtggagtaatgggaatgttcatatctagccaccagtattataagttagtacaactacttgggaaaactgtttaacagcattttctaaataggaatatatcatacatttttatctagcag

SEQ ID NO: 722294 - DNA, 623 bp, Homo sapiens
ggtgcaatctcagctcactgcaacctctgcctcccgggttcaagcgattctcctgcctcagcctccagagtagcggggattacaggcacatgctaccacacccagcacatttttgtatttttagtagagttggcgtttcaccatattggccaggctggtctcgaactcctgacctcaggtgatccacttgcctctgcctcccaaagtgctgggattataggcgtaagccaccgtgccgggcccaaaactgttatttwaaaaaaaaaaaaaaacacatgcaactatttactattttgacacattgacttaagtttttacacatgtaaaaatcatggactcactttatctcattctagagaatatcatccacaaaagaccagggctgcccatattttggtcatgatttatattcttacaaatattattatgaatattgtcattatgaataaattagttaatgaaaacatatgaatgagtcctgaggtgctcaccaggcaggagtggcactaggctttgtgtatattttatcccattaataagcggcagcagcatctttaggtaggtagggcaaatacgaacttagatataggcagaaagcaagcggtatggtttgagaatataat

SEQ ID NO: 722295 - DNA, 940 bp, Homo sapiens
tacccaagtcttaatttttctggtaaaccttcttaccttgttatggaaatgacagcaggagagagatgaatggccctgtaattagttcaaggaattcagatrggataaagctttcccttgccttttggtgccccccagcagagctctgctgaaaagatgcatttagattgctcccagaactctgcttttaaaataaatgtggggatatgcatgtaactgctgcaatgcaagccatctcatctgttgggttcaaagttgcagcattcttttgtgaaataaaagagttctttatttgactgccatcctttgctgtttacaagtgcggatactttgatggtctaggaagagagagtgtgcattgtgtgctcttaatgagcacttgtgcactcagccatgcgcagcagaggacgaaggttttccttttaaaatcaagcatccattaaaagagacaacaacaacaaaaacttgacatagaagccctgaaatgggaaagtttgtcatcttcattatttcttattgccaagaggagcccaacttaatcacatttcactaggaggcacaccagtaaaacatgtctggcagaaacagaagaaaaagccagaggtagacacagctaattgtatttatgtcaggttttgagaataatcaatatgcctttgctttattatttatatctagtccagcagatacacacctaatgctcaatatttttcttagcttgttttattgctggagctcctggagctctgtgcacatgccttcccaaacaagcggaaaggattctctaaatgattgtgctgttaagcgacacataagcttagagagccgggtaactactttctgcaaccacagtttctttttcctttttattataatcctctgttcttgagccacagtctctgttgggaatttgaaggtcagattatctttatatgtttcc

SEQ ID NO: 722296 - DNA, 940 bp, Homo sapiens
tacccaagtcttaatttttctggtaaaccttcttaccttgttatggaaatgacagcaggagagagatgaatggccctgtaattagttcaaggaattcagataggataaagctttcccttgccttttggtgccccccagcagagctctgctgaaaagatgcatttagattgctcccagaactctgcttttaaaataaatgtggggatatgcatgtaactgctgcaatgcaagccatctcatctgttgggttcaaagttgcagcattcttttgtgaaataaaagagttctttatttgactgccatcctttgctgtttacaagtgcggatactttgatggtcyaggaagagagagtgtgcattgtgtgctcttaatgagcacttgtgcactcagccatgcgcagcagaggacgaaggttttccttttaaaatcaagcatccattaaaagagacaacaacaacaaaaacttgacatagaagccctgaaatgggaaagtttgtcatcttcattatttcttattgccaagaggagcccaacttaatcacatttcactaggaggcacaccagtaaaacatgtctggcagaaacagaagaaaaagccagaggtagacacagctaattgtatttatgtcaggttttgagaataatcaatatgcctttgctttattatttatatctagtccagcagatacacacctaatgctcaatatttttcttagcttgttttattgctggagctcctggagctctgtgcacatgccttcccaaacaagcggaaaggattctctaaatgattgtgctgttaagcgacacataagcttagagagccgggtaactactttctgcaaccacagtttctttttcctttttattataatcctctgttcttgagccacagtctctgttgggaatttgaaggtcagattatctttatatgtttcc

SEQ ID NO: 722297 - DNA, 940 bp, Homo sapiens
tacccaagtcttaatttttctggtaaaccttcttaccttgttatggaaatgacagcaggagagagatgaatggccctgtaattagttcaaggaattcagataggataaagctttcccttgccttttggtgccccccagcagagctctgctgaaaagatgcatttagattgctcccagaactctgcttttaaaataaatgtggggatatgcatgtaactgctgcaatgcaagccatctcatctgttgggttcaaagttgcagcattcttttgtgaaataaaagagttctttatttgactgccatcctttgctgtttacaagtgcggatactttgatggtctaggaagagagagtgtgcattgtgtgctcttaatgagcacttgtgcactcagccatgcgcagcagaggacgaagkttttccttttaaaatcaagcatccattaaaagagacaacaacaacaaaaacttgacatagaagccctgaaatgggaaagtttgtcatcttcattatttcttattgccaagaggagcccaacttaatcacatttcactaggaggcacaccagtaaaacatgtctggcagaaacagaagaaaaagccagaggtagacacagctaattgtatttatgtcaggttttgagaataatcaatatgcctttgctttattatttatatctagtccagcagatacacacctaatgctcaatatttttcttagcttgttttattgctggagctcctggagctctgtgcacatgccttcccaaacaagcggaaaggattctctaaatgattgtgctgttaagcgacacataagcttagagagccgggtaactactttctgcaaccacagtttctttttcctttttattataatcctctgttcttgagccacagtctctgttgggaatttgaaggtcagattatctttatatgtttcc

SEQ ID NO: 722298 - DNA, 940 bp, Homo sapiens
tacccaagtcttaatttttctggtaaaccttcttaccttgttatggaaatgacagcaggagagagatgaatggccctgtaattagttcaaggaattcagataggataaagctttcccttgccttttggtgccccccagcagagctctgctgaaaagatgcatttagattgctcccagaactctgcttttaaaataaatgtggggatatgcatgtaactgctgcaatgcaagccatctcatctgttgggttcaaagttgcagcattcttttgtgaaataaaagagttctttatttgactgccatcctttgctgtttacaagtgcggatactttgatggtctaggaagagagagtgtgcattgtgtgctcttaatgagcacttgtgcactcagccatgcgcagcagaggacgaaggttttccttttaaaatcaagcatccattaaaagagacaacaacaacaaaaacttgacatagaagccctgaaatgggaaagtttgtcatcttcattatttcttattgccaagaggagcccaacttaatcacatttcactaggaggcacaccagtaaaacatgtctggcagaaacagaagaaaaagccagaggtrgacacagctaattgtatttatgtcaggttttgagaataatcaatatgcctttgctttattatttatatctagtccagcagatacacacctaatgctcaatatttttcttagcttgttttattgctggagctcctggagctctgtgcacatgccttcccaaacaagcggaaaggattctctaaatgattgtgctgttaagcgacacataagcttagagagccgggtaactactttctgcaaccacagtttctttttcctttttattataatcctctgttcttgagccacagtctctgttgggaatttgaaggtcagattatctttatatgtttcc

SEQ ID NO: 722299 - DNA, 607 bp, Homo sapiens
attcattaaatactcactgaatgcctactgtgtacaagcactggctgtgaacaagcctatgtaggttagatctctatgaatagtaggtaggagagagagcattatactaaaacaaaacgaatccattcattgcagagtagaaaggaagtttaagtgatttttaaagattctatcaatcatttattttaatagacagtaagaattgtatatatttactgtgtgcaacatgatgttttaaaatgtgaaatggctagatcmtgctaattaatatgcattatctcacatacttataattcttcgtggcgagaagacttaaaatctactcttttcacaattttcagtaatataattcatttttattaattaaagtcatggtgttgtacaatagatctcttaaactcatttctcctaagtgaaattttatatcttggaccaaatctcttcatccctcccccaaaggccctggtaaccaccattctactctctgcatctgtgagttcagcttcttatattccacatataagtgaggtcacgaggtatttgtctttccgtgcttgtcttatttctgttaacataatgtcccccggtttattcatgttgtctcaaa

SEQ ID NO: 722300 - DNA, 607 bp, Homo sapiens
attcattaaatactcactgaatgcctactgtgtacaagcactggctgtgaacaagcctatgtaggttagatctctatgaatagtaggtaggagagagagcattatactaaaacaaaacgaatccattcattgcagagtagaaaggaagtttaagtgatttttaaagattctatcaatcatttattttaatagacagtaagaattgtatatatttactgtgtgcaacatgatgttttaaaatgtgaaatggctagatcctgctaattaatatgcattatctcacatacttataattcttcgtggygagaagacttaaaatctactcttttcacaattttcagtaatataattcatttttattaattaaagtcatggtgttgtacaatagatctcttaaactcatttctcctaagtgaaattttatatcttggaccaaatctcttcatccctcccccaaaggccctggtaaccaccattctactctctgcatctgtgagttcagcttcttatattccacatataagtgaggtcacgaggtatttgtctttccgtgcttgtcttatttctgttaacataatgtcccccggtttattcatgttgtctcaaa

SEQ ID NO: 722301 - DNA, 1106 bp, Homo sapiens
  misc_feature 1063, 1064: n = A,T,C or G
attcatcatctttggagaatcgcttctgtttgttatttaggttgataattcttcaaaaaaaaaagtctatgacttcagtgacaaagagggaagctgggaggtcgggaggaaggtgtgttaggaagaatgtgtctgactctgtggttagttggggtggggacccttcagcctcctgagtaggagcggcaggcctgggaacaggggagtctccttcctaggtcctattgcctaggcccacatgatgcctacctgaggcatatgcacaaagaaaaagtccttaaaattttgtttttctctagaacaacctacagtcctagggacagacacaccatcctcctaagtcctatcacaccctggaaaattgtaacaaaaaggtgacagtctccttggggcattgcctgcagccttagctaggggccatcctagttatctcaattactcatccaatttgtgatcagccctaagttctggctcactctagctctctccttcgacttcctcatctcccaaatggaagtgactaccccgacctaccaggctgttgtgggaaccgaacgatgtggcagagagtccagctcagcttcctaccgttccacgagggccactgaaaggccagtcctcttcagcctgcaatgagagagattgaaagtggaagcaggtctaagctcacagaatcaggaagaaggtagaatgctgaatrcacttcttcctccaatcccaaatgctagaactgtgtttctatcgaagttttgtcatcgactttttagaatcagaaaaatgattaagaaacatgagctgagatatgcaggttccttgagcaaataggattttgtacagcagacacctcctggtgtctcatttcctgagatccccaaagtgagagataagaaagctgtggccgcagcagagacttgaaacagtgaccagagaccaactcttccacaggaaggtgtctgcacagaagactcacaggggcagctgacaaagatctgtctatagcctggtccacaataaagatcaggggttggacagggtgagacaccaacacggtggctggagcccnncctgtaactatcaacaaacttgcagcccaaggtcgagcacaa

SEQ ID NO: 722302 - DNA, 584 bp, Homo sapiens
tggcttctggggcagcctgcagagggcaagtgccttcgctctgagagcagctgagtaagracactgccttctctgactatattgagtaccagccccccattcaccaggcatccgactctctgcctccaaacaattgctttatgcaggtccaggggctgggcctggctattctatgccatccttgggagtccttcccatcgtcaaggattttctgaaaggtcaagcctggctgcactggagaagggaatgtggaagccacagcccctcgtagccggcagcctgggcagcaactggaggaggtggagcattttcctctccctgtggggctgaggaatgtgcagaaaatgggtctgcgggttctttccaggttgctcaggaaggggtctagggatgtatctgaggggacaagggtttgggtagggacccaggccaggactccaaagccccagtgccttggccctgagagcttgcctgccagtgatttctaccttggctggaatgcactttgccatttcctctgtagacacttccttgggcagatgcggccatctggtctactccacaggaggtgggagtgacagcag

SEQ ID NO: 722303 - DNA, 584 bp, Homo sapiens
tggcttctggggcagcctgcagagggcaagtgccttcgctctgagagcagctgagtaaggacactgccttctctgactatattgagtaccagccccccattcaccaggcatccgactctctgcctccaaacaattgctttatgcaggtccaggggctgggcctggctattctatgccatccttgggagtccttcccatcgtcaaggattttctgaaaggtcaagcctggctgcactggagaagggaatgtggaagccacagcccctcstagccggcagcctgggcagcaactggaggaggtggagcattttcctctccctgtggggctgaggaatgtgcagaaaatgggtctgcgggttctttccaggttgctcaggaaggggtctagggatgtatctgaggggacaagggtttgggtagggacccaggccaggactccaaagccccagtgccttggccctgagagcttgcctgccagtgatttctaccttggctggaatgcactttgccatttcctctgtagacacttccttgggcagatgcggccatctggtctactccacaggaggtgggagtgacagcag

SEQ ID NO: 722304 - DNA, 533 bp, Homo sapiens
caaggaattttaaccctctggtttcacccatccacagcactgaccatgtagcctaccacagtggcaggaaacaaatcacaaaactaattgtattccagctggagaatgaggagtgtaatgaagggtatacatctaaaataactgaaagaaggatatcgagaggcatttgtacactcatatccacaacatcattattcacaatagccaaaacatagaggcaacccaaatgtccattgacagatgaatggataaacagaatatggtatatatacgcaatggaatattgtgcaggccttaaagggaaggaaatccagtctcaacgtgctacaacatggataaaccttgaggacatcatgctaagtgaaataagccagtcacaaaattaaaaataccacctgattttatttatatgaggtatctagagtagtcaaattcatagaaatagaaagtagaatggtggttgcaaggacctgtggggaggggaaaatggggagttgttgtttaatgggagtggaatttcagttttrcaaaat

SEQ ID NO: 722305 - DNA, 1171 bp, Homo sapiens
ctattcacaatagtaaatacttggaaccaacccaagtgtccatcaatgatagactggattaagaaaatgtggcacatatataccacagaatactatgcagccataaaaaaggatgagttcatgtcctttgtagggacatggatgaagctggaaaccatcattctgaggaaactatttcaaggacagaaaaccaaatgccacatgttctcactcataggtggaaattgaataatgcgaacacttggatacagggcggtgaacatcacacactggggcctgtcgtgcagtgggggatatgggagggatagctttaggagaaatacataatgtaaatgacgagttgttgggtgcagcataccaacatggcacatgtatacatacgtaacaaacctgcacgttgtgggcatgtaccctagatacttaaagtatatttaaaaaataagaatatatamcaataaaaaaagagaactgctgatgcctctttatatttccagatagtcatttataatatttcacagcttagaaatgtgtcatttaaatactattttcaaattatctttcttcataacaaacaattaaaaaacattgagcctgctccactgtttattagctatgtaagttttcagaacttcattgttaggacttagaaaagtagcaacacacataagcacctgttccaattgacagcaatttttattttgtttagctcacatcagagtccaaaatgataatgattgcacctctgagtaaggcactggtgtgggtttggagactcagaggaaaactcttctgcctcatctctgggccagcaccaactggaagagggaccaaaggaggagacagagcacagttgaaagcaatctccatggtgatatttcttcttggccctgtctgtctctttcaaatttcttctgaatactttagcagatgcaaagatggagacatgggccttgtagcataacctttctagcctgtgatatgaccacagctttaagtgatgggtaaaacagaatggggaggaggtaaggcaggaaatggctgtggctgaggcaggatgcatttgtttcttaaatgaatgagtgaatttacaataaatcaacttatagctcatttcttgaggatgtaagtgattatgggaaacagaaaaagaaagggagttaaattgaaaaca

SEQ ID NO: 722306 - DNA, 597 bp, Homo sapiens
gcctggttgcatgaaggttgtcttgatgggattcttgttctggacatagagctggacccttggacaaccaaaatatcacttctggagctcctggggttccatactgcctccccctggtgggtaggtatttatagtgagttctccctcatgcctggagagtattataaaatgggactgttttcttggccattgtcggagcatattcaggacattttacaataagagaaaatcaagaaacagggccagttaatatggcggtgctattttaggcaataaggcaagtcgcaacagatactacacatcactggtaggtcacattctgtgaacgcaatgcaatagaagtcattcacaaaagacagcaaatgaaaacttgtatacrttcagggtttttttctttctttttcttttctttttttttttttttttttgagatagggtctcactctgccgcccaggctggagtggtatagtggtgtcatcatggctcactgcagccccaaactcctgggctcaagggatcctcctacctcagcctcccaagtagctaagactacaggcatgtgccactatgcccggctaattaaaactttttttttt

SEQ ID NO: 722307 - DNA, 552 bp, Homo sapiens
atgctttttccatcgatttaatttttgttaacaaatataaaatgttttagaattttacttatagaattcaaaaatgtttccttcatatttataataatacttaaatatggaaatgaatacatcatctcaaataacactgagttcattcttggaatgtctttttttttttctgttagagattttctttcattttctttttatttttccccaggatgctatcatgcctacgtttctcctggttagtttcacaggatattttccaaagagaacttgaataaaacagacttgattaccactgttttattctcaaaataagctaatggctattaagacttgttccttgatttgagggggctttttggtatacttattcaaaaaggcagattcaaaataagctctctacttctttattcctcagaatctctgtttgtatgtaattggctaacaaaacccattgcttattagctttgtctcagtgctaaaaaaaaaaaaaaaagtccttaaaattattgcaaacctgcatctrtcacacctgattactccaggaggaaa

SEQ ID NO: 722308 - DNA, 1944 bp, Homo sapiens
tttcaaaatgagtttcaataaatacatattatcaaagttaaacatgagaatgaatttactttcattaaaaatcaatgttggacattattattaagaagagcaaggtgacaaaaatgtagtggaaatcaatgttggacattattaagaagagcaaggtgacaaaaatgtagtggaaacatccaaatagtcaaatgatctattgttatgaatttacctacgttaaattgatcatttgttaattatgttgttatgttaattatattatgttaattatgttgttaatttgatcattagtgagggaggaagatccagtagttaaagaaggcggggatgctaactgtccttgctatgtagtatgtcacaaggaaaactggtctcagagcaaataacattaaaagcaggcataacaagtgtcataccactctctaagctctattaaattccagatcctgttctttttgatgctctgacaacaccttgaatgtttacttgagatataattcataatattgtagcagcaacattcagctaaccttttggtcaaaatcagggcacatacaaaatctccaaataagcttccgaacacactgacaattcaattctcaaggttaaggtgacaatccagagggctgtaagttattgagatctctgggtccctctacttcattcttttgtgcagaagcaattgtatggcacttctatcttgtccaaactggaagaccagccgtttcactattcaatttgaaagtatgcttatgttatttatcaagcctctagccttgattggagataataatactcaaatgcttatagtagctgactgtggtacatggcctttggattacaattctttagttgctagctaaccaatctttcagaatattttattattaaataactaaccatgaattcttatatttctgattagtacgtttcaaattgtatattaaaaccaatctgctgtgtacatttgtgtgtgtgtgtgtgtgattcattgacaatataacaaaaattttaactttcttgaaaaggatactcttctcctctaacagtactcttctttagtctgtttttagctgtcastactttgtgtagaaaaatttcctctgatatttgtttataattccaactgagtttatgtctgaatttgaactttttaaacttttccatgaattagactgtgagtttcctaggtagtaagcttttgagcacttatcgtgatgcctgacaaattacagatcctcaataagtagttgtggaatgaatgaatgaattcttgaacgggcctccttccacaattttagtactcagtctattacccaggcttgtgatctctgaaatattttgtagcttttgaatgttatctaacaaaacaatttttaaaacaatcaaaatatttaagtgacttttgttacagtaggaatgatataaagtctatgaattaaatttcacctaaatataaatattacaaagttgtaagggagctcttctagaacaaaaccaaacaaaaaagtagtttatctgtatacaatccaaaaatatggaaatcacttttcttgttcaaagataaatacattatcaaaaaatgtgatacattttagagcttctattgctcaatggatatgggaataaaataagaaaacacaaataacttcgattcagcctttaaccccgaagccacatgtttccactaacaagaagaaatccttgagagaaactttcagcaaaaagaatgttgacagaagagctttgagttagtcctgggtctttgcttaatgagataaagaagcaatcttggcagacaacttactgtaaaattccaacagtctttctcttttcatgtcatccaaactttaattttctaaatctgtttactgggaagggcagagagttctcctgtaagacttagatgtgtattttaagttcccagacctgatgagttat

SEQ ID NO: 722309 - DNA, 1866 bp, Homo sapiens
tgaagaccacacccacctctttagtgatatttagggtattaagaaaggtggagacagagatgattagatttctgcaatatttagtacacgccttttcatcactgattaaattagcatcacactatcattgtaaaaaccactgcctgaatgaggcatatctatcatcagtcttatcagagtaaacgtatgctagaaattaactaaaattgattaatactgtttcttgagtttcttcccaaggcacaagcattcctccaagtgcacatttatttatttataccaaagaaagtttcaccctctggagtgcagtggcacaatcttagctcactgcagccttgaattccagggctcaagtaatcctcccactttagctttcaaagtaaaagagactagaggtttatgccattgcacmtagctaatttttcatttattcatcaaaactatttttaaaattcttaggtgattacatgtgttacagtgaccagctggattagaattagattaggtttaaaacgatgaaagaatctgggagagggggcagagtgttggttgttaattagcacatggatcaaaggagattactgatgtgtttagaagccacaacattgacagaatgaaagccagaactaacaatccaatggtaaatctctttactgtggtattttctgccatttctgctccataagacacaccttaaccaccttgtcatggtatccgcagtatttgattttagtctaaatagcattttctctcaaatgcactctgtttctctctccttcatcttccctcacttcttccttccagctctattttttcactagagaacactaatagaatgttctcccaaatttcagatttcagatacgcatctgtaaaataatcttatggagacacattttagttgctactgcatacttggttgttttcataagttcacagcattactactgtcctccaaaaaatggtttcccatttccacagctaatctcatcattgactctgccatccaagtttattctatgccactctggaagaatctggaaaaatacttaaaatacattttaagtattcatcatgcacatgtattgcattttattttgtatatgttcgggtgaatatcttcctccactaattgtttgcatttcaactcttgtatcatgttttttgaaacacagaagtcgtcattaatataaaccaactaatttttttaattgttgatttttgtcccggttaagaaatccttatgagaatattttcatgtgcatctgtgcaaagagaccaccaaacaggcttagtgtgagcaacatggttgtttatttcacctgggtgcaggtgggctgagtccgaaaagcgagtcagcaacgggagataggggtggggccattttataggatttgggaaggtaatggaaaattacagtcaaaggggttgttctctggtgggcaggggtggatctcacaaagtacattctcaagggtggggagaattacaaagaaccttcttaagggtgggggagactacaaagtaccttcttaagggtgggggagattacaaagtacatttatcagttaggttggcgcaggaacaaatcacagtggtggaatgtcatcagttaaggctgtttttacttcttttgtggatcttcagttactttaggccatctggatgtatacgtgcaagtcacaggggatgcaatggcctggcctgggctcagaggcctgacaaatattgtatcatgttccccttaccttcaggacttgaatctatttggaaatgactgtgtgtgttttgaggtaggagtcaatatttagttattttttaaaattcaactaatccagcattgttctgaccaccttgtgtatttca

SEQ ID NO: 722310 - DNA, 1866 bp, Homo sapiens
tgaagaccacacccacctctttagtgatatttagggtattaagaaaggtggagacagagatgattagatttctgcaatatttagtacacgccttttcatcactgattaaattagcatcacactatcattgtaaaaaccactgcctgaatgaggcatatctatcatcagtcttatcagagtaaacgtatgctagaaattaactaaaattgattaatactgtttcttgagtttcttcccaaggcacaagcattcctccaagtgcacatttatttatttataccaaagaaagtttcaccctctggagtgcagtggcacaatcttagctcactgcagccttgaattccagggctcaagtaatcctcccactttagctttcaaagtaaaagagactagaggtttatgccattgcacctagctaatttttcatttattcatcaaaactatttttaaaattcttaggtgattacatgtgttacagtgaccagctggattagaattagattaggtttaaaacgatgaaagaatctgggagagggggcagagtgttggttgttaattagcacatggatcaaaggagattactgatgtgtttagaagccacaacattgacagaatgaaagccagaactaacaawccaatggtaaatctctttactgtggtattttctgccatttctgctccataagacacaccttaaccaccttgtcatggtatccgcagtatttgattttagtctaaatagcattttctctcaaatgcactctgtttctctctccttcatcttccctcacttcttccttccagctctattttttcactagagaacactaatagaatgttctcccaaatttcagatttcagatacgcatctgtaaaataatcttatggagacacattttagttgctactgcatacttggttgttttcataagttcacagcattactactgtcctccaaaaaatggtttcccatttccacagctaatctcatcattgactctgccatccaagtttattctatgccactctggaagaatctggaaaaatacttaaaatacattttaagtattcatcatgcacatgtattgcattttattttgtatatgttcgggtgaatatcttcctccactaattgtttgcatttcaactcttgtatcatgttttttgaaacacagaagtcgtcattaatataaaccaactaatttttttaattgttgatttttgtcccggttaagaaatccttatgagaatattttcatgtgcatctgtgcaaagagaccaccaaacaggcttagtgtgagcaacatggttgtttatttcacctgggtgcaggtgggctgagtccgaaaagcgagtcagcaacgggagataggggtggggccattttataggatttgggaaggtaatggaaaattacagtcaaaggggttgttctctggtgggcaggggtggatctcacaaagtacattctcaagggtggggagaattacaaagaaccttcttaagggtgggggagactacaaagtaccttcttaagggtgggggagattacaaagtacatttatcagttaggttggcgcaggaacaaatcacagtggtggaatgtcatcagttaaggctgtttttacttcttttgtggatcttcagttactttaggccatctggatgtatacgtgcaagtcacaggggatgcaatggcctggcctgggctcagaggcctgacaaatattgtatcatgttccccttaccttcaggacttgaatctatttggaaatgactgtgtgtgttttgaggtaggagtcaatatttagttattttttaaaattcaactaatccagcattgttctgaccaccttgtgtatttca

SEQ ID NO: 722311 - DNA, 597 bp, Homo sapiens
agaaaaaaagtgacttcagataatgattaaataagaccattgagcactcaacatagaggtaataggtatttaagcttcttgatttgtagatgaatatgtcaactctaacaaggggctggctaatgcttgcagatagtcagtaaagcataaagctaaagcttggactgtaaagcttactgtctcttatcccacactcttgtcatcaccactattgctttttaattaatacatattcatcaattgcctggaaacttgaaacatctctagatgctaaaaagtataaatgtagaatattagattgatattaaaataatcttattatataacattaagctgttggttactgctgattattgaaatttacatgtttaatgatatttctttaatttggacyctggcttaatatatacatactttcttttgtaaattttattggtcacaatatgttggtcatattgtaaaaagatgttctgttcatctaatgccgcaagactgcattatattaagttttttccatattgtatcagctagggttcaatcaggagacagatcacacagcttccccgatttgagcattgcaaatttacataaaattat

SEQ ID NO: 722312 - DNA, 1378 bp, Homo sapiens
taaaccttgagattacaacaaaacaaataaacatgaatgatgcagtgaattatacattttgttgtgttatctgtagctattaaactagaaataaagagaaaacaagcatttcaatatttatgaagctgtgtgttaatagatatttgaggtatcctttaaagttaacatggtatttctataattagccttaagctagyatgtttataatgtcaatttacagtttattatgtcagagaaagaatactaggctagatacatggggtcctaatcttagatttgttggtgccatttacatttctatgacatagggtcataagttttcagattctccatttccttatttataaaataagaagtaataacaacataaaattttatttctatctctaattctgcaagtcttaaggccgatataaacttcaaaataaaaaattcatattaaaaaattatttactgcatgtttattgcaaaaacaatattaaaagtaaatatggctaacaattggggaatagttacatgatttataacatgtagttcaataaatatttttgttattaaatgataaatatgtagatcatgtatttaaaaagaaagacatataaaatagcatgtgaaaatgttgcaaaaattgtttccattgaagacagttgtgtgaaaaatacaatctcatatataagggaacaaagatgtcagattaaattaaaaacagtgtggtaaaagtgtcatttgctttttgctgttgtggtttatctgttctgttacagctggttaaatatgaaaactttttaaaagaaatatataatatgcagtattaatgtagcaataaacagaggcaaaagaacttgatctcagtccctaattgttataaaaaacaaaacaaaacaaacaaacaaaaacaacggtgctctgagatgagtgtacccttggatggggtatacaagtagaaaaatgcaataaccttaagattttaaagcagttaacagtgtatgcttctatttcagacaggctttgagtttacacctatctggctttgcctaggcctgggtgaatttaaacatattgtttaacctccatgaaggttgtttatctcatgtggaaatggagcaaataatataaaatgccttataaaatcaatttgaggattgttaagtaaatgtgagtgaagttcttatcatgttgcctaactcataattactcattaaatactcagtgatctcacactaaatttattaggatataaaggatatttgttattgtttctagagaagggtaaagctaacaattgtcatacggtagttataaagtatgtcatgcgtcatataggtttatcagtgtatgctatgtgactttacagagaagtggacagatttaaagggga

SEQ ID NO: 722313 - DNA, 1327 bp, Homo sapiens
tgcatgcaggacttaaaacctagatgacgggttgacaggtgcagcaaaccaccatggcacatgtatacctatgtaacaaacctgcacgttctgcacacgtatcccagaacttaaggtaaaataaaataaaaataaagagtaaatgttttaagaaatatcttaggctcaatcttcgatactgttatgatttcctagctcctagacatgaagcgcatattgagaattcagcaaatagcacaaatttatgtattttaggaaggaatattggtttataaaattagcaaatcatactttggaaattgaaataattatttttaatgtgcggttataaatatttgataaagaattctttgaatggctgtactttttcaggtagctttacaacgtgctttgtatcatggaatttctgttggcctctttaatcagatttatttctatattaagtttgggtatatgtatttgtttattcatttatacatacaataccttgttccaaaaaactatttagagcagtacaaactccactgtagaatgtaagagctattaaaaaaacaaaatgaattagcatacattccatatattttgggctcttatgtgtttctgttaccttagggcaacatgaattatatcctttgtgtcaactttgttgaaaaaattatattttgctccatattttaaaacttctttaaaaagcaaatcaatataaataaactaaataacacttcactgcatggttgtgaaatttgaagatatgtacaatacatatctagttatgtttttaatgatttaaccaaaaaatataacctatttttcgaaacagcaggtacaaatattttagtatgttggaaaagagagggaaaaacatgagaatgaaagtctggattggttaaaaatagttacttttgaatatttttaaggtatggactgtgtaagtaccgtatattatattttaaactaagatagaaatgaatgcattgttttaatttattggataagaacaccataaaaataaacttagaaattcttaaaatatattgaaatgtttcttttttactcctatataatttagggtatattattaaaatgcttcccaactaatgtttcatgttctatgtaaatttagtaaatattgggatttcagtactaaacatacaataacatactgttttarttaacacataagtacagaatttttcagaatttcatcatgtcgtttaatcactggtctatgtaagggactttgcccctacggtttttcaaccttgctactattgcgttttgacctggataattcttggtggtagagtctgtcctgtgtatttcagga

SEQ ID NO: 722314 - DNA, 576 bp, Homo sapiens
tcctataattacctttgttacagaatgaataataataggtgatacaaatgtagttttctgtcttcccaacttcataagtaaacaacctgaatttcaccgtgtatcttattcatctttatttccctacctcataccatggctgactggcttctagcagagaaacctaaacttctcaataccacatctgcaccactgcttccatcttcactcatcctgtgtcctcctgttgtgagaggacactgccctgctcctatccaaagttcatccatttcctcagagctacatagagacttgttcttttgatctcattatgaccccatctctttaccagaaatgctcctcaytgggcccccaatgacctctgtagagccaattatactgggctcttttcagtcccctgtcttactagaagacttacagcattgaacactgttcatcacccacttctctgtaggagtctaacaccacactctcctggtttgggtcctgcccctctggcttctcttctcaggctcttttgctgactctgattttctgcccaatgttggaaactttccatgtttattcctgactttt

SEQ ID NO: 722315 - DNA, 632 bp, Homo sapiens
aaactttggaacaaaggtgacatagtaagtgttcgagatggaactctcctgtggcagtgacagacaagggagagagaccaggaaaagtgtttttctcctcacttgttttaatagggaaatgaaaacatggcttaaattttttctagttgaacctattgtaagctaaacagactttgcaggtcttcatagctgcacactctgaactcgaagatttaacttgaggctaaaattctatttttgtttcttctctcctttggtaacaaagagctgctaygtgaggtggggatgcccaaggcctcctgtcacttgtcctaaaacaggcagaggcagctggcatcagaagagtggtcagctacatggagggcattgtgcagatggagcacatgaaagtctatgcaccatcagtgtgtgggttcttggagactggcgtcagtcttgctgtagagtagacgtgaaaatggaaactggcccatgtgcccatgacctcctgaaaattgggatatggaggatagagaaaacgttagccagttatgaagagcaatattctgtgtccttatcatttaaccatctattctttcattttaggagaaaagtgagtatatttaatataaagagtcttggcattataagcc

SEQ ID NO: 722316 - DNA, 632 bp, Homo sapiens
aaactttggaacaaaggtgacatagtaagtgttcgagatggaactctcctgtggcagtgacagacaagggagagagaccaggaaaagtgtttttctcctcacttgttttaatagggaaatgaaaacatggcttaaattttttctagttgaacctattgtaagctaaacagactttgcaggtcttcatagctgcacactctgaactcgaagatttaacttgaggctaaaattctatttttgtttcttctctcctttggtaacaaagagctgctacgtgaggtggggatgcccaaggcctcctgtcacttgtcctaaaacaggcagaggcagctggcatcagaagagtggtcagctacatggagggcattgtgcagatggagcacatgaaagtctatgcaccatcagtgtgtgggttcttggagactggcgtcagtcttgctgtagagtagacgtgaaaatggaaactggcccatgtgcccatgacctcctgaaaattgggatatggaggatagagaaaacgttagmcagttatgaagagcaatattctgtgtccttatcatttaaccatctattctttcattttaggagaaaagtgagtatatttaatataaagagtcttggcattataagcc

SEQ ID NO: 722317 - DNA, 608 bp, Homo sapiens
ttacctgtaatcccagctacttaggaggccgaggcagcagaatcacttgaacctgggaggcggaggttgcagtgagccaaggtcrtgccactgcactccagcctgggcgacaagagtgaaactccgtacacacacaaaatatgcctattggatctggtgacacgaagatgatgggtgacctcaaatttcgatgaagtggcagcttggggatctagcattaattccaattttacaaacagagacactgaagcagagaacagttcagaggctgggccaaggttgcaaaactaagtagcagagtggggatttgaacccttgaagtggggccgctgtgctcttaaccactaaactagactgtcttttgaccttcaggatcacaaaggcaatggggagaaaaggaaacctcagataggagtgttcaaaagcatggagtctgaggcgatctgaggaagggcaggcaggtatagcaacttgaagctcttgtagacacctctttattacagtggcacatgggctggttgaaccaatattcacaaagacagccagatataatgtcagaaaaggttaaggatttttcatacactgtagtgtttactgaggcaagggat

SEQ ID NO: 722318 - DNA, 650 bp, Homo sapiens
taatccataatctatgtatccaggccacttaatgggaaaaaacacaaagagttgaaatcatttgcttatcatcatgtagataagaagccaaaattaggagtgaagtcattctacatttctgctaagattgctgtgtggcagatatctggctgccctggaaacaaatcaacagatctgtaaaacactcgaagccygagtggccttctttgcccagttaaccttcttccactgggtattctccacctgccaatctggtttccagactcctcaagctcttctccctttttcgtgcctcagtttctcccatgacatgagtaacctcttctgtgacctcatagctatgctctgctcactcttcctcgaaattctcctttgacttttatttaacctctgcttgttctctctgtaagttatttgtatttgcatgtctagacagcaaatcatctgcatagcatttcatgatacctttctattaattcactattccaaaaccaacagaacagcattattattttgtactgcatacaaaaatgacttattaaaaaaagcctctctgaattgtctttctacccatcacatgtatctaaacttgacaaaatacaacataggggatgagaaaaagaaaacagaagtgtagaaaaatctgtctt

SEQ ID NO: 722319 - DNA, 650 bp, Homo sapiens
taatccataatctatgtatccaggccacttaatgggaaaaaacacaaagagttgaaatcatttgcttatcatcatgtagataagaagccaaaattaggagtgaagtcattctacatttctgctaagattgctgtgtggcagatatctggctgccctggaaacaaatcaacagatctgtaaaacactcgaagcctgagtggccttctttgcccagttaaccttcttccactgggtattctccacctgccaatctggtttccagactcctcaagctcttctccctttttcgtgcctcagtttctcccatgacatgagtaacctcttytgtgacctcatagctatgctctgctcactcttcctcgaaattctcctttgacttttatttaacctctgcttgttctctctgtaagttatttgtatttgcatgtctagacagcaaatcatctgcatagcatttcatgatacctttctattaattcactattccaaaaccaacagaacagcattattattttgtactgcatacaaaaatgacttattaaaaaaagcctctctgaattgtctttctacccatcacatgtatctaaacttgacaaaatacaacataggggatgagaaaaagaaaacagaagtgtagaaaaatctgtctt

SEQ ID NO: 722320 - DNA, 664 bp, Homo sapiens
gtttactgatgtgcatctgtccgtaaacaagcctcatcttcctatacaagatctgtcaaaagatctttacgctgaacttaagtacattttgaagtctttaaagcatcattaatagacactatatttctatggtataaagtagatttaacaatccccaaagaggtagacgtgcctggaaataaataagcgtctgattttgttgttgttgtcttttatggttacctatatttattctaccacccctacccccaccaccaaattctgagcatcttgaggataggaactatgtactctwtgtactctatgtaatctatgtactctatgtatcttatgtgcttatttccaacacctgacacaaggaaggcatgaaatgtttgtggagttgagcatgattctttgctttggtgctttatataatttcatctcagtttaaacagagcagaacattactgcttgggcccacgaatccaagcttctataagtcttcacctgcatttattttgataaccatttttggcatcaagatggggccaacttttatttgcttacaaatgtgagtataagacattgttaaaagtcatataaatactgcaataaccattggtccaaaatttgctatttcaaatttcatattatattgtatgttctgttttttttacttagg

SEQ ID NO: 722321 - DNA, 664 bp, Homo sapiens
gtttactgatgtgcatctgtccgtaaacaagcctcatcttcctatacaagatctgtcaaaagatctttacgctgaacttaagtacattttgaagtctttaaagcatcattaatagacactatatttctatggtataaagtagatttaacaatccccaaagaggtagacgtgcctggaaataaataagcgtctgattttgttgttgttgtcttttatggttacctatatttattctaccacccctacccccaccaccaaattctgagcatcttgaggataggaactatgtactctawgtactctatgtaatctatgtactctatgtatcttatgtgcttatttccaacacctgacacaaggaaggcatgaaatgtttgtggagttgagcatgattctttgctttggtgctttatataatttcatctcagtttaaacagagcagaacattactgcttgggcccacgaatccaagcttctataagtcttcacctgcatttattttgataaccatttttggcatcaagatggggccaacttttatttgcttacaaatgtgagtataagacattgttaaaagtcatataaatactgcaataaccattggtccaaaatttgctatttcaaatttcatattatattgtatgttctgttttttttacttagg

SEQ ID NO: 722322 - DNA, 664 bp, Homo sapiens
gtttactgatgtgcatctgtccgtaaacaagcctcatcttcctatacaagatctgtcaaaagatctttacgctgaacttaagtacattttgaagtctttaaagcatcattaatagacactatatttctatggtataaagtagatttaacaatccccaaagaggtagacgtgcctggaaataaataagcgtctgattttgttgttgttgtcttttatggttacctatatttattctaccacccctacccccaccaccaaattctgagcatcttgaggataggaactatgtactctatstactctatgtaatctatgtactctatgtatcttatgtgcttatttccaacacctgacacaaggaaggcatgaaatgtttgtggagttgagcatgattctttgctttggtgctttatataatttcatctcagtttaaacagagcagaacattactgcttgggcccacgaatccaagcttctataagtcttcacctgcatttattttgataaccatttttggcatcaagatggggccaacttttatttgcttacaaatgtgagtataagacattgttaaaagtcatataaatactgcaataaccattggtccaaaatttgctatttcaaatttcatattatattgtatgttctgttttttttacttagg

SEQ ID NO: 722323 - DNA, 664 bp, Homo sapiens
gtttactgatgtgcatctgtccgtaaacaagcctcatcttcctatacaagatctgtcaaaagatctttacgctgaacttaagtacattttgaagtctttaaagcatcattaatagacactatatttctatggtataaagtagatttaacaatccccaaagaggtagacgtgcctggaaataaataagcgtctgattttgttgttgttgtcttttatggttacctatatttattctaccacccctacccccaccaccaaattctgagcatcttgaggataggaactatgtactctatgtactcyatgtaatctatgtactctatgtatcttatgtgcttatttccaacacctgacacaaggaaggcatgaaatgtttgtggagttgagcatgattctttgctttggtgctttatataatttcatctcagtttaaacagagcagaacattactgcttgggcccacgaatccaagcttctataagtcttcacctgcatttattttgataaccatttttggcatcaagatggggccaacttttatttgcttacaaatgtgagtataagacattgttaaaagtcatataaatactgcaataaccattggtccaaaatttgctatttcaaatttcatattatattgtatgttctgttttttttacttagg

SEQ ID NO: 722324 - DNA, 664 bp, Homo sapiens
gtttactgatgtgcatctgtccgtaaacaagcctcatcttcctatacaagatctgtcaaaagatctttacgctgaacttaagtacattttgaagtctttaaagcatcattaatagacactatatttctatggtataaagtagatttaacaatccccaaagaggtagacgtgcctggaaataaataagcgtctgattttgttgttgttgtcttttatggttacctatatttattctaccacccctacccccaccaccaaattctgagcatcttgaggataggaactatgtactctatgtactctatgtaatctatgtactctatgtatcttatgtgcttatttccaacacctgacacaaggaaggcatgaaatgtttgtggagttgagcatgattctttgctttggtgctttatataatttcatctcagtttaaacagagcagaacattactgcttgggcccaygaatccaagcttctataagtcttcacctgcatttattttgataaccatttttggcatcaagatggggccaacttttatttgcttacaaatgtgagtataagacattgttaaaagtcatataaatactgcaataaccattggtccaaaatttgctatttcaaatttcatattatattgtatgttctgttttttttacttagg

SEQ ID NO: 722325 - DNA, 652 bp, Homo sapiens
atatagaaatgtatacatccactcttcttctctgattgaatcctgagttcccaccatatatgtttctgattgtgtcagtccatttgggctgctataacgaagtactatagattgggtagctgataaacaacagaaatttatttctcacagttatggagcctggaagtccaaaacacagtgctaagatggtcaggttctggtgagggtcctcttccaggctgcagactgctgtcttctcattgtgttcacacatggtagaaagaaataagacagctctctggagtgtccatcataatggcgctaatcctcctcgtgaggtcactctcaggacctaatcacctcccaaaagtcccaccttcaaataccatcacatcagggattcagattttggcatctgaattttgggagggacataaacattcactccattgcactgatattaccaaaggtatttttcaatttcttgatttatagcaattacatttagtgcttttcatggatcattgtcctggttatttactttttttttgagayagagtcttgctctgtcgcccagactagagtgcagtggtgtgatcttggctcactgtaacctccgcctcctggtttcaaggattctcctgtctcagcctcctgagtagctgggattaca

SEQ ID NO: 722326 - DNA, 521 bp, Homo sapiens
actctgattacatacatttatcctttaaaaaagatgtaaatcttaatttttatgccatctattaatttaccaatgagttaccttgtaaatgagaagtcatgatagcactgaattttaactagttttgacttctaagtttggtactgtgaggcaagtacttaaaattttcatgctggttacttaaaaggcatttagagatttcaagaatgattttgtatacgatgttttaaattttgactgatctcatagtcttcatagaattgcagtagtcttcattgtatgaaatcccgaaagtccatgagttgatcttaaagaccactaacagactggctatcagatcccttttcactttggctatttttttcattttttgagatggagtcttgctgtgtcactgaggctggagtgcagtggcgcgatcttgaytcactgcaacctctgcctcccgggatcaagtgattctcctgcctcagcctcctgagtagctggtattacagatgcttgccaccacgcctggctaa

SEQ ID NO: 722327 - DNA, 521 bp, Homo sapiens
actctgattacatacatttatcctttaaaaaagatgtaaatcttaatttttatgccatctattaatttaccaatgagttaccttgtaaatgagaagtcatgatagcactgaattttaactagttttgacttctaagtttggtactgtgaggcaagtacttaaaattttcatgctggttacttaaaaggcatttagagatttcaagaatgattttgtatacgatgttttaaattttgactgatctcatagtcttcatagaattgcagtagtcttcattgtatgaaatcccgaaagtccatgagttgatcttaaagaccactaacagactggctatcagatcccttttcactttggctatttttttcattttttgagatggagtcttgctgtgtcactgaggctggagtgcagtggcgcgatcttgattcactgcaacctctgcctcccrggatcaagtgattctcctgcctcagcctcctgagtagctggtattacagatgcttgccaccacgcctggctaa

SEQ ID NO: 722328 - DNA, 798 bp, Homo sapiens
tatgactcttgaatggtcagaaatgagagtaaacttaacagatgaagatggagacaggattattatatacatgttgtttctrtaagaacttttctctaaatctaatgtctttgtaattgatcgattcactgtccatggcctttttgagagtaaaggttttgtgttctctttcacctccctaccctggctttttttcaaagcatttttccagccccacttacagtttagaacagatgtagatgctggcctgctcccagaatcttgctgcaaaatcataacttcaccattccccatggactgagtagtgccgaggtagaaaatgacttcaatccacagcagaatctgtgttgctgccaatccaatttaagcccaaaggagtcactcctatttgtagcaagtttttttcatttccagtttatgccgagaatatatagcacatcatattttgatgatttatagagtatatctgaaggcctctttctccccaactgccccgacactttcatttgtcaattttgcagacttgaagtgcagcaaaggagtaaagttttcagaaaatctgaagaaaacaatagatcaagaatatcagccaggcatggtggctcacgcctgaaatctcagcactttgggaggccaaggtgggtggatcatgaggtcaggaattcaagagcagcctggccaacatggtgaaaccccgtctctagtaaaaatacaaaaatttgctgggtgtggtggcgggtgcctgtaatcccagctactcaggaggctgaggcagagaattgcttgaacctgggaggt

SEQ ID NO: 722329 - DNA, 798 bp, Homo sapiens
tatgactcttgaatggtcagaaatgagagtaaacttaacagatgaagatggagacaggattattatatacatgttgtttctgtaagaacttttctctaaatctaatgtctttgtaattgatcgattcactgtccatggcctttttgagagtaaaggttttgtgttctctttcacctccctaccctggctttttttcaaagcatttttccagccccacttacagtttagaacagatgtagatgctggcctgctcccagaatcttgctgcaaaatcataacttcaccattccccatggactgagtagtgccgaggtagaaaatgacttcaatccacagcagaatctgtgttgctgccaatccaatttaagcccaaaggagtcactcctatttgtagcaagtttttttcatttccagtttatgccgagaatatatagcacatcatattttgatgatttatagagtatatctgaaggcctctttctccccaactgccccgacactttcatttgtcaattttgcagacttgaagtgcagcaaaggagtaaagttttcagaaaatctgaagaaaacaatagatcaagaatatcagccaggcatggtggctcacrcctgaaatctcagcactttgggaggccaaggtgggtggatcatgaggtcaggaattcaagagcagcctggccaacatggtgaaaccccgtctctagtaaaaatacaaaaatttgctgggtgtggtggcgggtgcctgtaatcccagctactcaggaggctgaggcagagaattgcttgaacctgggaggt

SEQ ID NO: 722330 - DNA, 1000 bp, Homo sapiens
gacagtagagataggagctgaagatctcttaaaggctcagctctggcctcagtcacattgtattagtgaaaataaggccaggctctacttatcttcaaggacagtggaatgagactttacctaacaatatgaagagtggcaaaaaaattcctgtcacctttatttcatcacaaggaacatgcaattgggctggacttagtatgtattaaatatatctggaatatatatatgaataaaagaataaatactcttagaatagattcatttttaccttcactctgtcaatgtaaaaagtattcatttttcaaggtctagtttactgctgcattctctgggaaggtttttttttttttcctctactagaaatgataactttcacttaattttaattgcattataacacttttcatagccaacatcataggtaagaattatattcaattccttttttcatggaatagcaagttgaaaatggaacattttattaataattgtctacaagtggcattcactgtatctaacatacaagctcttaataaataattgttgaatagttgatgttaaattacaacatgaattaaatatgagactaaatatttaacaaatgctttgttgataggtagaattaagtttaatatgtattttaacaatatatgtctttgtatttatcttttttgtgctgtttttttwaaaaaaaaatcaggttcgaggatacaaatgcaggtttgttacctaagtgaattcatgtcatgggggtttgttgtacagattatttcattactcaggtattaaggccagtgccaaataattgtcttttctgctcctctccctcctcccactctccaccctcaagtacatcccagtgtgtgttgtttccttctttgtcttcatacgttttcatgatttagctcccacttacaagtgagaacgtggtatttcctgttccagcattaatgtgctaaggataatggcctccagctccatctatgttcctgcaaaa

SEQ ID NO: 722331 - DNA, 1077 bp, Homo sapiens
ttttcttctctgggcactcattcttctctctcctgccaccttgtaaaaaaggatgtgtttgcttccccttctgccatgatcgtaagtttcctgaggcctccccagccatgcagaactgtgagtcacttaagcctctttcctttataaattacccagtcttgggcagttctttatagcagcatgagaacgtattaatacagacacgcacacattcttttattacctgaraaaatttctggcaattagtatgtctgtcctcctctgcctccatctctgtagctaacatttggacattcctctgtttcagtttcagatttgctctcataatgtttttgaatgttacatctttccctttcttatttcagttttctttttttctgacattgagtacgtgctttgtgatagtcactagagatacaaatagctcagaatcaaagaaagagtgtacatgaagtattttcaagaatatgcctataaaatattcaacgatttctcagaaaatatcaattgtaaaataaataaaatacaacaaaactttcttatttgcacaaatgcgtaaagtacatgtagtctaatttaagtagtttttattttttttctctaaagtaaattttgtgactttttttttttttttgagatggagtcttgctctgtcacccaggctggagtgcaatggtgtgtgtgatttcggctcactgcaacctctgcctcccgggttcaagtgattctcccacctcagcctcccgagtagctgggattagaggtcccagctaccacacccaactaatttttgtatttttagtagagatagggttttgccatgttggccaggctggtccctaactcctgaattcaggtgacctgcctgcctcagcctgccaaggtgctgggattacaggtgtgagccactgtgcctggcccaattttgtgaccatttcatataatattataagtattcctttactaaggcaacctgttaatataggtctctcagttgcaggcttttcttattctatggattgactaagaagcccccaaaaatccttatgaggaaagatagagtcatgtgtcataaga

SEQ ID NO: 722332 - DNA, 597 bp, Homo sapiens
gaaattgcagaagaaaaaaatgaagtaagaagaaacaattcaaagaaaagcaggaaatcagaaaaaaaatgtagaaagggcaaaaatagaatgcacaaaataaattctaactgatctataattataaatagacaaaaagctccatttaacagacaaatattatctggtcagaagagctttttaaaacatcttcatccctgtgaggtctgagaaaaaaatttwaaaaaaaatcaatctatatagtacctataagaaacatacctaaaacacagagacatggctgggcacggtggctcatgcctgtaatctcagcactttgggaggtcgaggcaggcagatcacttgaggtcaggagtttgaggccaatctggccaacatggcaaaatgatgtttttttactgaacatctttactaaaaatacaaaaattagctgggcgtggtagtgggtgcctgtagtcccagctactaggaaggctgaggtgggagaatcttgataccaatcctcaaaatgatgatttgagaaaaacactacaagacaactggactcatgaacttggatgaaaaatcctaagtaaaatgtcagcaaactgaatctag

SEQ ID NO: 722333 - DNA, 597 bp, Homo sapiens
gaaattgcagaagaaaaaaatgaagtaagaagaaacaattcaaagaaaagcaggaaatcagaaaaaaaatgtagaaagggcaaaaatagaatgcacaaaataaattctaactgatctataattataaatagacaaaaagctccatttaacagacaaatattatctggtcagaagagctttttaaaacatcttcatccctgtgaggtctgagaaaaaaattttaaaaaaaatcaatctatatagtacctataagaaacatacctaaaacacagagacatggctgggcacrgtggctcatgcctgtaatctcagcactttgggaggtcgaggcaggcagatcacttgaggtcaggagtttgaggccaatctggccaacatggcaaaatgatgtttttttactgaacatctttactaaaaatacaaaaattagctgggcgtggtagtgggtgcctgtagtcccagctactaggaaggctgaggtgggagaatcttgataccaatcctcaaaatgatgatttgagaaaaacactacaagacaactggactcatgaacttggatgaaaaatcctaagtaaaatgtcagcaaactgaatctag

SEQ ID NO: 722334 - DNA, 604 bp, Homo sapiens
caaagcacatttcacatcttgtcacttcttaatgattagtgtgctgaataccatttgacatcatttaaaacagatggactttgcaattattgcttagttacatgcagacatgtgatagaatcacagcatttaatatatgcatgctcatgtatatagctgtgtgcaacttgtttccaaatccaataccaatctgaacaattcaacaggggattttgttaatttatgaatttctttaaattaatgttctatggtgcaatgcaaattgatcaattttaggtatacatatttgaaaagaatgaaattatcagaaattgagactgttgccaaaataagaagtacagtcattctgtgaacaagtatgtgtaatataattaggaaaaataactctatgagctttatgcaaactcaaagggtagaaaaatcatttcaattaaaacttaagaaagaagtgcttttgtgatacacacatatatggtaaatacccttaacatattgaactatgaggaacagcaattttatgatgaaagcattggtttttaaagtgatgtagtcttagatatgggtccctgttctaccagttctagctgaatttacttctrtttct

SEQ ID NO: 722335 - DNA, 632 bp, Homo sapiens
ccctattggcagattgggtgatgctgactgcagaacttgagtatgcatgaatttgggtgtactgtagtggttctggaaccaatccccagtgtatatggagggatgacagtaatagatattctgagaactatttctccaagaagtctcagataattctggaagttatttatttatggtggcactataagctaatgtttatttcagctcctctgcctcaaaatgaaaaaaagaaaagaaagaaaaaggagacaaaagaaagacaaatatatcctaagattattatccagcaaaaaagataaataagaattctttggtgctaggtaacagaaaattttaaaatactatatataaaaaaaaaacatgtatgttacagactaagaaaagtatttgctggagctattctcattctcctctgacatttaacagattcatgcaatattctacccaactatcctgaatrccaagctataaccaaagctttcttgtttcttgaatagtgctttgcaatttagaatagttttttctaataatcactgcagtgatttggcttatatttaatgcttttaatttttactttgatacataaatgacatgcatgctattaagtctgccttcaaaactaaaggcattcc

SEQ ID NO: 722336 - DNA, 953 bp, Homo sapiens
gggagaaaatgttttcagaaggatgttaaataactgtagaaattctttcccacagctaaacttaaatctcactccatattacttctacatactggtatcaggtcttaattctagaaaacatacaaaaagaaattttataaaaatgtttcctagtactaatggaaagataatacattttgtaggtgttgtgctcttgatttgaatcctggggctaccgcttcttatctgtgtgactttggacaaatgacttggcctctgtgaacttcactttcttcattactgggacaagatggtgataacttgctttgcagggttattgagaagcttagtaaaaatacacgttacacatctggccaataatatgtgctcaataaattgaaataatgattaagttgatcttctatcccctacaatagccctaggaagggttgacaattactgccatatttctttttgaaatcaagattttctacattaccatctttctcccattctcctcttttcttcttccttttgcttcctcttcctacacctggccaatttatttcgatctcaaagaactctaaagtaaacaaaggatattacccatctaggtaatacctttccatactacaatggcataggctgttttgtgaagtagggagctactttaagaaagtggcatgctgtggtcaagagcttaggttcttgggtaatactayatgggatttaattccatttctaccacttagaagctatgtggacttgaacaatttacttaaactttctatgtgtatttttcttcatttgtgaaataggggtgatggtacctatgtcattgggttattacaaggatcacacgaattaaaatgggtaaagtgcttagatgggtgcctttttttcaatattgagttagcactcaacaaatgtgagctactgtttacatacaggctttcaagcagatggctgatggc

SEQ ID NO: 722337 - DNA, 953 bp, Homo sapiens
gggagaaaatgttttcagaaggatgttaaataactgtagaaattctttcccacagctaaacttaaatctcactccatattacttctacatactggtatcaggtcttaattctagaaaacatacaaaaagaaattttataaaaatgtttcctagtactaatggaaagataatacattttgtaggtgttgtgctcttgatttgaatcctggggctaccgcttcttatctgtgtgactttggacaaatgacttggcctctgtgaacttcactttcttcattactgggacaagatggtgataacttgctttgcagggttattgagaagcttagtaaaaatacacgttacacatctggccaataatatgtgctcaataaattgaaataatgattaagttgatcttctatcccctacaatagccctaggaagggttgacaattactgccatatttctttttgaaatcaagattttctacattaccatctttctcccattctcctcttttcttcttccttttgcttcctcttcctacacctggccaatttatttcgatctcaaagaactctaaagtaaacaaaggatattacccatctaggtaatacctttccatactacaatggcataggctgttttgtgaagtagggagctactttaagaaagtggcatgctgtggtcaagagcttaggttcttgggtaatactacatgggatttaattccatttctaccacttagaagctatgtggacttgaacaatttacttaaactttctatgtgtatttttcttcatttgtgaaataggggtgatggtacctatgtcattgggttattacaaggatcacacraattaaaatgggtaaagtgcttagatgggtgcctttttttcaatattgagttagcactcaacaaatgtgagctactgtttacatacaggctttcaagcagatggctgatggc

SEQ ID NO: 722338 - DNA, 2597 bp, Homo sapiens
gtcttgaaacaagactcaaggacaataactgttcaggaggatgatcttaaggtccttttctattattcataatactaagcttaaatatatatataatatatatactttttagatctcatatgatttttgttataaatagctatttttaactatggtaaaacttagcacaggtaatcataaacaagttaccttataacttcatgacttttatttttagcagaataaatacatttactggagaattcttaagacaacagatatgaaaccgcaatgaaaatgtaaactgttcttattacttgttgtgatgaaaagtaaatgaaaccaccatgaaaatgcaaagtgtccttgttgcttgttatgataaaaagtaaatagtagcgcctggagtcattgtccgtctataaaaggtattcagtaaatgttgtctatatttgagtaaagatgagaataagtagtagttcaattttcccatgtctatgccacagaatatagccatcaaatacattataggcaaaaaaccagataatcatatatgcattctatgaaaacatttccttttttttttttttttttttttgagacagagtcttactctgttgcccaggctggagtgcagtggtgtgatcttgactgactgtaacctacacatcctgggttcaagcgattctcaccctctcaggtagctaggaatacaggcgtgcaccaccagggcttgctaatttttgtatttttagtggaaacaggtttcaccatgttggccaggctggtctcaaactcctgagctcaagtgatctgcccgcctcagcctcccaaggtgctggtattacaggtgtgagccaccgtgtcctgcctttgaaaaggttttcaaaggaaaaaaaaaatcaaatactccccccccccccaggaatgtgattggttggttatacatgtagcaataaacagagatctgtgttttgtaatyatggctttcccaacatgctttcttgcactgctcatgctggaagcagcacaccaatctttctttgatgagctaccattcccccatcttatatcgtaggacaatcaatcacaggtatagtccatcacctgtcagcagagatgagcacttgatccaggctgtcaaccccttatctaatacgactgagccaaggggtggccatggaaccctttttggaccagtttgactacttccctctaagaggcaataggaatcctggagaagaaggtctcttgtttttgcactagagctgccagcagctatctttcccatcatataaacagagccaatcattagcagaagagaataagggcaacacacagaaagcccacaggcaagaagaggagaacgaaagaggaaagagtgggcaaaaaagaacaggagagaattggcaagctgcttgaggtcctgaatccagccatacatagagatgctctggcttaagctggttcgagttcagctgctttcacttataaaggaagaagttttgactgacactcaacaatctatatacatagatctgtagacaaatcaatgtggataaatgtattggaaagcataagttttaactctccattggtgatttctttgagactcatttttcttatttctctcttccaaagaagatctctaggtgggtttttgtctcacagggctccatttgataatgtacaaatcagattttaaaacattctgaaatacaggacaatacactttctccgagggtggttccttcagttttatgtatgtgccacgaggcccaaactaaagaaatgcacacatcatcttcttggaaataaaacaaaagaaaaaaaaaaaggatagcattgagaaagagacaaccgtcagccaagaaagcaactcagtgaagatgtcccttaatttcttcttcttttttttaatcactttttgacaggtcaggggacagaaagaaccaaagtagtcaaacaaaaatacaaataaaagaagtgaggctatcaggataattgagttcctgaagtcctaaggcatttccatgattttgtgaaaattaaagtaaaagtcacatgaaatacccttcagatctatgtcataatcccattcgggtgcctgacaaaccttgagaagccagagtgacaattactgatttacctttctgtgctgaaaatggaagttgaaagttaagtggcaacataaagctaagcacctctgagactgagtttcaagtctagactagacagaaatgacagaaaatcattaagaagagaaggcattaaaaggtcagaaataaattgttatcaagccctgtttgaccattttatcagtcagaattttttcttggctctcaagaatgcagtagcattttcttatctctggagatgagtatattatcagggttgtatgaacacactgatattcagattctgagaatgttttgtgtaaaaaccactgtttgaaaaaaaaaaagagattctcaaatagtttttaaaaaatgtaattgtcttgctctctccgtctgtctggaatgttacttagtgtaaagatgttataaagtttatccttggaagagaaaaccagtaatctcttcaggtttaggcttcagtgtcattcttttctttgt

SEQ ID NO: 722339 - DNA, 547 bp, Homo sapiens
aaacttaaggaaaatttatttgtactctatcaatatttaataatttttctgtttagtattttattacctttttgttaagcaaggaggcaaatatttatcagctaatttctctgtcagtaatatgrtttactattattaaaataaaaatcagatacatttattattttattgcaccctaatcattttctgaatgtcagctttttaatactgaaagaaatcctttagctacaagttataaagagttatattattttgtttaaacagaaataggttgaattgtttgacgttgaagttaatgtttgttatttacttgtatagttaaaaatcaattagtcaagttagagaacaatgataaggtactttaaattatattaacaatattacttaggctcctgaatactgcctgcaatattgcctgtacacttgaaaaatactctacctaaatccttttagagcatttatatattcattcaggtcaggatttatgtctcttttatttttttttccttctttcaaaactcagcactgttttaccttgactataaat

SEQ ID NO: 722340 - DNA, 596 bp, Homo sapiens
agcaaatattgtatatcctttagaacaatttacaattagaggaagatacggggtggtgggcatgtcaagttcatgtatcttattaccaaattcagattataatcagtggtcatgtccatggttcaggaggtgacacaacatatagccagaaatcagtcataaatacgagggtataggagaagagatttcatctctatcaaaattgaaacatttttagcakaaaacctaagacctaatattatataacaagatatctttatatttgtgtgtgagatacatttcaaatagccatttaataactcattgctatagtctcttcgatgataaagaaaacttatacattttctgttcatacttgtttgatatattatcaaaattagggactgtagtcatagattcctgaaagaagtgagctcaggatagtgacattaacccttgccttactgtttgtagatgtaataccaaattttaatctttgatggaatgtttctgaccaaaattagtatgtaaagtatatgctaatacttggtttaattctggtttattatcttaatgtcctaattgatccataaacttgaacatcttttgcattacag

SEQ ID NO: 722341 - DNA, 596 bp, Homo sapiens
agcaaatattgtatatcctttagaacaatttacaattagaggaagatacggggtggtgggcatgtcaagttcatgtatcttattaccaaattcagattataatcagtggtcatgtccatggttcaggaggtgacacaacatatagccagaaatcagtcataaatacgagggtataggagaagagatttcatctctatcaaaattgaaacatttttagcataaaacctaagacctaatattatataacaagatatctttatatttgtgtgtgagatacatttcaaatagccatttaataactcaytgctatagtctcttcgatgataaagaaaacttatacattttctgttcatacttgtttgatatattatcaaaattagggactgtagtcatagattcctgaaagaagtgagctcaggatagtgacattaacccttgccttactgtttgtagatgtaataccaaattttaatctttgatggaatgtttctgaccaaaattagtatgtaaagtatatgctaatacttggtttaattctggtttattatcttaatgtcctaattgatccataaacttgaacatcttttgcattacag

SEQ ID NO: 722342 - DNA, 868 bp, Homo sapiens
caatgtcaactttttgaatacatttatgtcaaataataggatttggaatgcctctgcctggtgcctagaaatttaactgtagaaaaacgaagccttcagtttaaatgcttaattgtgcttttttatagccaccataagagttttataaattaacttatttttgtcctttgaagggaatgtttaaaaatatctaggagagagcccatctcaacaggctaacatattggcatggattaagtgacaagcagagagaaaaataaaaagcaactgacaaaaagacacaacacgatactggatagggcaggatttttttcacttaatatatcttagaaatctctgcatgtcaagacacaaaggtctaccatgttcttttaatggctacatggtgttccattttacgtgtgcatcaacttatttaaccaatcccttactgacgaacattcaagtttcttccaacaatctcagttataaacacagtagcaattaaaatccttacacacgtattttttgttcactttcctaattacagctttaggttaaatctacttggagatttacaacactctagggactctctttcaaggaagcaaaaggtaaagttctcccctgctacgattaaaggactgaaacaaattctgactgctgagtctactggttccaccaaactgaacaaygaagaatccctattttggctaataagaaatgctaattattatttctttcagagatggctcctggcttactagggttaagtgtgcaaacataaaaaagatctgtaattatcctttaaaagcacacgtgagttctgtagatttgggctcacaaaggcggagcactgggagactggtgtggatttttgccactcaga

SEQ ID NO: 722343 - DNA, 1309 bp, Homo sapiens
atttacagcatcacggaacctactcctacctgctgctacctgtttcttgcctctgtccaccctgaggaaagcccacagaggctcctgcaccgtatcgcactcttcacatccgtgcacacgcacccacataacccccgcggcattcccacagactccccagcgccactgctgccttcagatccctcccctccggaggcctccgcaaccctcctcacctgcccaggctccccccagcaagagcaggaacatccacgtcttggccgcacgaggtcgggggcgtcccatggtgaggtctgggaaatggagagggcggggccggtaaacaggaaggaggagcctgagctcccagttctggatttgggcactggggaggcagccgagagtatctggggctgttctgggcttctctggaggaaggaggaggctgggggactggattcctacattccaagggaggggggagtcctcgatgtctgggtctgaggggacagggagctgggagctgggactcctaaattagggagaggaggaagccggggtccagactgctggatctcgacagagaagggcatctgaggctggggtcctggaatctggagaaggagggtccggggcctgatgtctatctgagtacctctgcacctcaccttccagaatccaggggcggggtcacctactgattcggacccagtggaggaggccccagtacttcagttctctgcctggtacacgattctggagccttttaactgggaatctccacctcctgctcctcctccttctcctcctgcactagagcctggggagcttctgggaactggaacactgggtgtgagtgagaaggggcggaggggattgaacgtgaaatcttgagggaggaggggctggaatctcagactcctgaggctagggagaggagggactcggtgctgagactctasgatctgaaacataaagggctgggggccaagattttagttctgagaggggaggaggctgggggcctggattcctgggtctgagggaggagaggctgggggcctggactcctaaatctaagggaggagggactgggacctgggatttaggtctgaccgaggaggggctgggggcccagactcctgggtctgagggaggagggggctgctaggggccaggactcctgggtctgagggaggaggggctaggggcctggattcctgggtgtgagggaggagagagctgggggctaaattctaagtacttttaaaaggagaagcttggaacctgatcttttgtgggaggagggggctgctgccagtaaccggga

SEQ ID NO: 722344 - DNA, 602 bp, Homo sapiens
ttgtagagacagggtcttgctatgttgtccaggctggtctcaaacacctgggctcaagcgatccactcacctccgcctcccaaagtgctgtgattacaggtgtgagccacggtgcccggcccgttatctcatttaattgtcctcacaaccctgctaaataattttcatgctctctgctccagaatgaggaaaccaaagcctctcaaatcaccagggaccgccctcaagatcctctaaccagccagggaagagctggaactkgagctcaggccacatgattctcctccgccaaaggggaaagactgagcttaactcggtggcttccaacctgctccagcatgaggcctccattttcccgttggaaatgatcgcctagggtggtctcaaactcctgagctcaagtgattctcctcgcctcagcctcccaaacaaagtgctgggattatagggatgagataccatgtctggcctaggtttttatttttagtttacaggtgttaacgcaaactaaatatggcctgagaaggactctgtacttctgtatttgagtccttgtggatgaactgtaacctagcttaataggcaggcagaatcgaaaacct

SEQ ID NO: 722345 - DNA, 602 bp, Homo sapiens
ttgtagagacagggtcttgctatgttgtccaggctggtctcaaacacctgggctcaagcgatccactcacctccgcctcccaaagtgctgtgattacaggtgtgagccacggtgcccggcccgttatctcatttaattgtcctcacaaccctgctaaataattttcatgctctctgctccagaatgaggaaaccaaagcctctcaaatcaccagggaccgccctcaagatcctctaaccagccagggaagagctggaactggagctcaggccacatgrttctcctccgccaaaggggaaagactgagcttaactcggtggcttccaacctgctccagcatgaggcctccattttcccgttggaaatgatcgcctagggtggtctcaaactcctgagctcaagtgattctcctcgcctcagcctcccaaacaaagtgctgggattatagggatgagataccatgtctggcctaggtttttatttttagtttacaggtgttaacgcaaactaaatatggcctgagaaggactctgtacttctgtatttgagtccttgtggatgaactgtaacctagcttaataggcaggcagaatcgaaaacct

SEQ ID NO: 722346 - DNA, 602 bp, Homo sapiens
ttgtagagacagggtcttgctatgttgtccaggctggtctcaaacacctgggctcaagcgatccactcacctccgcctcccaaagtgctgtgattacaggtgtgagccacggtgcccggcccgttatctcatttaattgtcctcacaaccctgctaaataattttcatgctctctgctccagaatgaggaaaccaaagcctctcaaatcaccagggaccgccctcaagatcctctaaccagccagggaagagctggaactggagctcaggccacatgattctcctmcgccaaaggggaaagactgagcttaactcggtggcttccaacctgctccagcatgaggcctccattttcccgttggaaatgatcgcctagggtggtctcaaactcctgagctcaagtgattctcctcgcctcagcctcccaaacaaagtgctgggattatagggatgagataccatgtctggcctaggtttttatttttagtttacaggtgttaacgcaaactaaatatggcctgagaaggactctgtacttctgtatttgagtccttgtggatgaactgtaacctagcttaataggcaggcagaatcgaaaacct

SEQ ID NO: 722347 - DNA, 2569 bp, Homo sapiens
agttacctttgtctatatcattttgttatactaaagcacaaatgtataaggtcaaaaaacattctcaagattttgtttaaaccacagccctcagttgtgtatatttatctcttgttttcatatgcaagatttctcctgaaatgggcaacaattacaagagtttttttcctcttctgaactaagaaaataaatatttaattcacaagtttagaaaagtgaacctgaaaaatcacagggctaggtgggttatgaggcccactggtacatgatagtgttgaatgtggattagaatgaactccgtggattagaatctcagaccataggcaaacatttacttgttttagaataagcacatttgagtctgcaataagtattactatttttaagttgaaaatgtaattggtttctaataataaccatattggctagcattatttcaatcgtgtttaatgttttccaatgtcatttcatgtcagatatctctcttgattcttagtaacaatttggacaagacagcaaatgctattgtccaagttttctaaagaagaatctgaagtgaaatgacatcaagagacctatcaagacctgtatccaggaaaaggtaaatctgagctgaaattgtagcccttgtaaattacctacgtgacataccagatagtgttcatgatccatttagtactctgttctaaaaatgagacaatatccatttattcacttgttcatttatttagtgyttgttcagcccttactgcatattccaggcactattctgactgtggcaggagtgaacaaacaggcatggttcttacttgcatgtaattacagtcttatagtgaaaacaagtgttaaacaacaaaatctcccaattattttaaaattataaacttgattcgatactatgtggccatataattgttcctaatttggttggagaagggaggcagttagggaagccttccctgagttagtgccatttaacctgaattatgatagatgataagtaatttgtcaggggaaaaatactccaggaataaagaacaggtacaaaggtcaggttctgggaagagcttgtcttggtccaggagctaaaaaatgttagagtggctggatctgggaaagagacaaagagttattaaatgaggcagcaggcttcagcaggtgccacattgctcagggccttgtaggccatgctaaggatttgggatgttaatgtcagtacaaacaattgagtcgtaagcagaaagtaaaagcatgattccatcaaatgttattctctaaacagtaattttataaatacaggttaaatgtgtgtggtcccagctactcaggaggtcccagctactcagtattccttttcaacaaatattaggtgcctactattagccaggtacagcccttagctactttgaatgaagcatatattacaaactggcagaatttcttaaacaaagaatctaaagttgtttatacaccgtaatctcggtattttataaatttcttgaaattatttttatgtacactgctttgcagaattttaactggctttgaaataaacaatgacaatagtcctccatgttactagtttcaaattttcccaatacctactaagacattacttaatccacagatttactgtcaatagtttgtatcaaattgtgataacatatttgaaattaatatttcaaattaaagcaaaatcacaaatttatactttatattatgaatgagattcacaaaaggagcatgataatatattctgttgtcatcgcatacaaaataataacatagagtatgaatcaataatttttcaaatacaaagctattacaattaggaatacaaagaaatcataattaggaatacttctacaatattaacacacaatagtggtaacacttgcaaaatgatggtggtggttttttttgtttttttttttccccgacagagtcttgctcttgttgcccaggctggagtgcaatggcatgattttggctcactgtaaactccacctcctgggttcaagcgattctcctgcctcagcctccctagtagctggtattacaggtgcctgccaccacacccagctaatttttgtatttttagtagagatgggggtttcaccatgttggccagcctggtcccgaactcctgaccttaggtgatccaccagcatcggcctcccaaagtgctgggattacaggtgtgagccactgtgtccagccagtggtgggtctcatatctcaatgtggacttttactaactcccaatgcctcagtttcctcatcagttgaaaggaatgaatgaaagatatgtgtttttcatattaccaggtagatgataaggagattttaattttcttttttttttaacttttattttaagtttaggggcatttgttacataggtagactggtgtcacagggggttattgtacagatcatttcatcacccaggtattaaacctagtacccaatagttatcttttctgtttctcttccttttctcaccctccaccctcagtagacccccagtgtctgttttattctttgtgtccaggagttctcatcattt

SEQ ID NO: 722348 - DNA, 912 bp, Homo sapiens
caataaatatgtaaataaatttccaatctccatactgaaagtttaaaagaaatgctaactaataactaaagaaatacaacttttcctcagctttgcagcaatctagaaacaaagtgtgtagacactacaaagcaccttacaaggagaaacatrtaaggatggcatgactcgccggcagccctgggattgtccacggtacccccatgatgaacagtaactccactgtgtaaacgcccatgaacctaagattacaagacttttccagtttagacataccatattttctttcagacaattcttcagtttgtttacgtagatcagcgatacgatgattccatttctctgaaaaccaagcaaaagttgcttctcaataacacgtccctatgtcagagcagcactaacatataatgactgatttcatatattttacattctaacagtccatatcattttactgctttcaagaaaaaatttccccttcttggtggttcttagaattggtttaatgggagactattagagaagctgaaaagcaggagggcagaaaagctcaatcaaattaaacacaataacagggaggtcacaatgaggcggtctccaggggtcttttagcaaacttcctaaaacatgtctcagctgtgtgaaataagactttacagcagccgggtgcagtggtgcaggcctgtaatcccagcactttggcagcagaggcaggcggatcactttgagctcagggcaacatagccaaaacccccctccctagccccacccccaccccgtccctaccaaaaatacaaaacagcagggcatggtggcgggcgcctgtagtcccagctactcaggaggctgaggcaggagaatcacctgaacccaggaggcagacattgcagtgagccaagatcacgccactgc

SEQ ID NO: 722349 - DNA, 2606 bp, Homo sapiens
ggtgtctttgcccatagtgcctgttttgtgtcagggaaagaatcaacctgggagccaagcccaggaatcaggatgaccaagacatactgcacaaggagggaacaaacccatccaaggacactcaaggacaaatcaagcaaatgaatttaagggagacgtgctcatggtctgctttgctgctcagcatggctgggaggcacagtggaagatcatgcatcctgcccctgggactcctctgccagagcctgagagctttctcctgcccacaggctaggggtagggcagttggaattgatccatgccttctagctagactgtgggtcccctcagtcttgggcatggtgacagcccagcatcagacagaggtcagtatcaaactagaaaatttaataaatactgtcagatttgtagacccaagaaaatataaactgccaatcacggaggaaaaaaatctctcaatgatcttatctttatatgattcccttgctgcctggagattgacatttccttggggataatctggtcataggattggtgaaggtggaagggaggcaacctccaaaggtggggccctctgctcacctgggacagggagggcctgaggtaggtgtctgtgtgggctggggaggaggatgggagcagtgcttctagatgtttccactttctcctcattagataataacgaatgggtgatttccctagtcactgcagtgtgaggaaatctacaaaattaatttcacaatacgctttacaggataggtggagaaacacatgaagtacaactgcagtgggttataaaaaacggcctttcgagttgagcaataaattcgttcaagcagccattctgaaggacaaactggctctgtatttaagaggggcattccagcacttctctagccactgggttgacaatgactcaccaaagcctctggtagccaccacaggacacccagagcatatgttttaaagctgaacaccaaactgcggacttcgggagtaagtgaactgactggtttttattttgttttactgcttttaacattacagtaactgttacaggttccagcaggctaactgggtggaaatgagtttggtttcacttagtctctctaaagagaaagcaagtcggtagactaatacctaataaaagcaaagctgccaacaattgaaattgcctaggctgctctgtgtgtcccacatgcatgggtgtgggtgccagtgtgtgtgcgtgtgtgcatgcatgtgcatgtgtgttgggatagagtggtaagaaaatgggaaataataagaatgttcagtccatagcccttcattataaaaaggtgagctgtaataaatactagtgccacatttagccaaaactttactccagccaaaggtgatattttcatgataacatcctgtgattgctttgttcttcgtcttttatgttcttcctagatgggctcagaacatacaagaattaagtacacatcttattttccagtgataatgctaccggcaaattctgttgtttgtataaacatcagccatgtttatataactaaactagtgttttgttttgtcaattcagcaagaaattagaccaaatggtggcttaatgctgcattgatttggctatcaatttgttttcacttttctgcaaaataattaatacattattaaattgaattgtgctgatgccacagttgttcttatctcaagtgtcttaaaattcatttaatttgtttttcctttggtttcattattcaaattttaacttcagttctcaagattttatctgatggaagagatggagtccattactaaggactccattgtgctccatcatgccagagttgtaaaatagatcttttaaaggaaatttactgtgattttttttctatttaagagcttcctctccagttgagcatgtaagaaaattataccaggagaatacagtaaactctatgaggcaagctataaacatgtagcattgtgattagggctggttctccttctagagayatggtaggattgcaatttcataccatccttgaagttagagagagccacgtgactcatttagccaatgaactgtgagcagaatgacatgtcacttccagctgaagctttaacaatctgagagacattcatacattttccatgtgctgtagccttatacccaaagcctgggtcccaagtgaccatgacaggcagagctccctgttgagccacagagatttagagaatggctgttaacacagcataatccagcccatcctgactaatctgatattaacatgtataataaagaattctatcaatgctgagggaagatgactagttaaggtcctaggttgcaagtctcaaaacctcttctaaggattgtagacaggaaattaaatgacttctagtccctagagttcccaatctcctaccatcccatcctaatatgacagaagtaattcctgagttgcttctgaaaccagagcttccctcagaacccttagcctgccagatggcttcttggagagccctcactcacttttctccttctgctattgctgctcattcattccagtttttaaaaattcatctttatccaggaacctcgcttctagaaa

SEQ ID NO: 722350 - DNA, 2606 bp, Homo sapiens
ggtgtctttgcccatagtgcctgttttgtgtcagggaaagaatcaacctgggagccaagcccaggaatcaggatgaccaagacatactgcacaaggagggaacaaacccatccaaggacactcaaggacaaatcaagcaaatgaatttaagggagacgtgctcatggtctgctttgctgctcagcatggctgggaggcacagtggaagatcatgcatcctgcccctgggactcctctgccagagcctgagagctttctcctgcccacaggctaggggtagggcagttggaattgatccatgccttctagctagactgtgggtcccctcagtcttgggcatggtgacagcccagcatcagacagaggtcagtatcaaactagaaaatttaataaatactgtcagatttgtagacccaagaaaatataaactgccaatcacggaggaaaaaaatctctcaatgatcttatctttatatgattcccttgctgcctggagattgacatttccttggggataatctggtcataggattggtgaaggtggaagggaggcaacctccaaaggtggggccctctgctcacctgggacagggagggcctgaggtaggtgtctgtgtgggctggggaggaggatgggagcagtgcttctagatgtttccactttctcctcattagataataacgaatgggtgatttccctagtcactgcagtgtgaggaaatctacaaaattaatttcacaatacgctttacaggataggtggagaaacacatgaagtacaactgcagtgggttataaaaaacggcctttcgagttgagcaataaattcgttcaagcagccattctgaaggacaaactggctctgtatttaagaggggcattccagcacttctctagccactgggttgacaatgactcaccaaagcctctggtagccaccacaggacacccagagcatatgttttaaagctgaacaccaaactgcggacttcgggagtaagtgaactgactggtttttattttgttttactgcttttaacattacagtaactgttacaggttccagcaggctaactgggtggaaatgagtttggtttcacttagtctctctaaagagaaagcaagtcggtagactaatacctaataaaagcaaagctgccaacaattgaaattgcctaggctgctctgtgtgtcccacatgcatgggtgtgggtgccagtgtgtgtgcgtgtgtgcatgcatgtgcatgtgtgttgggatagagtggtaagaaaatgggaaataataagaatgttcagtccatagcccttcattataaaaaggtgagctgtaataaatactagtgccacatttagccaaaactttactccagccaaaggtgatattttcatgataacatcctgtgattgctttgttcttcgtcttttatgttcttcctagatgggctcagaacatacaagaattaagtacacatcttattttccagtgataatgctaccggcaaattctgttgtttgtataaacatcagccatgtttatataactaaactagtgttttgttttgtcaattcagcaagaaattagaccaaatggtggcttaatgctgcattgatttggctatcaatttgttttcacttttctgcaaaataattaatacattattaaattgaattgtgctgatgccacagttgttcttatctcaagtgtcttaaaattcatttaatttgtttttcctttggtttcattattcaaattttaacttcagttctcaagattttatctgatggaagagatggagtccattactaaggactccattgtgctccatcatgccagagttgtaaaatagatcttttaaaggaaatttactgtgattttttttctatttaagagcttcctctccagttgagcatgtaagaaaattataccaggagaatacagtaaactctatgaggcaagctataaacatgtagcattgtgattagggctggttctccttctagagacatggtaggattgcaatttcataccatccttgaagttagagagagccaygtgactcatttagccaatgaactgtgagcagaatgacatgtcacttccagctgaagctttaacaatctgagagacattcatacattttccatgtgctgtagccttatacccaaagcctgggtcccaagtgaccatgacaggcagagctccctgttgagccacagagatttagagaatggctgttaacacagcataatccagcccatcctgactaatctgatattaacatgtataataaagaattctatcaatgctgagggaagatgactagttaaggtcctaggttgcaagtctcaaaacctcttctaaggattgtagacaggaaattaaatgacttctagtccctagagttcccaatctcctaccatcccatcctaatatgacagaagtaattcctgagttgcttctgaaaccagagcttccctcagaacccttagcctgccagatggcttcttggagagccctcactcacttttctccttctgctattgctgctcattcattccagtttttaaaaattcatctttatccaggaacctcgcttctagaaa

SEQ ID NO: 722351 - DNA, 1513 bp, Homo sapiens
acactagtattttctctgagtttaaaattcaatacatgcctactgatatggttaggctttgtatccccacctgaatctcatcttgaattgtaatccccatagtccccataatcccacaggtcaagggagagaccaggtggaggtaattgaatcatgggggcagtttcccctgtgctgttcttgtgatagtgagttctcacgagatttgatggttttataagggattctttcccctttgctcggcacttcttcatgctgccttgcgaagaagctggcttgcttcctctttgtcttccgccatgattgtagatttcctgaggcctcccaagctgtgctgaacggtgagccaattaaacttctttcctttataaattacccagtcttgggcagttctttatagcagtatgaaaacagaaaaatacacctactatgtaaaacttaaaatacaaaaaaacaaaacattatctcactaacataggagctaatattttggtgtactttgtttagtattttatattaaaaatatgtacatatatatttatatataattaagaacatgtatgtacaatcgtgcatacatcatgtacatacatctacttaagaaaatagctatgtaatataccattactcaactagattataattttttctccatttctttattgtaatttatcattttctacttttttgttttctcatttttattgcataatatttaattatgcaaaaaatacattaaatacattgaaaatatatagtgtagctataagaataaagaacgatggtaaaacaaatgctaatacccactacctgacttaaagaatatgatattatttttttccaattgaaattccctcaactactcagaattactgctatccctcttatcctttcattaattttcttctagttttctcacatgtgaatctatttctaaatacatttctttattttgcaagtttttggacttcatataaatgtaaccatattgtatatattcttcttcagcttcttagtttttcactaaacaatatgttttgctgatatttacattcatatgtacagtaatagttgatttattttaatggctatatattattccattgttagaatacaccaggatttatttttacttattttttttgctggaaaattgggtgtcttttttattttttgatataacaaacaatgttgtaatcattttgtatttacttcctagtccactcctgtaagtttctcttgagtacatactagcaatgaatatgctgagtcactgcatatacatactcacaactttattctataatgtaatattctataaagtagctgtatcagtttatactttaaccagtaatggacaagattttctattacttcccatctttgttattacttttagactctaacttttatcaggctcatggatgtaaaaagcatctcagggtggttttaatttgcatttatctgctcatctatgaagatsagcttcttttcatataattatgagtcatta

SEQ ID NO: 722352 - DNA, 611 bp, Homo sapiens
  misc_feature 455: n = A,T,C or G
tgaggggaggagggaaagaggaagaagagcatgttcagcacttcctcaaagcgcgaatataaaatgtgcctggccctcaagtgactcgtaaaaaataaaatgaaatctcatatatgtaaacgagctctggttattcaggctggatgaatcgtgatttgtttttcccaacactgtatttctctatcttttacagggccgctaatgtacatatattcaatatgggagatggttcctaaatgtcatccaaacatgcctatttgctctcatgggatctatgactttaattagtcctcatgccattcgtcttcaagatcccatcaaatacttacttaaactgtgtgtgtgtgtgtgtgtgtgtgtgtgtgtgtgtgtgtgtgtgtgtgtctggttttcaccaggcatggagcagcatcacagccagggccctgtatgtgtgtctgaggtggcagggcacntgaagagagccagtggccttcattctgmttggctaggtgacaagtggttccaacatgcaccctgtgttttataatgtggacatctgactatttctactattctaaagtgcaaatgtccccaagttcataagtggcacatactgtttcacagtgaat

SEQ ID NO: 722353 - DNA, 867 bp, Homo sapiens
tatatatataatatagatagatatagatatatatagatattttgagataggctggagtgcagtggcatgatcatagttcactgcagccttgaacccctgggctcaagtgwtcttcctgcctaagcgtccctgaatagctggactatagatgtaggccactgcacccaggtgacattttaaggatcaggcctagaagtggtggacatcatttgtacccacattccattgggaaagagtccaatgtagtcttccgtgtgcacaggaagagagaatggaattggaaaatttaggcagtctcttacacaaaagaccacccaattttcttagttcttggaactcaactatagtgtactgtccgtacataataaatattacttgaactacttgaaaacaattttattgaaaaagaatgaaacatgagaatttagtgctaaagtattcattttggggaatttggcttttataatttaaaatcatagggagcaaaaagttatttccttattttcttcttgatattatagttctgcttaaattttaacaatattttcaaataaccataaatgggaagggaaattagcctatatacaaataaacttaaggatctgtacatgttccagtttaagcgtgtggaccatagttttgtcattatgcaatggaattttatttcaatgcattttgtagaaaatcttccaaaattatataaaaccctaggtctgtcactttgtcatgtcagtttcattttaaagctataccactgagaattctaaagatttttccatgcttgtttaaaagtatgtattttcaatatgcagatatttataagttatatttctctaggccatttccatgacatacttcactaattta

SEQ ID NO: 722354 - DNA, 821 bp, Homo sapiens
tgcagaaatgtggctcaattaaatatgctttacaaattattgagtcttgggtagtgtctttatagcagtgtgaaaaaggactaacacacacacacaaagcactatagctaaatgcttacagtaaaatgtggtctatgattyctattaaagttattattttaattttttgattgaatttttagttaaatacaatttattgtttatttttaattaaataggcattactttatctttaattgatatttggtttggatggtatcgtaagatgtgaagggattgagaatgagttacaatggcataactttgcctactttttgttatttctcatatattatgtataacatataacattattctccactatgtgtttgtactagtttagccttaatcagttcagtcttcatttgatctacaattgaacaacccaagccagaggaacatactataaatttttctagacattttagagttggaaagggtgttactgatcatctttttttttttgtaattttacactgtgtttttgtggaatcttaggcagttcctttagggtgtctataagttgcctgggaagtggatgagtttcaagctggcaatactctgccttcccctgcttaaaatggaaaaaccctgcttattggtaagtttttgtgcaaaatttcttctgatgagaactttatgttgatataaagttggaaatgctctgattttgttcagtatactcattttcatgggagcacactgagggccagggttgtaaaaggattttcccaagttccaaattaaagaaacaggactttcccttagacatctggtgtaag

SEQ ID NO: 722355 - DNA, 821 bp, Homo sapiens
tgcagaaatgtggctcaattaaatatgctttacaaattattgagtcttgggtagtgtctttatagcagtgtgaaaaaggactaacacacacacacaaagcactatagctaaatgcttacagtaaaatgtggtctatgattcytattaaagttattattttaattttttgattgaatttttagttaaatacaatttattgtttatttttaattaaataggcattactttatctttaattgatatttggtttggatggtatcgtaagatgtgaagggattgagaatgagttacaatggcataactttgcctactttttgttatttctcatatattatgtataacatataacattattctccactatgtgtttgtactagtttagccttaatcagttcagtcttcatttgatctacaattgaacaacccaagccagaggaacatactataaatttttctagacattttagagttggaaagggtgttactgatcatctttttttttttgtaattttacactgtgtttttgtggaatcttaggcagttcctttagggtgtctataagttgcctgggaagtggatgagtttcaagctggcaatactctgccttcccctgcttaaaatggaaaaaccctgcttattggtaagtttttgtgcaaaatttcttctgatgagaactttatgttgatataaagttggaaatgctctgattttgttcagtatactcattttcatgggagcacactgagggccagggttgtaaaaggattttcccaagttccaaattaaagaaacaggactttcccttagacatctggtgtaag

SEQ ID NO: 722356 - DNA, 821 bp, Homo sapiens
tgcagaaatgtggctcaattaaatatgctttacaaattattgagtcttgggtagtgtctttatagcagtgtgaaaaaggactaacacacacacacaaagcactatagctaaatgcttacagtaaaatgtggtctatgattcctattaaagttattattttaattttttgattgaatttttagttaaatacaatttattgtttatttttaattaaataggcattactttatctttaattgatatttggtttggatggtatcgtaagatgtgaagggattgagaatgagttacaatggcataactttgcctactttttgttatttctcatatattatgtataacatataacattattctccactatgtgtttgtactagtttagccttaatcagttcagtcttcatttgatctacaaytgaacaacccaagccagaggaacatactataaatttttctagacattttagagttggaaagggtgttactgatcatctttttttttttgtaattttacactgtgtttttgtggaatcttaggcagttcctttagggtgtctataagttgcctgggaagtggatgagtttcaagctggcaatactctgccttcccctgcttaaaatggaaaaaccctgcttattggtaagtttttgtgcaaaatttcttctgatgagaactttatgttgatataaagttggaaatgctctgattttgttcagtatactcattttcatgggagcacactgagggccagggttgtaaaaggattttcccaagttccaaattaaagaaacaggactttcccttagacatctggtgtaag

SEQ ID NO: 722357 - DNA, 1144 bp, Homo sapiens
  misc_feature 1043, 1044, 1045, 1046, 1047, 1048, 1049, 1050, 1051, 1052,1053, 1054, 1055, 1056, 1057, 1058, 1059, 1060, 1061, 1062,1063, 1064, 1065, 1066, 1067, 1068, 1069, 1070, 1071, 1072,1073, 1074, 1075, 1076, 1077, 1078, 1079, 1080, 1081: n = A,T,C or G
  misc_feature 1082, 1083, 1084, 1085, 1086, 1087, 1088, 1089, 1090, 1091,1092, 1093, 1094, 1095, 1096, 1097, 1098, 1099, 1100, 1101,1102, 1103, 1104, 1105, 1106, 1107, 1108, 1109, 1110, 1111,1112, 1113, 1114, 1115, 1116, 1117, 1118, 1119, 1120: n = A,T,C or G
  misc_feature 1121, 1122, 1123, 1124, 1125, 1126, 1127, 1128, 1129, 1130,1131, 1132, 1133, 1134, 1135, 1136, 1137, 1138, 1139, 1140,1141, 1142: n = A,T,C or G
tgtcacaagcaattccctccatcactgcacctcaatctagaacatcattttgtttctctagagacttgagttgtctatttgtataaaagcagcatctatgaatgaaaccatcatcactttaattccatggttttctcaatatggcatagaaattacatgactgatatttcaaactgacagttccattaaattataatcaacattatattctatggcttttttactgagacctttacaaattgcttcattttatgcttctgctctgattattttccattgctacattataagccacattctgttgaaaaaaaaaaagagaaataagcagctgctactctttctttaatctttctgtgttttgtaaaaaaaaaaaaaaaaaaaaaaaaaaaaaaaaaaaaaggatttttagtatccaacctttccaacaagtcaaatatataattctccatctgtagaaattacatytgcagttggcacaagtcatttcagccagtgtctccagcaggctaacaactggcattagtggcggatgtttttagctttttccttgttagtgtaggctttgattttgtgggatttctttgtcatcataaaaaggcctaactggggccacctattgtgagtttgttttggaggacatgtcagtaaagcaaagttccactccccctctgattagatgccttctgaaagctgctgaaatgcaaatgtgaaaagagttttggttttctaataaactttttattgcttattttcaaaatcatttgccattttgtacaatgtaatgaaaattaaaattggctatggaaaccacttagacctcaagagctttcaaactattcagctatttaaaacaatatgggaagaatttaagtatttttttaaagaaaggcttgccaaaattctatattgttcatgtttatcttattgttttatgagttcttttcttaatagcaatgtaagaaattattcttatgacttcatgttcatcttccaatttttatgtttcataatcatgattataaggcatattcttatgatttctnnnnnnnnnnnnnnnnnnnnnnnnnnnnnnnnnnnnnnnnnnnnnnnnnnnnnnnnnnnnnnnnnnnnnnnnnnnnnnnnnnnnnnnnnnnnnnnnnnnnta

SEQ ID NO: 722358 - DNA, 1144 bp, Homo sapiens
  misc_feature 1043, 1044, 1045, 1046, 1047, 1048, 1049, 1050, 1051, 1052,1053, 1054, 1055, 1056, 1057, 1058, 1059, 1060, 1061, 1062,1063, 1064, 1065, 1066, 1067, 1068, 1069, 1070, 1071, 1072,1073, 1074, 1075, 1076, 1077, 1078, 1079, 1080, 1081: n = A,T,C or G
  misc_feature 1082, 1083, 1084, 1085, 1086, 1087, 1088, 1089, 1090, 1091,1092, 1093, 1094, 1095, 1096, 1097, 1098, 1099, 1100, 1101,1102, 1103, 1104, 1105, 1106, 1107, 1108, 1109, 1110, 1111,1112, 1113, 1114, 1115, 1116, 1117, 1118, 1119, 1120: n = A,T,C or G
  misc_feature 1121, 1122, 1123, 1124, 1125, 1126, 1127, 1128, 1129, 1130,1131, 1132, 1133, 1134, 1135, 1136, 1137, 1138, 1139, 1140,1141, 1142: n = A,T,C or G
tgtcacaagcaattccctccatcactgcacctcaatctagaacatcattttgtttctctagagacttgagttgtctatttgtataaaagcagcatctatgaatgaaaccatcatcactttaattccatggttttctcaatatggcatagaaattacatgactgatatttcaaactgacagttccattaaattataatcaacattatattctatggcttttttactgagacctttacaaattgcttcattttatgcttctgctctgattattttccattgctacattataagccacattctgttgaaaaaaaaaaagagaaataagcagctgctactctttctttaatctttctgtgttttgtaaaaaaaaaaaaaaaaaaaaaaaaaaaaaaaaaaaaaggatttttagtatccaacctttccaacaagtcaaatatataattctccatctgtagaaattacatctgcagttggcacaagtcatttcagccagtgtctccagcaggctaacaactggcattagtggcggatgtttttagctttttccttgttwgtgtaggctttgattttgtgggatttctttgtcatcataaaaaggcctaactggggccacctattgtgagtttgttttggaggacatgtcagtaaagcaaagttccactccccctctgattagatgccttctgaaagctgctgaaatgcaaatgtgaaaagagttttggttttctaataaactttttattgcttattttcaaaatcatttgccattttgtacaatgtaatgaaaattaaaattggctatggaaaccacttagacctcaagagctttcaaactattcagctatttaaaacaatatgggaagaatttaagtatttttttaaagaaaggcttgccaaaattctatattgttcatgtttatcttattgttttatgagttcttttcttaatagcaatgtaagaaattattcttatgacttcatgttcatcttccaatttttatgtttcataatcatgattataaggcatattcttatgatttctnnnnnnnnnnnnnnnnnnnnnnnnnnnnnnnnnnnnnnnnnnnnnnnnnnnnnnnnnnnnnnnnnnnnnnnnnnnnnnnnnnnnnnnnnnnnnnnnnnnnta

SEQ ID NO: 722359 - DNA, 2805 bp, Homo sapiens
ttattttttcttattaatgtttttaatattattaattagccaagaaacatagagtcgtgcaaaggcctgtctttaaaatggacttgcaaccagaatgagccagcaccccacacagtagggaatggaaatgcactcagcagatacagtgacagctcagaattgggtggacagcaataatgcccgaaggaagaaaatcagctccagctttcatgctttattttagtccagtgggtttttaggttgacgccgtctgacattgacrgagctctccttcccgcagcctcccatgtttaccctcaagtgtgctctgtgcaacttcccctgggtctgaatccagcctgactagttgagaccagggccaccggacaaggagtatgactaattctgcctcaacacacaaccaggatggcacttgcacctccgtatgtgacaaagcatttgaatccccagagaaagagtgcccaggaaagcagacctgtgaaagcaactgggtaaaccatttttatctctttccctagcctgtccacggtagaaaccagtgattctgcaagggttggagccacatctaatattttctattgcttacatttcttgaaatttaaatgtagccctctacttctacttctttttcattatcctctccccaggtaaggtagagatcaaacaggtttccttctttatctctcctttttttaaacatgggaagatgaacccaacagggcttacaggtccattgaaatctccagcagcctacagagtcaatagcatacgagtcaactttgatttatacaaagccagagatgttggattgggaaaacaatgtacgttttcagaataaacacatttacaaaaatatatactgactgatacatcttaaccatctttactgatgtctgtgaaaaacacacctgccaaaagagatagacaaattaaaaagaacaatcacataagaagaggtgctttcagaccccgggagggtgatatgatttggctctgtgtccccacccatagcttaccttaattgtaataatccccacatgtcaagggcaggacacggggggaggtaattgaattatgggggtggtttcccctatgctgttctcatgatagtgagtgagttcccatgagatctgatggttttataagcatctggcattttcccttttggcgctcattctctctccagccgccctgtgaagagataccttctccatgattgtaagtttcctgaagcctccccagccatggggaattgtgagtcaattaaacctcttttctttttaaactacccagtcttgggtatttcttcacagcaatatgagaacagactaatacagagggatataggacatagcaaccaaatatcataatctgggctttattactatttccttgattagaagttttcatactcagataaataagtgctttgtcttaccagaatctttgtatttttgttaattcgagaccacgtttccaaagctttgaatcctggaatgtaaatttatcttagaaattaccagccctttgattagccctgatatgttttatgtatcataggccacctaagatggcttattagtttttctggatcccctggagcaaaagaggatggaaaatgttggggacaccaggagggcatgcattaagtgcactggagcatcagctcatagtgctcaggagacctaagagaacacatttgcctaccagagatcctacctaatgactcccagggagtagcgtacttaccccaggatttattttagaggaatcctacagctcagtacctctcctaatggactcctgggaatccttggatatgttttcggtcatctttaggtttcatgattatttagtgtcatgttttatttcagtgatctttcaaaaacaatacaagcacatttgggtagtctgactgaagacttacaaccaagcactgccaagtaggaatgacctaaagtggtggcaggtaacttttaataagaattcagaagagtcccaggctatcagataatgccccacggaaataagaaaagttcccacgtgtaggggccacaattgttatccaaggctaaggattgaagtacagcatttctcttcttactcttcaatctcaatatgtaaccaaaaatcaagggaaatgttcatgaattaattaacttccatattgtctattaagaccagagcaacagccttggcacttccttcctggttctttgttttagctcccatttaaggtgtgctttgtcatctgtattgacttctggactggcatagccacatacatactgtgtctcaggagctattaagaaatccccgctagtgcctgaaatgaactcagaagagccccaggctatcagataatgtcccagtaatgcgtacaggtcatcattattcagagactgtggaatgaaattccagtcagagcaaattccttctgacatatgaattttctggggctcattaagatgaaccaacctgggaagaagtgagtgggaaaaaaaagcttctaatatccccccaccaggaaaaaaaaaaaaaaaagaagtgtaagccagctgaaaacagggagttgatttcccagacgatgttgtggattgatttagatgcagctatcccagaactcatacaatcctgattaatacccactttatctccctctgttgctcactctcacacagatgaattaaataatgcctacctgtgccaccccaagtcctgcaggagcacatcctgattgctcagaagtagtctattatggcgagcatggaaagcaatcataataaattaccacttttaactcta

SEQ ID NO: 722360 - DNA, 594 bp, Homo sapiens
acatgtaattacagagccctggaattagttgtaccctcttcatcccacagttgaaaaaataggagcccagttggcccaagtaacttgctcaaggctccacagctggttcaaagaatggaagtcaagtgaatggttgaaaaaatctttcttctcattttaaaataagtgtttggcatatatacttgaccagattatacatttatccataacttattatatgttcatgtagtaatcatatttatatcaagatgtaatatgttgcattccctggctgggctttgtgtggtgctggatgaatggggaggtgggaagggggaattgatcatagagtctcagaaatatataaggggaattgatcttattatagaattgtgaatgcctaagggggtagaaagaaaccataaatgtgcgaaccagatgcattcaaggtccaagacaaaggggagtgattgggactgtgaagaaccagacaatgcatgcacgttcaaggaaagaagactacttggctcatgcccattattgttccrtgaaagaatgtgaattcaatgttgccaagagcctctaattttaaagagaagataaaaatctacatgc

SEQ ID NO: 722361 - DNA, 631 bp, Homo sapiens
tatatattatatatatgaaatatataatatatgaaatatattatatatgaaatatatattatgtatgaaatatatatgaaatatatattatgtatgaaatatatatatgaaatatatatgtatgaaatatatttatatgaaatatatattatataaatatattctatatattatatataaatatattttatacatatatatatagagagagagagagacagattttcacccttgttgcccaggctagagtgcaatggtacgatctcggctcactgcaacctccacctccagggttcaagtctcctgactcagcctccaagtagctgggattacaggtgccygccaccacgtctggctgatattttggtatttttaatagagacggggtgtcaccattttggccaggctggtctcgaactcctgacctcagatgatccatctgcctcggcctcccaatgtgctgggattacaggtgtgtgagccaccatgcccagcctaatccaatatttttcatgatgtgttggtgaatcattaaatcagtttggtgagttttgactggaattttatttaaattaaattgaataacagaaaatatcatagtctatcaaagttaaaggtgtgattttttgag

SEQ ID NO: 722362 - DNA, 631 bp, Homo sapiens
tatatattatatatatgaaatatataatatatgaaatatattatatatgaaatatatattatgtatgaaatatatatgaaatatatattatgtatgaaatatatatatgaaatatatatgtatgaaatatatttatatgaaatatatattatataaatatattctatatattatatataaatatattttatacatatatatatagagagagagagagacagattttcacccttgttgcccaggctagagtgcaatggtacgatctcggctcactgcaacctccacctccagggttcaagtctcctgactcagcctccaagtagctgggattacaggtgcctgccaccacgtctggctgatattttggtatttttaatagagacggggtktcaccattttggccaggctggtctcgaactcctgacctcagatgatccatctgcctcggcctcccaatgtgctgggattacaggtgtgtgagccaccatgcccagcctaatccaatatttttcatgatgtgttggtgaatcattaaatcagtttggtgagttttgactggaattttatttaaattaaattgaataacagaaaatatcatagtctatcaaagttaaaggtgtgattttttgag

SEQ ID NO: 722363 - DNA, 2135 bp, Homo sapiens
  misc_feature 648, 649, 650, 651, 652, 653, 654, 655, 656, 657, 658, 659,660, 661, 662, 663, 664, 665, 666, 667, 668, 669, 670, 671,672, 673, 674, 675, 676, 677, 678, 679, 680, 681, 682, 683,684, 685, 686, 687, 688, 689, 690, 691, 692, 693, 694: n = A,T,C or G
  misc_feature 695, 696, 697, 698, 699, 700, 701, 702, 703, 704, 705, 706,707, 708, 709, 710, 711, 712, 713, 714, 715, 716, 717, 718,719, 720, 721, 722, 723, 724, 725, 726, 727, 728, 729, 730,731, 732, 733, 734, 735, 736, 737, 738, 739, 740, 741: n = A,T,C or G
  misc_feature 742, 743, 744, 745, 746, 747: n = A,T,C or G
tatttctgttttctctacctgagagcaaaggtgctgacctaactgcttctgtttactgccatgcacagtgtcttccacacagtaggtatcataaatgtttgctgaaaataagtgaattgaaatggggaagagagtaggtgaaaggtgggggaaaagaaaagctgataggccaaagttgtttcattaatttcagtctgagtgttttagaccctactgtttcctccaggttactaaagcaaatttatctgagcaaataagctttcatatttgcatttctttgaaccctaatttgacatgcaaataagccactaactagaactcagcttcaatcggcagtgtttaaacagaaatccccatagctattcagaaacctgtgcataaaaggaagttagcattagccagtgtaggtaacaatgatagccactacagctaagggggcacattctccacattgttttctgcagtttcctatacacctcttccagggtcttctctgaaacatcgactctaagagctgaaacgaacttaaaggccttaaaggcacattggttcagctttctcagccccccagctggaatcctctctctagtagcaccagcctctgttgtcacacaccagtgacacgttgctcattatctcctaaggggnnnnnnnnnnnnnnnnnnnnnnnnnnnnnnnnnnnnnnnnnnnnnnnnnnnnnnnnnnnnnnnnnnnnnnnnnnnnnnnnnnnnnnnnnnnnnnnnnnnnttcaaagaatctcatctgctatcttctgatatgacagcctctcttggtctcagctttgttatgtactaaagaaagagcttgggagcctatgttcctttttctctactcttactatgtgcagtatgtaaattgtgacataccatttccctctaggatccaagttccatatcattgtgttgggcacatgaaccaatatggattgtatggacagaacgtatgccatctgcgtgtttaaggaaacaaatttgtggaaatctagcttacaatggaatccagtaggatcttgtattctttactacatgatctaatataatggcattaaattaaatatgatatttatggagagccatccagttaatcttctctgctggaaaaacagtccacacatgactagagggagacaaaaatattacttggggaaccaagcaattatattgtgaagagagggaaagaaaaacaaattttatttcttcattcaatctcctgatttttatccaatgaatgactttcttggcaaacagtgacacacagaatgttcattaagagagcctggcagcttgtccttgaattcttttcaaatgtttagtgtgctgcaatccaattaaatgatacaggaaggcattaaaaagcatggaataataccacggagagtaccctggtaacaggaaacaacaaagacagggacctggggcccaggttcaaggctaggctcctcttctctcttgctgagcagagaatcttttgttggtgttggccaatattgtcaaatcagtcactccaaacccagtcagtgaggtgatgagagacttacttttgatttaagtaccaggcaaatcaagtaccagtgtcaagcctccgagcccaagctaagccatcacatcccctgtgacctgcatgactacatccagatggcctgaagcaagtgaagaatcacaaaagaagtgaaaatggccggttcctgccttaactgatgacattccaccattgtgatttgttcctgccccaccttaactgagcaattaaccttgtgaaattccttctcctggctcagaagctccctcactgaacaccttgtgacccctgccctgcctgcaagagaaaaacccactttgattgtaattttccactacccaccgaaatcctataaaactgccccacccctatcttccttgctgactctcttttctgactcagcccacctgcacccaggtgattaaaaagctttattgctcacacaaagcctgtttggtggtctcttcacagggacacacatgacaaccaggactaggcaaaacacattcttggccaaaagaagctctaggtgaacaaggaagagawgtaatcagaaacacaagagggatgaaatataaatataaaagtgtagacca

SEQ ID NO: 722364 - DNA, 1215 bp, Homo sapiens
tagtaaatttatctgggatgagaagtacatgaagactagtaagactgataatttttaaaatcctcgcaattattttataaagagtgctcccacattaaccatctcatttagttctcaacaccagtctaggactgatgaatgaagaaacaaactcagagaggtgaggtaatgtggctgaactggtctttaagcccagatttctgactccacattcaaccctaccctcattgtactactactcactcatgcagcattcttcatgaatgttacagtttccagrttcatgacataaatatggaaaacagctgcaatctacgcggaggtcagtcgaataaaaaaggcaggcaagtcagcaaattattgcagaacaattaagcactgaaattctaggtgggaacaaaatacttcagaaaaacagaaaggagcaacaaattacctcgtggaaatggggaaggcttcatgggaaataatgtttaacttagatttagacatttaactctacttggagtgtagagatttctgtgtagacagacaaaatgattatatgagagacagaagaaactgcacaaagcaagacaagtatgtaaaaggccatgacatctctaaggtagagtgaggtaccttttgtggctgaagcacagggtctgtgagagtgtaacacagatgacattggagaagaggtagaggtgagcctagggacactgggtgccacggtatagccaagaatgggacagagtcaggaagggtaagggcaactaatatatacaaagagcatcttatctttagaaagatcattccagcaacagtaagagaataaatgatagagccagaggctgctaagggatggcaatttttgaggttgttgcagcatcactgaaaaaaagaaaggaaaaatccatcagtagataaagggataaacaaaatcttatacatacacatagaatactattcagccatgtaaaaaggacagctaaatgatatctcgtggacacaaagaggggaacaacacacactggggcctacttgagagtggaaagtgggaggagggagaggatcagaaaaaataacaattgggtactaaacttagtacctgcatgataaaacaatctgtataataaacattcgtgacaccagtttacctgtgtaacaaagctgcacatgtatccctgaacctcaaataaaagtttttttaaaaaggaatgaatttttgatata

SEQ ID NO: 722365 - DNA, 1215 bp, Homo sapiens
tagtaaatttatctgggatgagaagtacatgaagactagtaagactgataatttttaaaatcctcgcaattattttataaagagtgctcccacattaaccatctcatttagttctcaacaccagtctaggactgatgaatgaagaaacaaactcagagaggtgaggtaatgtggctgaactggtctttaagcccagatttctgactccacattcaaccctaccctcattgtactactactcactcatgcagcattcttcatgaatgttacagtttccagattcatgacataaatatggaaaacagctgcaatctacgcggaggtcagtygaataaaaaaggcaggcaagtcagcaaattattgcagaacaattaagcactgaaattctaggtgggaacaaaatacttcagaaaaacagaaaggagcaacaaattacctcgtggaaatggggaaggcttcatgggaaataatgtttaacttagatttagacatttaactctacttggagtgtagagatttctgtgtagacagacaaaatgattatatgagagacagaagaaactgcacaaagcaagacaagtatgtaaaaggccatgacatctctaaggtagagtgaggtaccttttgtggctgaagcacagggtctgtgagagtgtaacacagatgacattggagaagaggtagaggtgagcctagggacactgggtgccacggtatagccaagaatgggacagagtcaggaagggtaagggcaactaatatatacaaagagcatcttatctttagaaagatcattccagcaacagtaagagaataaatgatagagccagaggctgctaagggatggcaatttttgaggttgttgcagcatcactgaaaaaaagaaaggaaaaatccatcagtagataaagggataaacaaaatcttatacatacacatagaatactattcagccatgtaaaaaggacagctaaatgatatctcgtggacacaaagaggggaacaacacacactggggcctacttgagagtggaaagtgggaggagggagaggatcagaaaaaataacaattgggtactaaacttagtacctgcatgataaaacaatctgtataataaacattcgtgacaccagtttacctgtgtaacaaagctgcacatgtatccctgaacctcaaataaaagtttttttaaaaaggaatgaatttttgatata

SEQ ID NO: 722366 - DNA, 1172 bp, Homo sapiens
tgttctttcattttggttatcatgtgtcaggaaaagtaagttctgaaaagagccactctaatttgcatcaagcagtttgaaaatggccttttgtggcactagcattggccacagcatcctgtatcacatgaggtgccctcagtccaggatcccaatgagaaggcagtcagcacaatgcaatgatctgtatagcaaatggaatgttctaaggtttctcaaaatcaagattcctgacaataaaggaaatagtaaatattttcagggcttttttttctgaatgaaataaatattacctgcagtagatgttactattgtgtttttattttaaaatggttaccagggacatatataaattgttctctatataggatgaccagatttcgcaaataaaaatatagaattcctaattaaattgaatttcaaacaatgaataattttaatatgaataggttccagaagtatcaaataatttttaatagcagtatgtcccatgtagtatatgtctcatgctatatatggaacatacttacatccaaaaaaattattcattgttttctccaaaattcaaatttggctgggtatatattttatctggcaaccatatttctgcagttcattaaaagttgtattttgggccaggcgcagtggctcacatctgtaatyccagcactttgggaggctgaggtgggcagatcactttaagccaggagtttgagaccagcctgaccaccatggggaaaccccatctctactaaaaatacaaaaattagctgggtgtggtggcagatgcctgtggtcccagctactcaggaggctgaggagggaggatcgctttagcctgggaggtagaggttgcagtgggctaagatcacgccactgcacttcagcgtggggtgaccaagtgagaccctgtctcaagaaaaaaataaatcgtgtttagttgacatgtagatttaatttacatttcaataatgaaatcagtgttgtcttttttcttctgtcattttcaagtaccaggatttcctgcctaaacaatttgcaatgtgtgtctgtttctctgcccatctcactatgctcttagatgcagagttacaaatatattctagttttatttctggttccaaagaagacagattttacaggtgtaatcagttttgtgctttatattaaaa

SEQ ID NO: 722367 - DNA, 543 bp, Homo sapiens
tacatatacacacacacatacacacacacgtatatttaagctctgtatactgtatatatattctgccaaacctgacaagcactcaaaatggtgcttctgaatcttcttcagatactggagatctctaccatcatctgaycactataggcctacgaaacatgctaaaatgtctgcgccagtataggaagctggtgggttttaataatctttttgcagagctaggctagccaagttggcttagcagttagaggtggtcttcacttgcagatagattgaaactattaattgcccaagtcccaagagctgggactggttttctggcatcccattttatgtgttagaatactcggccctaactgggatatgtgaaacccatgactggaagaggctgcagcaaagcagaacactctcactaagcaggacctcatttaggatttgactcatctggtccacaaagaacattagatgggaaaaccagtcctatttaagcttagcaaatcacttaaggatgcatgtgattttgaaaagagatacttttaaatg

SEQ ID NO: 722368 - DNA, 622 bp, Homo sapiens
tcatccttgtgaccatctccaagataagtattattaatttctttttacaggtgagaaaactaaggcttaaaaagttaaataacttgccccagtcttacrcagttaagagaaaccaagattcacacccaggtctggctgactcccaaacccatacttcttttcccaaactgcactgttttcaggctttccaaagccccatctgggcacctcccccgtgctggggcacataacccccttttttctcccccaactttgattcagccatgttcttacgacatgtctgtccaaagctcccttccccaggcctctcgttgtcctttcaagaacccccttgagctggcaggtgctctgagagtgatgtggacacaggtactcatggggatgggacagagtttgatgaaggaggagtgtcagttcctagatggggaaggaatacaggaagcagaaaaggaaaggtctgtatggaacgtgaggatgcctaacccagagattcttgctagggtgttgtgggagatgaggacatgcaacagaaaggagttctagaggctgtgcaattagtctggatctgatctgaaaataattgatggctagagaaggtctaagcagaggcatgacacatatg

SEQ ID NO: 722369 - DNA, 622 bp, Homo sapiens
tcatccttgtgaccatctccaagataagtattattaatttctttttacaggtgagaaaactaaggcttaaaaagttaaataacttgccccagtcttacacagttaagagaaaccaagattcacacccaggtctggctgactcccaaacccatacttcttttcccaaactgcactgttttcaggctttccaaagccccatctgggcacctcccccgtgctggggcacataacccccttttttctcccccaactttgattcagccatgttcttacgacatgtctgtccaaagctcccttccccaggcctctcgttgtcctttcaagaacccccttgagctggcaggtgctctgagagtgatgtggacacaggtactcatggggatgggacagagtttgatgaaggaggagtgtcagttcctagatggggaaggaatacaggaagcagaaaaggaaaggtctgtatggarcgtgaggatgcctaacccagagattcttgctagggtgttgtgggagatgaggacatgcaacagaaaggagttctagaggctgtgcaattagtctggatctgatctgaaaataattgatggctagagaaggtctaagcagaggcatgacacatatg

SEQ ID NO: 722370 - DNA, 606 bp, Homo sapiens
gtgttaaaaccatttgccatgttcattggcatgaagatggcactgcttcacccaaagttgcctaagttccataccagggtgtggcaaagcccctgtggggctggtgggagggcttgttctagaagcagtggtttacaagctggcgaaatgggtgggtgtggaggggcggctggtacagggcttggaaccctggakcaggatcccttttagggtctttaatggggtttgtcttgctttaatggggtttgtctttcccaactcctgagaatccccccagagtggtgggtgcagctggcatgtgcctctgtgtctcaacttgtgtttctccctgccagcctccggtagcagcctccaggaagcagagaggctggggagatgaaaagtgaggataattaagagttttatggggttgatgtgctactggtagcaacagcagccacaccccacctgcaccaggctgatgagcccacattgcttggggatgagcccacattgcttgggagtgagcctactgctgggggcagaacacagcttgggtggagagggagcttctggtgcccagcccggccacccccagctccacttctgatccagcatcaacagggc

SEQ ID NO: 722371 - DNA, 606 bp, Homo sapiens
gtgttaaaaccatttgccatgttcattggcatgaagatggcactgcttcacccaaagttgcctaagttccataccagggtgtggcaaagcccctgtggggctggtgggagggcttgttctagaagcagtggtttacaagctggcgaaatgggtgggtgtggaggggcggctggtacagggcttggaaccctggatcaggatcccttttagggtctttaatggggtttgtcttgctttaatggggtttgtctttcccaactcctgagaatccccccagagtggtgggtgcagctggcatgtgcctctgtgtctcaacttgtgtttctccctgccagcctccggtagcarcctccaggaagcagagaggctggggagatgaaaagtgaggataattaagagttttatggggttgatgtgctactggtagcaacagcagccacaccccacctgcaccaggctgatgagcccacattgcttggggatgagcccacattgcttgggagtgagcctactgctgggggcagaacacagcttgggtggagagggagcttctggtgcccagcccggccacccccagctccacttctgatccagcatcaacagggc

SEQ ID NO: 722372 - DNA, 2343 bp, Homo sapiens
ttggtaatattgtgggaaaggacagaggttatcaatgaagaaggagtgaaaataatagttgcttcatttgataaattatttttcatttttattttaaaaatttaataaattaacttgataaacaaaaattacatatatttatatgtatagtgtatatatgtatatatttatagtgtacatggtgtatttatatatttatatataaactttcccacattttccttcctatataaaagtttatatatttatagtgtacatggtgtattaacgtatgtatacattgttgaatgctaaatcaaattaattaacatatgcattacctcacatagttatcattttttttgtagtgagaacccttaaaatctatgctgctagtaattttcaagtatataatatattgttattaactatagctgacatggtgcactgatgcagtagtgaatactcttctcttatgagaagtgggtggtattaaaaagtatcgtgctaatgatgcattgctcagagccgcggaaaactaacccttaataatagactcctgtgttccttgctggacactctcacaacttttcacatcttttattctcacagcactgtgtgtgtaaaggagaaaactgaacctcacagaatctagacagttactgagcaatagagctttgatttgacagcatgactttggaccctggaatctgttaccattaattatgtcatagtgcctcaggtttacgcagaaaatcagcgatgaaatcaggatttaaaatccatgtaggaatctcagtaaaaggtagatcaaggggccttacagaaatagggcctgaatctttgtgacattcaagaaaatttgctctttctaaggaggagaagcttggataacatttcttgtctagtgcagtttgtccttgtatagccctgtggagttccttctcactctattcactgtttcttgatcatctactgcatttaatccatcctaatgaacattggtcgtgtaagagcttattagatctagagaataagaattctacacagtaaatatatgcaaattttcttctctcagatttgagaaatgttatattatgataagaattggaataatttcagcatcaaaagtgtcctttggaattcccaaatgtccttaattacaattcatttcaatgtcagagtaggggtatcataacttataaactgctaggatattaaaaaaagggttaaacatccattaggctgggtgttaacaatagatgtatattatttgtatttttctccattgtaaaaaagcaaagcgttttcattactttagcacagttaatttattattttcaagctggtgcctaaacttctgaaacacaaaattaatgggctcttggcaaccttctctaaattactccaagtcaatagtggttcttcccatctgtcatcttaatttgcagtatgcctcccagaagcactaaaacaaagatacacactccgtgattttccattcccgttggcactaagcaaaaatagccataaattaattctttacatgaagactcccaagctggaagccatgatttaaaataaacttgggtgtcactcagccctgccaaccaactctttcagactgtaaatgccacatatatttatagagatatttagtgaataatagataaaagctcaatgagttattttctaaattagcaaccataaatgtcaactccataggttctgtttcatctgctttctattgaagtaattaaacctggaagtgataagaatatgttaatatttaatattatacccattttgttcatattgtgagagaagactcattatttttatccagaattrtggaattcaattgagaataattcatggctcccatatagctttctatgatgagagggtaattgaaaagttgggtaagtaatttcagcatttttttgttgcttcatgctggaattgggcacaggttaccctgggagagatctcaaatcatagttgaatggtaaccaaggaaggagctaaaagaacaacaacagcagtgcaatgtacaacagatccaaagagtgaagcaagaccacaactagggaaaaataattgacagtgaagtcagaggctggagaaaaagaaaaggtagtaaagtagtttaagaattggtcagaactggtggttctatggtcaactattttgggtagtgccagcactatcctgaagtgatagttgcacattgaagtgacaacgggagcgtgcagggattgtaaagcaaaaaaaaaaaaaaaaaaaaccttaaattgtcctactctttgcccttaattgctgtagtttctttggtatttattccattttttttggcacaggaga

SEQ ID NO: 722373 - DNA, 1422 bp, Homo sapiens
tgaatacatgaacacaatttcaaaaatgtttattttttcaaattattgccttattttctttcctctttctttaagcaattaagaatttatgactaccctgtgatgagtgggttatatgaagtttttaaattatagggmatgccccataatgaatccaaatttgaaatagtcactcgataatttacacctagaaagtaacaatttacactgggtagaaatgaaaaaaaataccaattttgtttattttatccatactttcagagaaaataaagttttgaaaagatatggctagcaaatatgtgcaaacctaaaatgttacatgtattgagtttaataactttgatgaatgtccagctagcaaagaaacttaagcaaaatacttaagaaacagtcataagtgaaatccattacaaacccagcatttcacattgggccatcaatcataagcaagatgccaacctgtgaattacatgaatatttgggtgtgagagggcatcatcaataatacctagtgttaatagagaaccatcagacctatgctcagttgcccactggaaatagtcattgatctgctcttatggcatgaaaaagacttatgaattctggacactattttgaagcaggtctctacatgctgccttttcaagcacctacaagattaataaaacttcacctacttttagtttcgtacggtttagacctttccaaattggatactggggaaaggatatataagattaaagaggaatctaagttgatactaaagtgctgagaactaaacagtggaataggaatccaactagtgtgagccattattttggtccattttgcattggtataacaagatacccgaggctgtgtaatttataaatgagagaggtttatttggcttatgattctggaggctgggaagtcctataagcatgattctggcatccacttgacttctggtgagggccttatgctgcatcacaacatgacaaggaaacaaaagggaaagccagtgtgtacagagtgtcgtgcaagagaggctaggttcatttataacaacctgctctgttgaaaactaattcattccagagagagagaaaaaactcactcatttccatgaaagggcattaatcaatctgttcatggggcagtgcctcataattcaaatacctgtcactaggccccacctcccagtactgccatattgaaaatataatttcaacatgagttttgtcaggggcaaactagatccaaatcatagcaaccatatctcaagttgtaagtctgatccctaaaatgaaaaacacaaactgaatacagcaatatttattaacatttgaagactccaagatatttgaattctgaccaattcaaattttaagggatcttagcttaaggcatgggaaattccacataccataaagtgtttag

SEQ ID NO: 722374 - DNA, 584 bp, Homo sapiens
ggtcaggctggcctcgaactcctgaccttgtgatccrcccccctcagcctcccaaagtgctgggattacaggcgtgagtcactgtgccccccagcgaaagtaggtatatgctaatgccactgtgttcctaactgaaggatcttcctgtagagggaggagggatagatacataggtttcaggattcgctggctgtgatactaatgatatagtatcacagggaatgatagggaatgtgttcttgaagttttaccaattttcttactaccttttgccatagaaataatgaaaataaatggtatatccctacacttgttaaaaggcaaacaaaactcaaatagtggacatttgcaacaaagttttatccttttttttgttttaccattttatattctttgctatatgaaatttgggtaaaaactgacattacttggaaagacagttattatatttattacagtacagcaaaaacaattagaaactaatttaaaattagaaattttatctaaatatttaaaagaaggggaaatagttaatgttttttgtttttgttttgaggcagactcttgttctgtcacctaggctg

SEQ ID NO: 722375 - DNA, 2241 bp, Homo sapiens
  misc_feature 1567, 1568, 1569, 1570, 1571, 1572, 1573, 1574, 1575, 1576,1577, 1578, 1579, 1580, 1581, 1582, 1583, 1584, 1585, 1586,1587, 1588, 1589, 1590, 1591, 1592, 1593, 1594, 1595, 1596,1597, 1598, 1599, 1600, 1601, 1602, 1603, 1604, 1605: n = A,T,C or G
  misc_feature 1606, 1607, 1608, 1609, 1610, 1611, 1612, 1613, 1614, 1615,1616, 1617, 1618, 1619, 1620, 1621, 1622, 1623, 1624, 1625,1626, 1627, 1628, 1629, 1630, 1631, 1632, 1633, 1634, 1635,1636, 1637, 1638, 1639, 1640, 1641, 1642, 1643, 1644: n = A,T,C or G
  misc_feature 1645, 1646, 1647, 1648, 1649, 1650, 1651, 1652, 1653, 1654,1655, 1656, 1657, 1658, 1659, 1660, 1661, 1662, 1663, 1664,1665, 1666: n = A,T,C or G
tacagttaatgtatcaggctcctcccatcaaaaccaagcactttctattacttcacataagtaccattaacatacctgagaagtacactgaaccccaagctaggtagatgttaggaaattgtatggtatggcttataaacaataacatgcaagcataaaagcaagtctcaggaattgttatctattttgcaggacagactaaagagatcataagcttttgtttttaggaaaattcaaaacttttcacgttacgcattcaaccaggacatgttcttgtgtagctagcctttctaaatcattaccagcagccaaagacaaatgttattcctttaaatttacacacagaactttactctgaaggtttatactcagggaataacaagtccaagactactattctcatctgacattaattttccaattgctaaaaaacataatcttaactgtacagtttttaaagtttctgtccaaaaatgttatttttatctaacctgatttagataacactagggtataagaaaatttaaaacaaacttttgtcataaccaaaaaccaaagcacctaactatcagccagagacttctgggggattagtgggaggtttccatgaacctgaagttcccccgaagcttgggtttcaggtgaccctttcaacaccattttcataataatgctaagacattatttaacttttcactcttgttctttcatgtacacacagtgaccttgacaaagttacataatgctatgatggtatcgagctattaggtaatgaaatacatgcttgcatattttcatgttttaaaaatttcttagtcttcacttgtgtaaatattttaaagaaaactcacataaacaaaagctctttggagtcttcaataatttttaagagtgtaacagggtcttaagacmaaaattttgaaaactactgctctacatttttttgcaggtatgatatggtatgagtttaagcttaccctgacaaagtatcgcatgatcttgttctggaaatctccaggaggtagcaataaatatagtaagacctcacacaaatcccttaggaatcctaaaagtagaaaaagtagctatcataacattagaaaatataaagtctacacttcctcttgatatataagatacatttaaaaaggcagaaataaccagttccctggttacaatggcttattttagtaattagtacacatcagtattcattaaaaattccttcattattctccaagtagtaactattcattaatcaacttaattttttttaattttgctgttttaaccagttttttgaatcataaaaaaatttcgttacaagtcttttttcccaaaatagttttagatggaccaggtactctgtaattctaccacacgttaattagctttccatacttaaaagttattcacacatataaaaacatagctgtaattcttctttcaagaaaacacctccatcatctcagcaggctataacaaaggaaaaaaagagtatgctcttctattctgctgatttaagagagctcaacttacataaaagtattgcacatcagtatatctnnnnnnnnnnnnnnnnnnnnnnnnnnnnnnnnnnnnnnnnnnnnnnnnnnnnnnnnnnnnnnnnnnnnnnnnnnnnnnnnnnnnnnnnnnnnnnnnnnnncagaatgttattttgattaagccctgctttctaagtctgtttggtagttttttctttagggtccaaatcaggtgacttttcaaatctgttaccccacttattgctacttcccccctcccccttccctagaccctctgttttatgtgagtgctatgaaaatagattagtttcagtgtaactgctcttctccacatagttttgctgtaacccttctcctaattatgacacatatctattggaagtcctcttggacgagaagggaccaaaggaacataagtcagtggaaaatattcaagtttatatttttcagaaaagaagtatattttggtgagtttgttttaacaaactttttttgtcagatatactaaaattcttactttacaaaccagctatatactgcttcccatatgatgaaagtgttttgacttctattcttgtacttaaactgcttgattttttttgatgggaggctatttcacacctgtttaaattatgtttactttcatttttatttttgaaggctttttttcccctccatccttgatgtctaactttttgaaagccttttaatgggc

SEQ ID NO: 722376 - DNA, 898 bp, Homo sapiens
cctttagtaaaacactaaagcaaatctgtggtagaattgtcagatactttgtaacttttaaaatatttcctaaatcatttggtgtcattaccatttacttgttatagtccagagctttaaactaaaaggaattgctcctagagcttgaaggaagtgttaaaaataatgttcattatatagaaaagtttccaaatgtgatgaaacccttccttggtttgaaattttttagtattcacatttgtagtacttgtgtaaatgtttaaacactagtaaaaaattttttttctttattccatgtctggaataaatgcttttccaaataagataagtctcttttgtcacatggtaatataaaccagaatagtctctggatcaaaaaacrgtcatacttgaagtcagtgacttggagtatttttttattcccataaatctatttaattcatacttctaagtagttggaccatgtagacaaattttagtgaatatctgcattttaaaaatagcttaagattgtaaactagatcacgatagtttattccaatgtactaaacaaaggagatatttaatgtgtttggtattttactcattttgccattggtagcttggtaggtaaattacaagcatttcctttagtgccattttggttgtgtttgatgactatcattataaatttgaattttcagtttttgtcttagtgttaaaaaacactttcttacaaggagtttaagaatcataacttaaagagtactttgcaaattgtgcttatttcaatatagcattaatgtacttgttttgaaatcacaattgtcttttaatatattcctaaatcaaatgtagttttgtaaatattattttaccaattgtaactttatagtccacttgatatttacgtgcacta

SEQ ID NO: 722377 - DNA, 696 bp, Homo sapiens
atgggacaagatattttatacacattttttcactggatgtccaggactattatacaaactgagtattactcttatattaaaggtaaggaaatagcttctaactaagcaaagttgctcaaagtggcacatagagtgaggtctgyggctgttctcttactccaaatgtggggtatctcagaaattgccatcctccagaaggctacagtctagctcagactgtgcaaattgttctccatttgccatgcccccatgcactcaacactattccatgtcttccgtgtgctctgggaagctgacccttgtcatttgcatgactgggactctctgctctctgtgtttgtcttgggtggggcctatggaaggctttagcaggatattggagggcaggaagagaaagaagtcagggtatttcttcttcatgtcctacttcggccctgtgcgctggccgtgatcatgtcctttcaggatataactcccttcgccctgttctcctctgtacctcttctgatgcagggcttctaaggaaacactgctccttttccttgactgtttatccctaggggtagtattatattctcaccattgctatcctttgggtgccctgccaccttgtttgctccttaagtctgtctacaattaatgcaaataactcctttattaaaatctctttatttgaacactctgggatgaattctg

SEQ ID NO: 722378 - DNA, 2322 bp, Homo sapiens
gatggttttacaaaggggagtttccctgcacaagctctctcatcttgtctgctgccatgtgagactgcctttcaccttccaccatgattgtgaggcctacccagccatgtggaactgtgcatctattaaacctctttcttctagaaattacccagtcgggcatgtctttaccagcggtgtgaaaatggacaaatacagtagcacacctcatagggctgaacaaaacggagaagatgagtggggagcaagagagagaaaaggggtctgtgggactccagcctttattgggcccagaacagtacccaaataagttttccacggggctctagtcggtggggtgagtgccagcaggcacatttcttggcttccgctgcaactgagcaggtcactctggcgtgtgggggctgtccaagtgggctgtgaggtctgtggggtgagtcatgcagattgtatccaacggttccatggcgggtagtcaccagggggaggcaactgtgtagggtcagtatctgggccagccacactgaggaactgtgagggttagaactggaaattgtcaagggaatctgaacccagctaccatatgagagagttcaacttacattcaatgtgaatgccatggcaatattaaaaggtaagaattcactccatacgtgcttgaggtaaataggagaaacctagaatttatgtaaacagtgagaagattagatgcgttttctgtcacatattttaatactggcagcatattatatatgtcaatccatcaggcattcagaattacatgcttatgaaaattttttgcaccatcagacaaacgacaagggtagaagacatttttaaccctataaacgctagtaaattaaaaatttatgtcctaatatttctatgttgtgaaaggctgccctgtgaaatacaggatttcttaaacatattttaaaaatcataggtgtcaatattttttagaaatccatttaaattttctcttgctattttacagtgcctatttatttagtggttctgctgattttgatgtatatcctaaactttacattttctttaaagtatgttttatacaactttatgtaaaatgtttcagtatcttcacattctctccctgtccttttgttttgctcttatatggtggccttgagtcttttctctggcttttcaaacctagtaagactaagacactaaagtaactttgcccgtggtttggtaatgccttctaaagcacatcctaagctctggtgcatacaggggtctcctttgagctctgtgcttttgagatcccatatacctaaattccagtactccaaatcagtactgctcagttttagttactaagtttaaaaatgtattttaatagcaagttagtttagtgcactcttgcttctttctttactgctggtatacatgtatattcctttaaatgaatcttggaatttatttaaaaattttaaattatactaatggaactrtatattgttgtgaattcataggtgaatttggaaagaatttgtctttatgatactaaatcctttttatccaagaatcatatgtgcctttatatttattccagtctatatttatatcactgagtaaatatatagaaatgtagatacatacagctgtagttatagatagatacaaatatagatataacatgttaaatctatatctatcccatataacatgtatacatgttatatgtgtgtgtatatatatttgtttgtgttattaaagagctcccttaaaatttttcttttatttcctatataattttaggttgagcttgaattttccttgtataaacaaacaaatatttatactagttttaatactgagatttagacattctatcttattttagcattgaatattttcacaattattataaatatctaatattaataacggaactgttaaaaatgtttaaaattgtacctttgaattattttattgttgaatttaaattcctttaagtatgatagtaaatttctattttatgctttctctatgcatatgcaaattaatctatccacttctctatctctatgtagtaacatatgaaaatcaggcctctcttcttctaatggacatacacatgtttgcatatagaatatcagactctttatagcatttaaaatctttaaagacatgaatattaccttttgacaaatatatttttgcatgtactgagaataccctatttattttttatttgggctaagcaatacgattattaatattattggattaccaaatttagaatcacactttcatccccaaggtggatatttgtgggtttttttgccaatttct

SEQ ID NO: 722379 - DNA, 620 bp, Homo sapiens
ttaatttgtccaatgttacatcattgtaaatcccagtttctttaacgcggatatgaaaaaacaccatatatttcacaggggagttatgaggatgtgagaactatgatcaagcacttaacttcacatgttcaaagtgctcaatgacagttggcaactatcaatcaactcttcacacattatatctctaatcaaggaaagcaggcatttgcaccaataatgacagaacaaaacaacatgggggagagtagtagtataaacaactttgagagttcataggtgggctgccatactttcagctagagtgataagtaaagactttggagacaggtaaatattaagaataaatcttgaagaacgagtcatacctcaataggaagagatatgattggtggacagcattttaggtagacagagaatagaatgagctaaagtgtagagatgagaaatttgagtactccagttgtctagactagcactgtctgatagaacttttgtccatgaaggcaatgttgtatgaacgttctgtccaatatggtagccactagtggctgttgaacacttgacatgtggatagtgtgactgaggagttgaaktttttattctatttaattttaattagt

SEQ ID NO: 722380 - DNA, 615 bp, Homo sapiens
aaaataaacattatttgtttgaggggaatcattgcatttgatccattacttccttatcaaagatactcatatgcttgattttctccatttacgaggagtttgctgcagttggaaacagaggactgaaagggactaatagagtcttgatggctttggctcttttgtttgtgtttaagagcatcacaggaaaagaaaattagggagattttagtattaaaaagagctgtaacttttcaaaagctattcaggcatgatttagagttgatccagaatataaataaagtgatatccaatgacagcagtcaaataatatggtctataggtatatatagtgtttgctctcagtagtttattaagaatcatttttaatatcaactttatgcataatttatttacaattatttcatccaattaaagtaaataaattgatacaccaccaatattagacaaaactgtgttactcccaaaaagtttcattatgcccataggcagtctatcccccsctttttttctagacccaggaaactaccaatttttttttttggtcagtatgattagtttccaattttaagacattctgtataaattgagtcttacaaaataatttcacagtgt

SEQ ID NO: 722381 - DNA, 954 bp, Homo sapiens
tgcctcagacatctacgcagcgaaatcgagcctggccttgagggtccacaccgcgagggaagatgcgtgcgcccattgtaagtgcggggcgaggcggggctgggcggggctgggagccccctgttagtggggactcgttgtctcggagcctgaattactgcttccgagagaggagcctcgaggatgtggggcccgcacstctgtcagctgcgaggcatcggtgtcagctgcgggtcggcgcgcacctgttgggagttgtctcggcgcgtccttccgggggccggtgtgggggcgccctgcctgaaacgcgcccagcggaaggcgggaccctcaggagggaggtggccagggcaggtctgtccgcagaaatctggcgctgcctccggagccacacccggacagcgggacaggccttgggggctatgtcagctgactcatcccatgaccagccctgccagcggagtcccagcgttaactgtgcttggcgactgccccccttccgcctggccggaccgcagcagagggattcagaggatgggatttggaggtggaccctcctagtgttgagcatctggttgtgagactctcatcaagttcaaatccactgtttcccagagtgaaggttttgttttatttatttatttttatttttatttttattttttgagacggagtctcgctctgtcacccaggctggagtgcagtggcatgatctcggctcactgcgacctccgcctctcgggttcaagcgattctcctgcctcagcctaccgagtagctgggagtacaggcgcccgccactacgcctggctaattttttgtatttttagtggagacggggtttcaccgtgttagccaggatggtctcgacttcctgacctcgtgctccgcccgcctcggtctcgcaaagtgctgggattacaggcgtgagccaccgagccctgccgcagagtg

SEQ ID NO: 722382 - DNA, 954 bp, Homo sapiens
tgcctcagacatctacgcagcgaaatcgagcctggccttgagggtccacaccgcgagggaagatgcgtgcgcccattgtaagtgcggggcgaggcggggctgggcggggctgggagccccctgttagtggggactcgttgtctcggagcctgaattactgcttccgagagaggagcctcgaggatgtggggcccgcacctctgtcagctgcgaggcatcggtgtcagctgcgggtcggcgcgcacctgttgggagttgtctcggcgcgtccttccgggggccggtgtgggggcgccctgyctgaaacgcgcccagcggaaggcgggaccctcaggagggaggtggccagggcaggtctgtccgcagaaatctggcgctgcctccggagccacacccggacagcgggacaggccttgggggctatgtcagctgactcatcccatgaccagccctgccagcggagtcccagcgttaactgtgcttggcgactgccccccttccgcctggccggaccgcagcagagggattcagaggatgggatttggaggtggaccctcctagtgttgagcatctggttgtgagactctcatcaagttcaaatccactgtttcccagagtgaaggttttgttttatttatttatttttatttttatttttattttttgagacggagtctcgctctgtcacccaggctggagtgcagtggcatgatctcggctcactgcgacctccgcctctcgggttcaagcgattctcctgcctcagcctaccgagtagctgggagtacaggcgcccgccactacgcctggctaattttttgtatttttagtggagacggggtttcaccgtgttagccaggatggtctcgacttcctgacctcgtgctccgcccgcctcggtctcgcaaagtgctgggattacaggcgtgagccaccgagccctgccgcagagtg

SEQ ID NO: 722383 - DNA, 954 bp, Homo sapiens
tgcctcagacatctacgcagcgaaatcgagcctggccttgagggtccacaccgcgagggaagatgcgtgcgcccattgtaagtgcggggcgaggcggggctgggcggggctgggagccccctgttagtggggactcgttgtctcggagcctgaattactgcttccgagagaggagcctcgaggatgtggggcccgcacctctgtcagctgcgaggcatcggtgtcagctgcgggtcggcgcgcacctgttgggagttgtctcggcgcgtccttccgggggccggtgtgggggcgccctgcctgaaacgcgcccagcggaaggcgggaccctcaggagggaggtggccagggcaggtctgtccgcagaaatctggcgctgcctccggagccacacccggacagcgggacaggccttgggggctatgtcagctgactcatcccatgaccagccctgccagcggagtcccagcgttaactgtgcttggcgactgccccccttccgcctggccggaccgcagcagagggattcagaggatgggatttggaggtggaccctcctagtgttgagcatctggytgtgagactctcatcaagttcaaatccactgtttcccagagtgaaggttttgttttatttatttatttttatttttatttttattttttgagacggagtctcgctctgtcacccaggctggagtgcagtggcatgatctcggctcactgcgacctccgcctctcgggttcaagcgattctcctgcctcagcctaccgagtagctgggagtacaggcgcccgccactacgcctggctaattttttgtatttttagtggagacggggtttcaccgtgttagccaggatggtctcgacttcctgacctcgtgctccgcccgcctcggtctcgcaaagtgctgggattacaggcgtgagccaccgagccctgccgcagagtg

SEQ ID NO: 722384 - DNA, 954 bp, Homo sapiens
tgcctcagacatctacgcagcgaaatcgagcctggccttgagggtccacaccgcgagggaagatgcgtgcgcccattgtaagtgcggggcgaggcggggctgggcggggctgggagccccctgttagtggggactcgttgtctcggagcctgaattactgcttccgagagaggagcctcgaggatgtggggcccgcacctctgtcagctgcgaggcatcggtgtcagctgcgggtcggcgcgcacctgttgggagttgtctcggcgcgtccttccgggggccggtgtgggggcgccctgcctgaaacgcgcccagcggaaggcgggaccctcaggagggaggtggccagggcaggtctgtccgcagaaatctggcgctgcctccggagccacacccggacagcgggacaggccttgggggctatgtcagctgactcatcccatgaccagccctgccagcggagtcccagcgttaactgtgcttggcgactgccccccttccgcctggccggaccgcagcagagggattcagaggatgggatttggaggtggaccctcctagtgttgagcatctggttgtgagactctcatcaagttcaaatccactgtttcccagagtgaaggttttgttttatttatttatttttatttttatttttattttttgagacggagtctcgctctgtcacccaggctggagtgcagtggcatgatctcggctcactgcgacctccgcctctcgggttcaagcgattctcctgcctcagcctaccgagtagctgggagtacaggcgcccgccactacgcctggctaattttttgtatttttagtggagacggggtttcaccgtgttagccaggatggtctcgacttcctgacctcgtgctccgcccgcctcggtctcgmaaagtgctgggattacaggcgtgagccaccgagccctgccgcagagtg

SEQ ID NO: 722385 - DNA, 1264 bp, Homo sapiens
  misc_feature 881, 882, 883, 884, 885, 886, 887, 888, 889, 890, 891, 892,893, 894, 895, 896, 897, 898, 899, 900, 901, 902, 903, 904,905, 906, 907, 908, 909, 910, 911, 912, 913, 914, 915, 916,917, 918, 919, 920, 921, 922, 923, 924, 925, 926, 927: n = A,T,C or G
  misc_feature 928, 929, 930, 931, 932, 933, 934, 935, 936, 937, 938, 939,940, 941, 942, 943, 944, 945, 946, 947, 948, 949, 950, 951,952, 953, 954, 955, 956, 957, 958, 959, 960, 961, 962, 963,964, 965, 966, 967, 968, 969, 970, 971, 972, 973, 974: n = A,T,C or G
  misc_feature 975, 976, 977, 978, 979, 980: n = A,T,C or G
tttgttgcacaggctagagtgcagtggcgcgatcttggctcactgcaacccccacctcccgggctcaagtgattctcctgcctcagcctcccgagtagctgggactacaggcgcatgcctccacgcccggctaattttttgcatttttagtagagacggggtttcatcgtgttagccagcatggtctcgatctcttgacctcgtgatctgcccgcctcggcctcccaaagtgctgagattacaggcgtgagccaccgcgcccggcccttggtggtatatttttaactccttcagtttttaaactataagcccattcttgagtgaaggcgaaagtaaacccatcatggccctgcagtgtgatgtgtgtgcagaggtcgagtgtgtgcgactcctggatgctgggcgcgcagggcatgggtgaggcgggaagaggcggtgccgggggcgckggcgtcctgcagtcgccgggctcgggaccggggccgggcgctctgcgaggctctcattagccggcggcgcggggaggggccgggtgacctcacgccggcccgccaccgcggccattagacccggtccaattgctggggctgcagcgctgcctccgagaccgcgaagtgggtggatcgggtcttcctggaaggtgcgataaggccgggcgaggtgcctgggatgcttctccccttccgcgaggaagagatctaattgggtagggcgggtgtagactagcctgccgagccgcccgctggcacctgcagcctcctgggcgcccgcgggccccggcgagaaagttgttaaagggagcgaggtggttgttcctggggtacgaggcgcgcctctcacgccctgcccaacagaagccgcagtccgtggggtctggagannnnnnnnnnnnnnnnnnnnnnnnnnnnnnnnnnnnnnnnnnnnnnnnnnnnnnnnnnnnnnnnnnnnnnnnnnnnnnnnnnnnnnnnnnnnnnnnnnnnttacatcattttttaaaagaacctagcaaaaaattaaaaactgttttattaaagttttaatttttaaaaaattaaaaaattaaaactgttttattgcttttgcatggacttgattcaatctacttaattttgctataactcatacatacatacatacttatccaaactcaccctatccaaggcaccattttacaagccaagtagaacactgtgtgtgactccactaatgaaaccaaccaccagtacaaggcagtatttttgtgtgtttgaccaaagcgctttac

SEQ ID NO: 722386 - DNA, 1264 bp, Homo sapiens
  misc_feature 881, 882, 883, 884, 885, 886, 887, 888, 889, 890, 891, 892,893, 894, 895, 896, 897, 898, 899, 900, 901, 902, 903, 904,905, 906, 907, 908, 909, 910, 911, 912, 913, 914, 915, 916,917, 918, 919, 920, 921, 922, 923, 924, 925, 926, 927: n = A,T,C or G
  misc_feature 928, 929, 930, 931, 932, 933, 934, 935, 936, 937, 938, 939,940, 941, 942, 943, 944, 945, 946, 947, 948, 949, 950, 951,952, 953, 954, 955, 956, 957, 958, 959, 960, 961, 962, 963,964, 965, 966, 967, 968, 969, 970, 971, 972, 973, 974: n = A,T,C or G
  misc_feature 975, 976, 977, 978, 979, 980: n = A,T,C or G
tttgttgcacaggctagagtgcagtggcgcgatcttggctcactgcaacccccacctcccgggctcaagtgattctcctgcctcagcctcccgagtagctgggactacaggcgcatgcctccacgcccggctaattttttgcatttttagtagagacggggtttcatcgtgttagccagcatggtctcgatctcttgacctcgtgatctgcccgcctcggcctcccaaagtgctgagattacaggcgtgagccaccgcgcccggcccttggtggtatatttttaactccttcagtttttaaactataagcccattcttgagtgaaggcgaaagtaaacccatcatggccctgcagtgtgatgtgtgtgcagaggtcgagtgtgtgcgactcctggatgctgggcgcgcagggcatgggtgaggcgggaagaggcggtgccgggggcgcgggcgtcctgcagtcgccgggctcgggaccggggccgggcgctctgcgaggctctcattagccggcggcgcggggaggggccgggtgacctcacgccggcccgccaccgcggccattagacccggtccaattgctggggctgcagcgctgcctccgagaccgcgaagtgggtggakcgggtcttcctggaaggtgcgataaggccgggcgaggtgcctgggatgcttctccccttccgcgaggaagagatctaattgggtagggcgggtgtagactagcctgccgagccgcccgctggcacctgcagcctcctgggcgcccgcgggccccggcgagaaagttgttaaagggagcgaggtggttgttcctggggtacgaggcgcgcctctcacgccctgcccaacagaagccgcagtccgtggggtctggagannnnnnnnnnnnnnnnnnnnnnnnnnnnnnnnnnnnnnnnnnnnnnnnnnnnnnnnnnnnnnnnnnnnnnnnnnnnnnnnnnnnnnnnnnnnnnnnnnnnttacatcattttttaaaagaacctagcaaaaaattaaaaactgttttattaaagttttaatttttaaaaaattaaaaaattaaaactgttttattgcttttgcatggacttgattcaatctacttaattttgctataactcatacatacatacatacttatccaaactcaccctatccaaggcaccattttacaagccaagtagaacactgtgtgtgactccactaatgaaaccaaccaccagtacaaggcagtatttttgtgtgtttgaccaaagcgctttac

SEQ ID NO: 722387 - DNA, 954 bp, Homo sapiens
cacgcctcttgctagtcagtccctctcctcaacccctgtgacaatcacagatcacttttccgtgctgtagttatgcctgctctggaatgacatatagatggaatcatacagtatgtggctttttgggtatgactttttcactcttcctttttagataacggaatactttttctgtctgaaccattataatattttaaattattttttgtcatcgtaataacttctgttttaaaaaatgcagcatggggctgggcgcgatggcacgtgcctgtaatcccagcactttgggaggccgaagtgggaggttcccttgagcccaggagtttgacaccagctgggcaacaaggcaaaaccctgtgtttactaaaaatatgtaaaaattagccaggcatggtggtgtgcacctgtgctcccaactatttgggaggctgaggtgggaagatgacctgagcctggggaggttgaggctgcagtgagccacgatcatgccactacactccagcctgggcaacagagtgagatcctgtcttaaaaagaaaaaataaaggcagcatgttctaygtgagggctcctctcattggctgtttatgtggagcaggtgagctctttggctctgcacactgccagctgcttattactcaacatggtcttactgatgtccacccatctctttccaacctgcagcctccctcagggatcggtaccacccagtctttatgtccttgtctctttgaggcgatccctgtttaaattcctttgggaaattcttaatccccaaactcgacccaaacaatgaatactctggtgtgtttcctggaaaacaatgggattcataaattgtgaccattgtccattgttctgaaataggttctcagtaagaactgagtgccctctattgtggaaaagaaattatatttactgcaacaaaagaacatgatttatctgtaaaattcc

SEQ ID NO: 722388 - DNA, 908 bp, Homo sapiens
cgagactgtctcaaaaaacaaaacaaaacaaagttaaaggaagttttttaatgaacgtctgtatacctgccacacagattgtgcaattatgtgactgtatttgcttcatcacaaacatgtccatctattcattccctctgtccagtgtcttttttgttctttgtttttgtttttgtttttgtttttgagacggagtgcccaccactgtcgcccaggctggagtgcagtggcgcgatctcggctccctgcaagctccgcctcccggcgttcacgccattctcctgcctcagcctcccgagtagctgggactacaggcgcccgcaccatgccgggctaattttttgtatttttagtagagacagcgtttcaccatgttagccaggatggtctcgatctcctgacctcgtgatccacccgcctcagactcccaaggtgctaagattacagacatgagccaccgcgcctggccctttgtttgtttgtttgtttaatttaagaactaacgcactgagggagtcccaagcgatgtcagggcaatgacaacacagccgacccgcgctctgtgctcaagttcacggggttcctgactccaagcctgcagtcttgatccgcagctgtggttctcagacctgagcctgcaccaattacagaagagggggttgctgacatgcaggatcactatagctttttggcaattcccctcttccgccatcaagagcgcggtgtaagcggccaacgacacccctggagaaccccttcaccttgggaggatgcccacctctgctttggagggyctagaaacccatacactggctgagctgtgcgcccggcaccaatctaggcacctgggctctgtgatcagggcgtggagctttttgttcagtaacaggagacaaaaggtttttaaa

SEQ ID NO: 722389 - DNA, 470 bp, Homo sapiens
tagaggcatgatccactgtaccctgctgagaagcaaattctttattatctgtatgtctcacggagaccaggctattaccgtctccttttgtggttttttgtgttttttttttttttggtgcttgtgtaataaaatgtgtttgttatgtaactatgtactgaggttagacaatggggttggatccttrggaagatacagtgtgtacaggatttattattatttacaaattctgttttactaagcatagaattacaaacattagttaggattgatccagcatctcagaatcatttcctgtcttcctggccttactctaaaagatgtgaagtggtaaatggatcgatggcattctaaggttgatgtcttttattatgtagccgctgaatattattgattatcaactgtgtttttcaaactttgatcttgatgaaccaccctttgtgattttgttcatatgagaacatgtatta

SEQ ID NO: 722390 - DNA, 1372 bp, Homo sapiens
ttccattttactgaagggtcaacgagattcagagaggttatgtgacttgtgccaggccacacagccagcagagtagccctcagacttcacaacaggcccctgaactcattctgcatctgcatctcttttctgttggggtttttctagtggtattttgaatggtaaatataattaaatttcaactaacatgccctttcttcttactgtagaaataataaaagttcttgaataaagggaagataaaaggggagtggagaataataataactgtaacaaaaatagcactggatgaacactttaaacaggtaagttgtatggtatgtgaattatatttcaacaacgccgttacaaattttaaaaagtaaaatagcagcagatgaggaatgagtaayatggcatttcaaatggtacaattttgagaaagttcaattttgttgcttcatcttttggccagtaaaacaggggtgctattacctgcatttcctttgccagagaattaagataaactgagccgtaagtggtaaagtgtgctatgatgcacatacagctccactacattatggcaatgctaaaaataacctgagaatgaaggagctttatttcttcatttccaatgacccatgagcctcctaaaatgcacagggaaagatgtctacccccaccacaagcacctgttcatgaggtcacctctgttcaaaataccgaagtcaatgaaatgtcagtggcaggaagttctggaatatacagattacacgagcccatttccctgcagcacagttacatcatcatcaagagaatgcattccccaaatccacggcttcctaatccattagcacaacaggctggtggagagcttggctttctcagtcacatgggccatagaatcaaaataaacacaaatgtggccagagtaacataagtcgaaagaatcccaagtaagccccagtctactcatgttcaaaggcacacacgctccaccagactccaaaacagacctcttctgaatttccttcccattttatgaagaaagtgtaaaatgaattgttacctgttttctcttttagtaggaacaccatttctgctttccaaattcctgatttactgtttcacagccataaaacatcaatgccaaggggctttataccagcaaaaacaaacatgatttttccactgtttttaaaagacagagttcgtttttgccccaattcctacatagtggtaagcttaaaatcaagccatttagctcacagtcaggtccaataaatcagtggaaaaaataaatgggagagcatgccaaaatgtaaccatggtaacaccacagatgcatcaagaaatggtgtgctcatttgcttcatccccatttcttaaattg

SEQ ID NO: 722391 - DNA, 531 bp, Homo sapiens
ctgccggtcatgaagccaacccaaacatacccattttcctgaccaaggctgtccttgaggccaccacccaagtgaaggtgtcgcatccaaggctgtgacaacactgatggggggggggggcagagctctcggggtagggaacaaggaggagttgtgacctaccagaagtaccacagcctctgtatggagagggcccgcacacagcacctggagccacagcagtcctcgtaggagcggcatctgtggagagaggcacaggctggtcagcactgaattggaagcagccaccggaccagccatgcggcccaggctgggcttcaatgtaatcattcttgawggaagaaatcagtaagagcaaaaaggacagaactgcctccactgcatttcacagaaccagcagagcagaatgacatcagcctgtggcccaaagcaaggtgctgaggtgggcacagtcagggtgatgcaaagccctgcatttaacaagcatcctgtgtgccaaatccaatggattccttccgggaggtggcacaa

SEQ ID NO: 722392 - DNA, 2174 bp, Homo sapiens
ctttgtactttttgacaaatacctaatttcccctcctcccaaccccacgcaacgccattccaccctctgttgaagggttttcttgtctgtctgtacttgcaatgccccacagagtacttactaaaccgcatattgattagaacgtctttggccctcagtgataggaaacccaattcaagtagtgcagacttggaggaagttcattatctggcatggttaggagtcctcctgttggaggccccgggcctgagttgttcagaggctctacacaccctctcatttgctccaccttccattctgccattctctgcggacggtcctgcccttgtggttgtgtgtaggttgcagcagctccttacaaaatgcaaatcagtcagcatccagcatgtctttcttatgtatgtgttttgttctgttgtggctgggcagagttacttggccccttccttttcccatccccacaatattccagtattttctaatggggcactcattttgggtggggttggtgttagatgggtcctgaagaatcggaattttcagattggaagtcaagccaacgattgaaatataaacagacataagagccttcttgctagcatatggggtttttttaagtcctttttttttttttgaaacatcttatgtttgagtatttttttaaaactttccaaccttattttatttctccagatgatggtggcaatgtgataaccagcacttagcaggtgcttgttgtgtggcagcattgttttaagtaagcacatggtgtttcatctgtgcagccttcccacccctgccccaggctccgtgctgccctcctgtccattttgcagatgagtggactgtggctcaggagactggggctttctcaagattttctgcagtcggacctagcattcaaacctcagcagattgacttgccaacctaaaataatgaaaggggtcagaatatgatttaaagagcatttaaataagtacaaagtgtgaggtaggccacccagaaacaccaactccgaagaaatggagtcagttttccgaagtaggaagtgaaggcttcatttatgtgggctgagacagtggagtttttagcaggattacaacattattcatacaaggttggtgtgtatgttatagcaatttgattggctctaggtgatgtttctttttggggaggggatatttaacattttcttaacagagggtgtaatagtcctgggttttctttcacctggtctaagcgaagcagggcaatgaagggggagttaatctacaacaagggtcattaattcagagggcgggaggcttttgaccctgacatggtttccctttagtcaatgtacagagcaagaaaaagaagaaaatgagttatctataatctgagaaacrtaaattgtaaccatatgtgactcagatcacagtcacatttctctcaaagcttgaagtgttttgggggggggttccaacagcttttaggtttatttgttttcacagacttcagagtatgttcttaaagccccaatgtgtgaagtttatataatcatagcatttttctctttgaggttccatcatggcctgtcgtggagggagttcctgttgctggttcacgttatgcattttggttattaagagactgagaaactccatcatgttatcctaagtaatgtgtctttattataaatagaatgtggaaatttggaagatgagaattttggctcatggaatccagaagtggatgaacaggtttgcgaactggaggatggcttagaaaggaactggcaaggctcactgtggccttgagacctggtggaatgagtcagggtcattgtcctgctgggctgaacccctgtctctcccacctcctcctgccttgctaggtagcctgcactcacccagtcctttgtggcaggctgggctcagaaggtctcagaggaagctcagcaggtggctgggagagagcagaggctgcccttagggacactaggtgagtgcagcagctttctgtttcatacattgagtgcttggggcccctcataggtaagcagcagaggggcttccagcacatacccatgttctcattatcatatacaggttattagagaggcgaaatctacggggaaacatcttagaacacatggaaaagaaaacaagtgagttttgctgatggctattgg

SEQ ID NO: 722393 - DNA, 604 bp, Homo sapiens
cttagccaggacaaggaacctcacaggaaggaactcaagagaattaatgggcagggtgaggtgctcatgcctgtaatcccagcactttgggaggctgaggcgggcagatcatctgaggtcaagagttcgagactggtctgaccaacatggtgaaacgccatctctactaaaaatacaaaattagctgagcgtggtggtgcatgcctgtaatcccagctacttaggaggctgagacaggagaatcatttgaacctgggaggcagaggttgcagtaagctgaaatcgcaccattgcactccagcctgggcaacaagagcgaaactctttctcaaaaaaaaaaaaaaaaaaaaaaaaaagccgggcgcggtggctcactcctgtaatcccaacacttygggagtctgaggtgggcggatcacctgaagtcagaagtcaggagtttgagaccagcctgcccaacatggcgaaaccccatctctactaaaaataaaaaaaattagctgggcgtggtggcgggtgcctgtaatcccagctactcgggaggctgaggcagaagaatcacttgaacctgggaggcggaggttgcagtgagccaagatcgcgc

SEQ ID NO: 722394 - DNA, 604 bp, Homo sapiens
cttagccaggacaaggaacctcacaggaaggaactcaagagaattaatgggcagggtgaggtgctcatgcctgtaatcccagcactttgggaggctgaggcgggcagatcatctgaggtcaagagttcgagactggtctgaccaacatggtgaaacgccatctctactaaaaatacaaaattagctgagcgtggtggtgcatgcctgtaatcccagctacttaggaggctgagacaggagaatcatttgaacctgggaggcagaggttgcagtaagctgaaatcgcaccattgcactccagcctgggcaacaagagcgaaactctttctcaaaaaaaaaaaaaaaaaaaaaaaaaagccgggcgcggtggctcactcctgtaatcccaacactttgggagtctgaggtgggcggatcacctgaagtcagragtcaggagtttgagaccagcctgcccaacatggcgaaaccccatctctactaaaaataaaaaaaattagctgggcgtggtggcgggtgcctgtaatcccagctactcgggaggctgaggcagaagaatcacttgaacctgggaggcggaggttgcagtgagccaagatcgcgc

SEQ ID NO: 722395 - DNA, 650 bp, Homo sapiens
tccccaggtcacgaagtcataaacacataaatctataatgatattacgcagcattcaagtgggacaagtaagcaaaagaaataatttttacttcttttaatggcagagcaaaagctttgaggctgaaattctcagcctaaattatcagagctgtcttgacagataaggggcagaaacccttccccctacactgccctgtccttgcctgtctgcccagtgtggcactgcagacatgggcatggacctccctaagcagattatttagaggaaagtggcctgtccaaggtcatggaggaatcagtcaggtctaactggctctgccacaatgttgccaggggggtttgttcagtcagagctcagctcctaaattgcagtgatagtggatrtagcactttgcaagtctagagtcaattcttaaaaagtgaaacaaccatgagtaataaccaatattgaaataaggttatagtcattccaaaagattctccaagtaagagttactatgacaaggcagaatatatgcatgagatttatccaaaaggctgaaggcagagagatttggcagaattcattttgtctgacctgcgacttttgctcaggacctcaccaactctgatgcagactttggaaagagaagtggggcttgcaggttc

SEQ ID NO: 722396 - DNA, 1113 bp, Homo sapiens
tttaacattacataatttttattgtacaaattttatattttgacctcctatacaaaacctacactatataaatttaacatttaatgttacatatttaatattattgaaaaagaagtcagtaaaaaattaaaagaaacatgcatttttcagtaagtatttagaatcatgcagagccagaaaaaaacacatttctaggcataggcagataagaactttccacagcacctcttttttgttaacagtagcaggcgtgtctggcttgcctgggtccagagtttctatctcaaattgcatgaatgagagaaccacaataaaacccgagaatgrtttaggaacttaggctcagcttttgcttcacgtttcttctgataaaagtgtttctaaaagtataatctttaatgccaagaagtcaattaacttaaaaaattgccaactctgccaataaccagtaatatgaaagcaacccttttgcattgggggtgaataaattatatgaacaaacacactctgctaaatccagctctgagagaaagttgtttctctgtggtaaggctctttgtaatgagaaattgacacagcaaaaggcatctgagtaatcatgtgaagttttccatgtggctttcagtttagaagacaattttgttttatccaaaagcacaaaaatctagagagacctatctgaccccagtgtttcagggaacaatgatggcctctccctacataaacccttcttctgatgagatgagaattatacaaaattagacaggtaaaatacaaatgatgatcaagatatgcacattgttgccaaattctcatacaggtataagtttgtaatacagtcatgaagcacttagcttcgggcacacattttgagaaattcattaggtgattgtgttgttgtatgaccatcataaagtgtacatacacaaatctagatggtatagcctactatacacctccacgacatggtataaccccattctaagctacaaaccttagcatgtggctttaccggatactgcaggcagttgtaacacaatggtaagtatttgtgtatctaaacatagagaagttacagcaaaaatatggtgttattacttgatgggattatcg

SEQ ID NO: 722397 - DNA, 1113 bp, Homo sapiens
tttaacattacataatttttattgtacaaattttatattttgacctcctatacaaaacctacactatataaatttaacatttaatgttacatatttaatattattgaaaaagaagtcagtaaaaaattaaaagaaacatgcatttttcagtaagtatttagaatcatgcagagccagaaaaaaacacatttctaggcataggcagataagaactttccacagcacctcttttttgttaacagtagcaggcgtgtctggcttgcctgggtccagagtttctatctcaaattgcatgaatgagagaaccacaataaaacccgagaatggtttaggaacttaggctcagcttttgcttcacgtttcttctgataaaagtgtttctaaaagtataatctttaatgccaagaagtcaattaacttaaaaaattgccaactctgccaataaccagtaatatgaaagcaacccttttgcattgggggtgaataaattatatgaacaaacacactctgctaaatccagctctgagagaaagttgtttctctgtggtaaggctctttgtaatgagaaattgacacagcaaaaggcatctgagtaatcatgtgaagttttccatgtggctttcagtttagaagacaattttgttttatccaaaagcacaaaaatctagagagacctatctgaccccagtgtttcagggaacaatgatggcctctccmtacataaacccttcttctgatgagatgagaattatacaaaattagacaggtaaaatacaaatgatgatcaagatatgcacattgttgccaaattctcatacaggtataagtttgtaatacagtcatgaagcacttagcttcgggcacacattttgagaaattcattaggtgattgtgttgttgtatgaccatcataaagtgtacatacacaaatctagatggtatagcctactatacacctccacgacatggtataaccccattctaagctacaaaccttagcatgtggctttaccggatactgcaggcagttgtaacacaatggtaagtatttgtgtatctaaacatagagaagttacagcaaaaatatggtgttattacttgatgggattatcg

SEQ ID NO: 722398 - DNA, 1053 bp, Homo sapiens
gccagaaattgcattcatcttcacatctctgtctctaactttttacttttctgctttcttcttttccttacaagagaccctgtgattacatcaggttcacccacaaaatccaggatattctctctatccccaaatctttaattaagtcacatcttcagtattttttgccatgtaagataacacattcacaggttttagagaataggatatggacatcctggggaagcctcattgttctgcttatttccataacttttcactgtattttatatcacttttgctgtattctttatctctcatcttttttatcacttctaaactacaagtcagatattctctatcagcctgcattctagtcccctaatttaaattctgctaaattcctaataacagatattgcattttcatctrtataatttttatttgattctctaatacattcatttttattgaaattctttatctattaagctatctcttccctttttttgaaaatataaattatactccttctaaagtcctggttggctaattccaaaatgagggtcatttatgtgtctggttctattgtctgatttttctcttgttcagttatatagtcatgtttcttatatacctagtatttatttttactaaatactggaactgttatatttaaaaactgaagagcatccagataaataatatttcttttcaggtagaatacatccatttctcctctaggcagatgtattaaagtggtatgtcatctaacattctcagtgacactatggtaggtaatattattactagccattcatagatgaaggcattgaggtttcgatttgcagtgattgacgcactcctgccccagcctgtagagatattctctttgattaagtttacttccatcttattcaatttacaaagcatttatgttccatttctcttgcaatgtatagggagatttataagtactcaggaatgctaaaaaaaaaaaacagttgtacatgagttatgataaggaatattcatgtttgagtccagctcatcatctgagtcccttctaacttt

SEQ ID NO: 722399 - DNA, 1050 bp, Homo sapiens
aaaatattttctaactggccctttacagtaaacatttaaagacatctgagctaaactgtggtcatgtttttatgaatttctgtataacccaccttttgaaatacatcctttaataattctctcagaagctgtttacaggagggaaaacagttcttttttgtatccatggcaataccttaattttggtgttaaatttatttggcattttatataagataatatttccttgtcttctagtacttggcactgctgatgaaaaaagtctgctgtaattctaatcactgtgtaaaatttgtctttccttcctactcacacataaaatttcacttttcttgatatctgctagtttcaggataatgttttggtgtggatttattatctattctgatgcatgaacatgatttcaatctttacaggctttttttaaaaaaaattgcagccattattttttgaagtattgatattttatttcctttagtcctgttccttgattatatgtgtctgttgcattctggtactgttattctataatatcttctctagtccttaacttctcctttatattttgactttatctcagtatctcactatgttagattgaaggtacctcacaatcattttttgattctttggattccctcaactctgtacagattaaagtttagctagaatattgagtttttatttcaatatatttttcatttctacaacttattaatttttcatatatattttttcttcctttttgcttttggttatttttataaatktaatttctattattaaacctctgaatttaacaatgaaatgtttctaattaatttttagattgttctttatttttattttgtatgaatgaattatttcctcattagctaattcagtagcaatcttccttggcttgacttataagctttggaagattggtttgtaggctcatcttaagcaattttattgttgttgttgcttttgttattgctgttgcagtttttcttctcttctacatacccattcttgttttggtactaccctgacccataacgtctgtcc

SEQ ID NO: 722400 - DNA, 606 bp, Homo sapiens
tctttgaagatagaatgaaactaccaggaaagctgagcccttgtctgcttttgttactcctcttcttgggggaagttttttccttttgaggaaagtcactataaagacatcagatgaagacaatggcttttctctgcagtcagagtcacccagagtttccacacatactaagactctatccttttacgagaggcggtagatgaaaaggagaaggcggggaaagcaggggctttgtgtagacagatctagcatagcatcacggctcttcctttctgagttatttgaccttgagcctccttttctttgcttgtaaaggaaggcaaattctatccaccttgcagtgttgtcgtgagaatcaaatgagaaaacrtatgcaaagcacaatgcctagcaaatggtgggcattcaggtaatacgattttccctttccattttgtcatgttttccttcttcttgtctgcctttcttccatacacttctgctctctctttcacctttgttcagccttgcctctcagatccttcatgcatcaaatgttcttccttcctgctccttgtattcatgtctcctgatgacagtccttcatccagccaggtaaccttctta

SEQ ID NO: 722401 - DNA, 495 bp, Homo sapiens
tagatagctaggtaaaggataaatgcattaaatgagatagaaaacataaaagagagaatatctcaaaagaaatacactgtgttttatctattttaaattcaaaatctctgtaagacatctaaggaaatatagaaatggrcaatttaaaatatatgtttagagttcaggagatcttttcaggagagattgttttggagagggaggggttctgccagatcctttttattcttctcctatcatttgtaggaaaaagagaaataatcgcagatggtagttggcaaaaaaggaaatggaatactaaaattaggtccattatttttttctcttttcatcatgtgaataaggtaatccatatacatcatcagctagcatcaaatgcatgattgaatctcagattccagtgactctaattgcttccaagaaagagaatgctatctaagaaaagcaaaattaaatggagtttaaactgtatggttttgaacattctatgacctc

SEQ ID NO: 722402 - DNA, 1023 bp, Homo sapiens
cctcctgagttcacgcccttctcctgcctcagcctcccaagtagctgggactacaggcacccaccaccaccacctggctgatttttttttatttttagtagagacgaggtttcaccgtgttaaccaggatggtctcaatcttctgaccttgtgatccgcccgcctcggcctcccaaaatgctgggattacaggcgtgagccagccgtgcccggctgaaaactgattttttaaacatgaactattagttattactgcttggccttcattggcataggctgttctgcagcttgcatgtacatgtaagacaatatgcattgttatcggactcacacactaaaagtttgtgaacatcatgtacaactagaacttaatgatgaaacttgaacatgtgttaataataataatgaattctctgtaatgagaaagctgcctctcaagtcatttaacagccagtggaacttacatatttctccttagaatgcagttatrtgtaatcacacagttgcactttgtgaggttctaatattacaacaagaatgttttaaatccctctctcctctttttcttaattatcagtatcaaaacctaccaaatgcattggacttctgtgttagagcctcataaccaagaacttctgtgttacagccacatagctaatgagttagatttttctcccataggaacaattgcattgtagaacttacttttatttgcagggaaaaatactagacagatctaggaaaatacacaaatcaacaacaaactacagggaggtaaatgcaaaataaggaaaaggctaattaaaatacaaatatgttggaaaaaacaaaacaaaatccattaatacaattttaggagaagcatctaaaattgacaatttttatgaaatgtatgcaaaagaacatttttttaatgttctttttaatgcatgcaaaagaacttttaaaagaacaattcagagaccagcacctgaaaatgttaacaaataaacataggctttcaggggtactgtagagatcaat

SEQ ID NO: 722403 - DNA, 1023 bp, Homo sapiens
cctcctgagttcacgcccttctcctgcctcagcctcccaagtagctgggactacaggcacccaccaccaccacctggctgatttttttttatttttagtagagacgaggtttcaccgtgttaaccaggatggtctcaatcttctgaccttgtgatccgcccgcctcggcctcccaaaatgctgggattacaggcgtgagccagccgtgcccggctgaaaactgattttttaaacatgaactattagttattactgcttggccttcattggcataggctgttctgcagcttgcatgtacatgtaagacaatatgcattgttatcggactcacacactaaaagtttgtgaacatcatgtacaactagaacttaatgatgaaacttgaacatgtgttaataataataatgaattctctgtaatgagaaagctgcctctcaagtcatttaacagccagtggaacttacatatttctccttagaatgcagttatgtgtaatcacacagttgcactttgtgaggttctaatattacaacaagaatgttttaaatccctctctcctctttttcttaattatcagtatcaaaacctaccaaatgcattggacttctgtgttagagcctcataaccaagaacttctgtgttacagccacatagctaatgagttagatttttctcccataggaacaattgcattgtagaacttacttttatttgcagggaaaaatactagacagatctaggaaaatacacaaatcaacaacaaactacagggaggtaaatgcaaaataaggaaaaggctaattaaaatacaaatatgttggaaaaaacaaaacaaaatccattaatacaattttaggagaagcatctaaaattgacaatttttatgaaatgtatgcaaaagaacatttttttaatgttctttttartgcatgcaaaagaacttttaaaagaacaattcagagaccagcacctgaaaatgttaacaaataaacataggctttcaggggtactgtagagatcaat

SEQ ID NO: 722404 - DNA, 671 bp, Homo sapiens
tgaaaacacccagctggcatagatttccactgcggggctctcagaatagyagagaagttcaagccagcgaaagcagagaaacttttctaaaacactcccatgctatattttgtcctcagaggcagtctaaggcaggagaaagagctttggatggaatggcctcagattcacacagccttgcattaaaatctccaactctgccacttactagctgggtgactttgaatcaccccagttacctcatctgaaaaatgaggatcatattctcccctgtagggtgaatcatcttagaaagattacataatgcaatctatgtcaagggctgggctcattgatgaacggaagctctctcttccctaaacaaggtggaaaggtggtgctggtgccctggaaacaccctggtgcttccattttccattttacactgggcagtttagcatgtgtgaattggactttttgtagaattcaaaacaaaaacaaaaacaaaatccatcaccattgctccagtgtctactttccaaaagaaccacttgtatggacagactgtggcaattctatgaagaggataaaaaccactgtttcatacactttaaacaagcgaattgagtggtatataaaaaaatctcaatcgcattattatataatatataaaaatatatataatataatat

SEQ ID NO: 722405 - DNA, 1737 bp, Homo sapiens
ttttcaggtgatatattcatttctttattttataaatatttagtaagcactaactgtatactttgcactgtgctatgtgctgatctctctttctgacttcaggaagctacagctgattaagaatacttggtgtttgaattagaaattatagttggatatgatctgttcattgtactgcatcaacaaggacagaaaaagacatctaaataggattcaaagaagtttcaagaagggatttttagagtagtttacaggattttacatttacatatagaagttagctcaatacagggagaggaaagcggtttgaggcagaaggtgccttcctgtttgaaagcacaaatttgtgaaacagtgttattggccttgaaaatattcttagccacctagatcctgtgagataaatcattacagacacttttagactggccatattttcctacctgcagtgtaagtgcttatgtgcagtggatagtcattataaaatctgagggttgtgcaagcactgtggcactcgcaggattggaagacattgcacctctaacctggatgctgatcctgtggaatagctttaataggtaatttttgcaaagtaagaacccaggatgacttggcttaaggatgagatatttagggctttctgtgtcctggcagagctccttctggaggaggcagtcaaccatggctgtcactgaagcatgtcacccacaaggacactgagaggagtttagatgctcaatgccatctaatagtctcagttaaaacttgtgacctttgagtctatctcacttacatattacctgtatatatttctgggttagagagttcattttccccttgtgttcagacttaggcctctgtgccattaattcaaatagcagaattaatgaattaattaaacattcgaatttaaaaagtgaataaataaggtttctcaggtcataggtccaagttaatatccattaacagtaaaaagatgggcagagggggccaagatggcctattagaagcagctgcagttggtggcgcccaccaagaagagcaaaaatggtgagtggatcctgtgccttcaactgaggtatccaggttctctcattgggactgactaggcggttggcatgatccactgagagtaagaaaaagcaagatggaacgagggcccacccaggagttgcatggagtaaggggagcccccactcccagccaagggagggagtgagtgattgtggtaccctgcctgagaaaccacgctctttccacggatctgtgcaacccatggatcaagagatccctygtgagcccacaccaccagggccttgggacccaagcacagagctgtgcaagctcttggtggctgcccaggttgcagccagtggcagcaggacagagactgcctaagaagacaaccatcactgtggctccagtctgctgttctcccctgctggtgccaggaagactgggcagtttggaccagcaggaattctccgcagcatggaacagcagctgtggcagattgtggccagaccctctggtcccaaatgattccatccctctgatgtactacattatcatgtgtgaaatgtccagaaaagtattatttcattatagcacacactcaaagtccagaatcttaccatttaaatgaggttcaagtgtaagtgagactacttacatggagttctctggcttttatctttgtatttgttaatctgtgaaactgaagagacaagacacttg

SEQ ID NO: 722406 - DNA, 649 bp, Homo sapiens
ttcctctcagccaatggattctaagaggccraaaaggagaagtgaaaattttgttttagcactacataaggcttctcgtacttgcagccaaagaggtcagagatttggtcccaagaccaacttagagtcatgtgtgacactgggattcagaggctagttgtgggccacagggaggaagctgacccctgggctcacccagcccacccactcaccagctctcctttccttcctgggtcccttggggaggagaagccatccacctcatggaaagtgctttagaggctcctctgtgggtgccctactctgcaccctttgcggggactctctgcttcagttcgcaggacaaccttaatagctaactgcagagaggactgaatggttaagtagctcctccaaggaagcagagccaagtatcagaggccggtttccatccagggattgagagaagaatcaggagcacataggctgtggcagtaaaaagcagatcccaaagacagtatagggcggctcgaaaggggccttcctacatagccaccaccacgtgctccggcgctacctccagggggctgggcgcagctggaggacacagttcggcagcttgctagaagcctccagctcttccttttctgtatccttcaggtgactgtgg

SEQ ID NO: 722407 - DNA, 649 bp, Homo sapiens
ttcctctcagccaatggattctaagaggccgaaaaggagaagtgaaaattttgttttagcactacataaggcttctcgtacttgcagccaaagaggtcagagatttggtcccaagaccaacttagagtcatgtgtgacactgggattcagaggctagttgtgggccacagggaggaagctgacccctgggctcacccagcccacccactcaccagctctcctttccttcctgggtcycttggggaggagaagccatccacctcatggaaagtgctttagaggctcctctgtgggtgccctactctgcaccctttgcggggactctctgcttcagttcgcaggacaaccttaatagctaactgcagagaggactgaatggttaagtagctcctccaaggaagcagagccaagtatcagaggccggtttccatccagggattgagagaagaatcaggagcacataggctgtggcagtaaaaagcagatcccaaagacagtatagggcggctcgaaaggggccttcctacatagccaccaccacgtgctccggcgctacctccagggggctgggcgcagctggaggacacagttcggcagcttgctagaagcctccagctcttccttttctgtatccttcaggtgactgtgg

SEQ ID NO: 722408 - DNA, 610 bp, Homo sapiens
aaaaaaaattaattagccaggcatggtggtgtgcctgtagtcccagctagacatggtggtgtgcccgtagtcccagctactaggggggctgaggcgagagggtcgcttgagccaagaagtttgaggttgtactgagacattgtcctatgagaccctattcctaaaaaagaaaaaagaaagaaaatagttaattacagtgacaagaagtgcttcaagggagaggtgcttggtgttaagtgagcccctaacagagagacctgatgaagtctggggtctgtgaacaccttcttgaagaggtgacctgtgagctgggractggcaggggcttttttctccagtctggcacagatcccacctgggtcattcatccagcatcagtaaattacatcaccctctggcccctctgggtgctgtgtttgtgctcccactttatcatcccattgtggctgtcctttctttcgaggtgccaaacttagcttggatttagggttgtggatgtggtgtctatccttggaggcagatgtctgtctcccagaccatgatgtctactttctaaaagttcagcacctggttctgatgctccaccaggtttgggaatgtctgctgcaga

SEQ ID NO: 722409 - DNA, 610 bp, Homo sapiens
aaaaaaaattaattagccaggcatggtggtgtgcctgtagtcccagctagacatggtggtgtgcccgtagtcccagctactaggggggctgaggcgagagggtcgcttgagccaagaagtttgaggttgtactgagacattgtcctatgagaccctattcctaaaaaagaaaaaagaaagaaaatagttaattacagtgacaagaagtgcttcaagggagaggtgcttggtgttaagtgagcccctaacagagagacctgatgaagtctggggtctgtgaacaccttcttgaagaggtgacctgtgagctggggactggcaggggcttttttctccagtctggcacagatcccacctgggtcattcatccagcatcagtaaattacatcaccctctggcccctctgggtgctgtgtttktgctcccactttatcatcccattgtggctgtcctttctttcgaggtgccaaacttagcttggatttagggttgtggatgtggtgtctatccttggaggcagatgtctgtctcccagaccatgatgtctactttctaaaagttcagcacctggttctgatgctccaccaggtttgggaatgtctgctgcaga

SEQ ID NO: 722410 - DNA, 602 bp, Homo sapiens
aagctattaaaaatgagagattcttttgttctatctggctgccacattttgagtcatttaagaaaatctttttcctaaattttaatttagtagtttcattaattattttggctagtaacactgacttgcctttttaatttaacttggttttccaaagtatcaaaacgaatgtcttttactaggaaatatgtgtattttttctcgttcagaatgttttttcatgtgtctagtccctactgcatcttctccttcatgttgcctggtatgtcatttcatgcagtaatagggagaatatacatttagttgtgtgaagtgatctattagaaaatattctgcatccagtttttggtaatctgtcagcagctaagatgaattttactgcacagagtaataaacagtctaatacttcatattgaaataaatgatttttgtctgtagaaccatttatcttttttgcttgtagactttttaaaccygtagcttgtagtagaaataacagttcctagtgttttacactgtgggcctgaagaaaaaaattccatttgtttccttccttgcccccatcctctgcagaaggtgtttttgagatggagtctcgcttt

SEQ ID NO: 722411 - DNA, 1638 bp, Homo sapiens
atattgactgtgcttgaatatatctgttaaattcagcttggaaagtgtttagatttaaacaaattacttatttctttactcattaaagtctctgcttatggaaggtaaataattcttttgatttatcctcttttctctcttttttgtttggagacagggtctcactctgtcacccaggctggagggcagtggcacagtctcggctctactgcaacctccacttcctgggttgaagcgattctcgtgcctcagcctccaagtagctgggactacaggcgcccaccaccacacctggctagtttttgtagttttaggtagagacagggtttcaccatgttggccaggctggtctcgaactcctgacctcaagtgattcacccactttggcctcccaaagtgctggaattacaggcatgagccaccatgcctggcttttttctcactttcttgttcttaaataattcattctgatccaccacctcttaatcccactcccctgccattaggctattatctgcatcttacttttgccagttatttagtctcagacagaactgtttatcattaattttttactaatatatgcacattattaatatccttttattagaaagatgcccatttatacattctgataaaaaaagatgtttgattttgaaatctacttttttttttgagacagactctcactctgttgcccaggctagagtgcagtggtgcagttacagctcactgtggacttgacctcccaggcgcaagtggtccttctacatcagccacttgagtagctgagaccacaggcacgtgtgccaccacgcccagctaattttcaattttttgtagacacgaggtctcactgtgttgcccagrctggtctcaaacttctaggcccaagcaacctttctgcttcagtctcccaaagagcttgagattacaggcatgagccactgcacctggccagaatactgcttttttttttttttgaggcggagtctcactctgttgcccaggctggagtgcagtggcatgatctcagcacactgcaagctccgcctcccgggttcacgccattctgccattctcctgtctcagcctcccgagtagctgggactacaggtgccgccaccacgcctggctaatttttgtatttttagtagagacagggtttcactgtgttagccaggatggtctcgatctcctgacctcatgatccgcccgcctcggcctcccaaagtgctgggattacaggcatgagccactgcacccggccagaaatctgctttttcaatacatgaatacaagatcctgcccaggaaaacatgcctgtaagctccaggataatgtctgaaaagtcacgttaatgaggactggggtggtggtggagaataaccacaaacatcagcaaaataagtttcaggttattgagaactggctgggaaaaaaatgcaaggaaagagtgttttaagcctttgttttctgaaaaattgaaaaaaagaatgtgtttcaagagtagcgttgtggaacaggcctttaaggccaactaatgtaggtttatttttatttttattttttgagatggagtctcactctgccgcccagactggagtgcagtggcggcaatcttggctcactgcaacc

SEQ ID NO: 722412 - DNA, 1893 bp, Homo sapiens
aatttttaaaaaatcaattctcggccgtgcacagtggctcatgcctgtaatcccaacactttgggaggccgaggtgggtggatcacaaggtcaggagttgaagaccagcctggccaatatggtgaaaccttgtctatactaaaaatacaaaaattagctgggcatggtggtgggtacctgtagtcccagctactcgggaggctgaggcaggagaatcacttgaacccaggaggtggaggttgcagtgagccaagatcgtgccactgcactccagcctgggcgacagagcgagactccacctcaaaaaaaaaaaaaaaaaaattcaagtctccactaattgatgtatattcttaaaaaattacttagaatcaaaatctcaayagggtttttcattattgtagttgtttactcacttgttttagtggaatgcaacaagctggtttaaaaatttaaatggaagcacaaacaaccaagaataattgtgtgttcttgacaaaaactaaggtagaataattagcaagatttattatgaagatattacaatagtatagcattggcatagagatgaagaaaaaaaatagaaaagaatagagagcctgcaaagagatccacacagatccagacttttggccccgtagatgaggcagaaagagtgaacctttcaatgaacagtgctataattaggaatccatattttaaaaaaactacagttgtattcctagttcactatgcccaaaactcatttaaacttaaaaatttatacaactctttgaagataatatagaaaaatctctttgtggaatttgggtaaacaattttttttactcatggtacaaatagtattaatcataaaaaagattaataactttgactactttaaaattaagaagttgtgtttattaaaatacaccacaagaagagtgaaaattggcccagagtgggaaaagctgttggccacacatgtaactgaccaagttcatatatctaaaacattgtgacatacagaaaatccgatagaaaaatacacaagaaaatggaatgagcacttcaaaataaaagcaaaaatcaaatgtttagttaatatatgcaaagctgcttaacatcattagtaatgaggaaaatgcaaatgaaaaccacaataatatattactatgcactcatcactttggaaaaaaatgtatctcataatatcaagtgttcctaaggatctagagcaatggaaactcatatactctaagtgatatgattttgacttgtctttatctacagcttggttttatctaagaaggttgaagctatgcatattctacgatacagcaattcctttcctagggtatgccagagaaactctcgcccagatatacatgtaaaggatgtttgtagtatcagataggccccaaataaaaacaatcaaaaaccaatcagcagcaaaatagattaactgattgtattatagttatataattgagtattaggcagaaagaaaaatgaagtagagctacacaaatcaacacagacgatgtcacagtattgcactaaagaagcaagccataaaagattacataaaatataactttcttgtattcttatacagtttaaaacaagttaaaactaaactatgtagtttaagtttgtgcacataggtagtaaaactaaaggagcaaaaggaatgatcacagaagtcagattagtgttccatctggtggtaggagagggacaatgaacttggaggaacatatggaggacttcaattattggcaacattctatttcttaatctgttgctgatctgattgttccctttataattattatttaaattgtacatatgcttttagatacattttttgtgagcaggtaatagaaactaaactgaaacaagtagaagcaaaaa

SEQ ID NO: 722413 - DNA, 529 bp, Homo sapiens
gaaccattttcctgtgtagcttatttttccctctaatctccgcatccttcactgagcaagatttccaggtctgtttaaattctctctttgtgctacaatctggatattgcctcctggcagaaaatctgggtgattgtaagaatcacctcattatttttccttctcacagtaatcacagttttgtgctgtttttttcatatctgaaaacaatgtttttaaactgttttccagtcttctagttgcttgtggtagctgggtaattctgtcctgttacttcttcacgtctgggagtagaaggcctgtattatttttcaaaatcgattattctatattcttagagagttcttttactttatctttcaaccatcttactgattttttaaaaaagatttcagcaataagaacgtcctgtttagccgggcgcggtagctcatgcctgtaatcccagcrctttgggaggctgaggtgggtggatcacgaggtcaggagatcgagaccatcctggccaacacggtgaaaccctgtctct

SEQ ID NO: 722414 - DNA, 765 bp, Homo sapiens
gcaggctaattttaaaaatttttatttttagagacagggtcttgctatggcgctatggtgttcaagctagtctaaggcttttgataagtataattaaagtatccactgtcaatattttctttgtgaattaaatagcttaatatagtttattattttagtttgtatttctttgttgctgagactaaatattttttcatatgctaaatgttatagaacaagttctacctttgtatttattttacttctccatttttctgtttgcatgttctccattttcctattgattggtaagtgccctttaaattaacgtatagtgaaattgactttttggggtrtattagttcattttcatgctgctgataaagacatacccgagactgggaagaaaaagaggtttaattggacctacagttccacatggctggggaagcctcagaatcatggcaggaggcgaaaggcacttcttacatggcagcagcaaaaaatgaggaagaagtaaaagcagaaacccctgataaacccatcagatcttgtgagacttattaactaccatgagaatagcatgagaaagaccagccacaatcaacagaactgaaatagtaagtattggtgaggctgtgaagaaattggaatccttgttcattgctggttcttcgctggtgggaatgtaaaatggttcagctgtggtggagaacagtttggcagtttcttaaaaaagttgaacttacaattatcatatgacccagtgcttccactcctgggtaa

SEQ ID NO: 722415 - DNA, 617 bp, Homo sapiens
ccctggggatccccaggactgtttcatgcacgtagactgaccaaaggttacaggtggcctcagtagtgtgtggggggaactcccatccatgccactgttggttgtggcccagctcatggatggggccccacacacccctgctcctcatgtccatctcattgatgatctccttcacagactccaggtggcacatgatggggtatcctgaatgcatccagcctgggaacacagaaggaagagatgagcattgaggagggtccgcccaaactatctccttcattcttctccattattggacktttcttcaccatcctggttatccccaataattgcagaatctctgtgctgattggaaagcaaatagctttcccctacttggtcagaaactgaatagtacctaatccccttcttagtctctcacacctgagttgtggcctcctcctcaatctggccctggagaatttggttatactttacatagtcattcttgctgtaattcgacaccttcattttgtgtgtgtgagtgtcctttacatgtcagtctgagatatgatgtcctctgactggatctgagatccttgagggctagaacagtgtcattctttcttccccatgta

SEQ ID NO: 722416 - DNA, 1004 bp, Homo sapiens
cttaataattgtctgctcagttgctgatgaaatctctatatctctgccaatcaaccttctgcttttctcaagcctaatcctgctcactttattctcagacagatgttttttatttattattactgctcctgctccttctccctctaccactaccactacaatagcttaggaaagctcctggaacatagtaaacactcagtaaatgttcactgctgttcttatcaatgctactacactactgttaagtctcctaggaccaccacatggtgaacatttattatatrtcaagccttgtgccaagtattttacacgtatcatctcatataatttaatatatttttactgagaacattgaaaccattcaaaaagtaatctttagcttttttcaaaattgatttccttataaagtaacaccttttaatctcacaaaagaggtctgctcaccctgtccaagaccaacaccttgatatgtattttcatcctctgtcttttctgtcacttccaaggccctgttttgttgccttctgacttctagattcttcagtctcttccactggctccttttttggcctttcaatatgcctacgtctaatttgtcttgaaaacccccaggtctgaatgtttttctgtaaaagattctttcatatttttctcctgcctatcattgtgcttatcgttaggcatgttatctatgccttcttcttgactgaattacatgcacttggaatccatttctattctttctgaactaatcattggtaataatttcctagttatcaaagtcttcttctagctacttaatctctataggtttttctaatgcattttgcccctttgatcactgtatccttgaatctctttcttctttggcttttatgataggagaagttcatttctattacatgctcccctgcctctttaaggccagacgttgtgtatcatgaggcaccatctgaaggatcttggaagtagaccatgcacagaaggttcggaatggggcagca

SEQ ID NO: 722417 - DNA, 1166 bp, Homo sapiens
  misc_feature 727, 728, 729, 730, 731, 732, 733, 734, 735, 736, 737, 738,739, 740, 741, 742, 743, 744, 745, 746, 747, 748, 749, 750,751, 752, 753, 754, 755, 756, 757, 758, 759, 760, 761, 762,763, 764, 765, 766, 767, 768, 769, 770, 771, 772, 773: n = A,T,C or G
  misc_feature 774, 775, 776, 777, 778, 779, 780, 781, 782, 783, 784, 785,786, 787, 788, 789, 790, 791, 792, 793, 794, 795, 796, 797,798, 799, 800, 801, 802, 803, 804, 805, 806, 807, 808, 809,810, 811, 812, 813, 814, 815, 816, 817, 818, 819, 820: n = A,T,C or G
  misc_feature 821, 822, 823, 824, 825, 826: n = A,T,C or G
ttgttgtttagaagtgatacaaaatcttttttgctccctatcctgtttttctatccatttgtatttttggaatgtatgattgttagcccatatttcatttttatcttctatcttgtstgctattttgtcatgcattgtgttagaaattataatattcataaatactagtgtgcaagttgaattaataccgttactaccttttaagaaaataaaaacaaaaacagtgcactttaattctatccacttttctctcattttgttattttgttatgcattttaatgtcatcttttatgaatttattaactataataataaacaattagaataccatttattaagagttagataatatctaatttgcttatttttatgcaacttgtttatattttaaaaccagttgaacaatttcatgccttctcacatctcagactttctattttaaaatacttttctcatctgagaagaatgtttttagaattttctttgatgggtttctgctaatagcacacttagctactttttttttgtcaaaattagtttgttttaccctctacttaaaaaataaaagataaaaccaaaagcaatgtactggacacacagttcaaggttggcagttactttctttcattacatcgaattatggcttatttttgctttccattgtagctattgaaaaattgggtgtgcagtcaaagaatttttaaaaaaccttctagatattcattnnnnnnnnnnnnnnnnnnnnnnnnnnnnnnnnnnnnnnnnnnnnnnnnnnnnnnnnnnnnnnnnnnnnnnnnnnnnnnnnnnnnnnnnnnnnnnnnnnnntaaaatgacaacatctaaaactaggaaaacatcaagttaccaagtgttgggagttctgttgactaagataaaaattagagcaagaaattcaacatgccggaaaacaatcaattgatttttcatttttttaagaagaaaattatttggtcaagggcagtggctcactcttgtaatcctaataatttgggatgcagaagcaggaggcttacttgagggttggagtttgagaccagtctgggcaacatagtgagaacctgtctacaaaaaaaaaatttaaagaattagccaagtgtcgtggcatgtgcctgttgtcttggctatttgggaggctgatatggga

SEQ ID NO: 722418 - DNA, 1352 bp, Homo sapiens
ttctttatttttttgtctataaatcttcttccaccacgtgcgtgcgctggagtctctgtgaatctgctgtgattctgggsctgccaatattgcaaatcgttcattgctcaattaaactcctttaaatgtaattcggctgaagtttttattttatcacaaggcttagtgtttcccaatccacagatgtctctgttgttgtactgctgaaatttgcagttaaagttgagaaaatttgttaaatatttctttctttgttcataatgaacatgttgatgatccttgaaacaaaatagactcaggtgtttcctctttctttgctccaccctcctccattttaaggtagttttcttcttaaggcagattcttaaaaatctactagtagatattcatcccagtattattcagttcctttcactaaaccattgttagtggatgtttgtcctaaccactaacattagtcaccaacttctcatatagttatttactttattcaagtaccaataaaacaacaatttctatttctcaatagagcacaaaaaacactaggtcatagtcttgcttctcccatacaaacaggtatagaaaaatctatgcttctttaacttatactgatctttcatacattccttccagatctaacatctctaatactttcttaatttactaattttttatgcctctttttattagaaactgagaaacggaggaaatgacttaaaagtacccggtaaatcatagagcggaatagagtatgatttgttttcttgaaatttattattttgatgccttttctcccctctgaacttataaaaatatatgtgaatgtgagtgagttatttatttcataagtatcagtagattcctcatcttccctgagaagttatggattctaactttcatgattcatctttatatctgatcagaagcaacctacatttgacagccgtccactcaggcctagagaaagaaaaactgaagaggtgtgtaatcattaccgtgtaaagaaatattatggaggtaacttatgccatctcagtttataaacagtgactacatttaaggattgattaaaatttcatgattgctcactcatcagaaaacttgcttggaggaagtttctttctaattgacagctattatgagctaggataaaacaacaataaaaccacaacaaatcttgtctctgagaggtttggagattgacataaagattatacaaatgaaatggttacacagacattttcatccattgcatttgagcaaattaaaaaatgactggagtgtaactcaaagattccatttggaaactcaaaacttcatatacatgttgaagaattttagaaaatcatgac

SEQ ID NO: 722419 - DNA, 1352 bp, Homo sapiens
ttctttatttttttgtctataaatcttcttccaccacgtgcgtgcgctggagtctctgtgaatctgctgtgattctgggcctgccmatattgcaaatcgttcattgctcaattaaactcctttaaatgtaattcggctgaagtttttattttatcacaaggcttagtgtttcccaatccacagatgtctctgttgttgtactgctgaaatttgcagttaaagttgagaaaatttgttaaatatttctttctttgttcataatgaacatgttgatgatccttgaaacaaaatagactcaggtgtttcctctttctttgctccaccctcctccattttaaggtagttttcttcttaaggcagattcttaaaaatctactagtagatattcatcccagtattattcagttcctttcactaaaccattgttagtggatgtttgtcctaaccactaacattagtcaccaacttctcatatagttatttactttattcaagtaccaataaaacaacaatttctatttctcaatagagcacaaaaaacactaggtcatagtcttgcttctcccatacaaacaggtatagaaaaatctatgcttctttaacttatactgatctttcatacattccttccagatctaacatctctaatactttcttaatttactaattttttatgcctctttttattagaaactgagaaacggaggaaatgacttaaaagtacccggtaaatcatagagcggaatagagtatgatttgttttcttgaaatttattattttgatgccttttctcccctctgaacttataaaaatatatgtgaatgtgagtgagttatttatttcataagtatcagtagattcctcatcttccctgagaagttatggattctaactttcatgattcatctttatatctgatcagaagcaacctacatttgacagccgtccactcaggcctagagaaagaaaaactgaagaggtgtgtaatcattaccgtgtaaagaaatattatggaggtaacttatgccatctcagtttataaacagtgactacatttaaggattgattaaaatttcatgattgctcactcatcagaaaacttgcttggaggaagtttctttctaattgacagctattatgagctaggataaaacaacaataaaaccacaacaaatcttgtctctgagaggtttggagattgacataaagattatacaaatgaaatggttacacagacattttcatccattgcatttgagcaaattaaaaaatgactggagtgtaactcaaagattccatttggaaactcaaaacttcatatacatgttgaagaattttagaaaatcatgac

SEQ ID NO: 722420 - DNA, 1352 bp, Homo sapiens
ttctttatttttttgtctataaatcttcttccaccacgtgcgtgcgctggagtctctgtgaatctgctgtgattctgggcctgccaatattgcaaatcgttcattgctcaattaaactcctttaaatgtaattcggctgaagtttttattttatcacaaggcttagtgtttcccaatccacagatgtctctgttgttgtactgctgaaatttgcagttaaagttgagaaaatttgttaaatatttctttctttgttcataatgaacatgttgatgatccttgaaacaaaatagactcaggtgtttcctctttctttgctccaccctcctccattttaaggtagttttcttcttaaggcagattcttaaaaatctactagtagatattcatcccagtattattcagttcctttcactaaaccattgttagtggatgtttgtcctaaccactaacattagtcaccaacttctcatatagttatttactttattcaagtaccaataaaacaacaatttctatttctcaatagagcacaaaaaacactaggtcatagtcttgcttctcccatacaaacaggtatagaaaaatctatgcttctttaacttatactgatctttcatacattccttccagatctaacatctctaatactttcttaatttactaattttttatgcctctttttattagaaactgagaaacggaggaaatgacttaaaagtacccggtaaatcatagagcggaatagagtatgatttgttttcttgaaatttattattttgatgccttttctcccctctgaacttataaaaatatatgtgaatgtgagtgagttatttatttcataagtatcagtagattcctcatcttccctgagaagttatggattctaactttcatgattcatctttatatctgatcagaagcaacctacatttgacagccgtccactcaggcctagagaaagaaaaactgaagaggtgtgtaatcattaccgtgtaaagaaatattatggaggtaacttatgccatctcagtttataaacagtgactacatttaaggattgattaaaatttcatgattgctcactcatcagaaaacttgcttggaggaagtttctttytaattgacagctattatgagctaggataaaacaacaataaaaccacaacaaatcttgtctctgagaggtttggagattgacataaagattatacaaatgaaatggttacacagacattttcatccattgcatttgagcaaattaaaaaatgactggagtgtaactcaaagattccatttggaaactcaaaacttcatatacatgttgaagaattttagaaaatcatgac

SEQ ID NO: 722421 - DNA, 1352 bp, Homo sapiens
ttctttatttttttgtctataaatcttcttccaccacgtgcgtgcgctggagtctctgtgaatctgctgtgattctgggcctgccaatattgcaaatcgttcattgctcaattaaactcctttaaatgtaattcggctgaagtttttattttatcacaaggcttagtgtttcccaatccacagatgtctctgttgttgtactgctgaaatttgcagttaaagttgagaaaatttgttaaatatttctttctttgttcataatgaacatgttgatgatccttgaaacaaaatagactcaggtgtttcctctttctttgctccaccctcctccattttaaggtagttttcttcttaaggcagattcttaaaaatctactagtagatattcatcccagtattattcagttcctttcactaaaccattgttagtggatgtttgtcctaaccactaacattagtcaccaacttctcatatagttatttactttattcaagtaccaataaaacaacaatttctatttctcaatagagcacaaaaaacactaggtcatagtcttgcttctcccatacaaacaggtatagaaaaatctatgcttctttaacttatactgatctttcatacattccttccagatctaacatctctaatactttcttaatttactaattttttatgcctctttttattagaaactgagaaacggaggaaatgacttaaaagtacccggtaaatcatagagcggaatagagtatgatttgttttcttgaaatttattattttgatgccttttctcccctctgaacttataaaaatatatgtgaatgtgagtgagttatttatttcataagtatcagtagattcctcatcttccctgagaagttatggattctaactttcatgattcatctttatatctgatcagaagcaacctacatttgacagccgtccactcaggcctagagaaagaaaaactgaagaggtgtgtaatcattaccgtgtaaagaaatattatggaggtaacttatgccatctcagtttataaacagtgactacatttaaggattgattaaaatttcatgattgctcactcatcagaaaacttgcttggaggaagtttctttctaattgacagctattatgagctaggataaaacaacaataaaaccacaacaaatcttgtctytgagaggtttggagattgacataaagattatacaaatgaaatggttacacagacattttcatccattgcatttgagcaaattaaaaaatgactggagtgtaactcaaagattccatttggaaactcaaaacttcatatacatgttgaagaattttagaaaatcatgac

SEQ ID NO: 722422 - DNA, 482 bp, Homo sapiens
ggccaggctsgtctcaaactcctaacctcatgatccacctaccctggcctcccaaagtgctgggattacaggtgtgagccattgtgcctggccaacattattattttttagatccagggtctccctctgttgcccagggtggagtgcagtggcacagtcatggcttactgcagcctcaacttcctcggctcaagtgatcctcctgcctcaacctcctgagtagctgggaccagaagcacgcgacaccatgcccagctaatttttttttgtagcagtggggttgcccaggctggtctcaaacttgtgagcctgtaactgctatataactattaactactatataaagcacaatatctaaaagaaatatcatgcagtcattaaaaactatctgtttctgtggaggagaccaaggtacacattgtgtttggccatatatatttcaacatttgtctccagatgtgtttagacgagaaagagagcaa

SEQ ID NO: 722423 - DNA, 643 bp, Homo sapiens
atattatatgttcttaatattataataataataagaatcatttttamaatgaagtgtcttgatataactgataacagtagaacaactttattgccaaatatgagtatgtacatgtttgcatgcattcacatgcaattaaaatgataggtttcagtctctcagtgagcttgtgccccgggctatgacttttacaagtgcttctctggttttactgtctctaggtgagacaataaatcctggtgcctgatgtcaggtatttttcttcacgcacatcaaggaatagaggtggtttaatttgaatatttccatttccctggatcagttaggcgctggtaaattagtttctttggagggcagtactttgttgacagaactgagagctcaggcttatttttaaatggcgacttttttgccctccagatgaaatcacaggggatttttctgtagtttttttacaaaacctggtagggctgccggaggtaaatctctcaaaaatttgaggccccctgaaactcatccccaccagggtttttaactgtcagagttgtccacgttgagccatcagtaattttttaataataatttatgtcttttcaacactgcagccatagtagtgggcttttgcctctgaacttccgttctt

SEQ ID NO: 722424 - DNA, 643 bp, Homo sapiens
atattatatgttcttaatattataataataataagaatcatttttacaatgaagtgtcttgatataactgataacagtagaacaactttattgccaaatatgagtatgtacatgtttgcatgcattcacatgcaattaaaatgataggtttcagtctctcagtgagcttgtgccccgggctatgacttttacaagtgcttctctggttttactgtctctaggtgagacaataaatcctggtgcctgatgtcaggtatttttcttcacgcacatcaaggaatagaggtggtttaatttgaatatttccatttccctggatcagttaggcgctggtaaattagtttctttggagggcagtactttgttgacagaastgagagctcaggcttatttttaaatggcgacttttttgccctccagatgaaatcacaggggatttttctgtagtttttttacaaaacctggtagggctgccggaggtaaatctctcaaaaatttgaggccccctgaaactcatccccaccagggtttttaactgtcagagttgtccacgttgagccatcagtaattttttaataataatttatgtcttttcaacactgcagccatagtagtgggcttttgcctctgaacttccgttctt

SEQ ID NO: 722425 - DNA, 652 bp, Homo sapiens
acacacaaaaaacctgtaaattggataagctacaatgtcatttcattatgttaatttgcatttctttgatcactggtaaaactggactttttaacctaagctcattgatcttttatattttttctttttttcaaatactcatatcttttgcctttctttctagtgtggctttcttaatgacwtataggagctgtttatgagtccattacattttaatctttatcttttatctactttggtaatttttccttacttgttttatatttttaatttcatttacaatgtttttagaaaagtttttcatttttacttgtcaaatctgccaatttacctttataatgcctttttttagtgccatacccttctcatatatgaattcagataatatagaactacattttcttctagttctttgatttcaattttgcatttaaatatttaatttattttggcctaccatgtaaggtagaaattcaatcaagttattactcaatgattagagtatcattcctgaatagtctcacttttattatatatgccttttcccccagacctttaattcattgtcactgatttaactttctattcttgtactgtgttacatcattacttcaaccattataacttaataatacatattcacatctgatgg

SEQ ID NO: 722426 - DNA, 619 bp, Homo sapiens
ccatatggcctccaaaactgagaatatttattaggccctttatggaaaaacagactgctgattcttgacttagagtaagggagcgagaaagaaaagtcagaaacgattttgagaaatgatttactatagaattcatcgtacatgctggtggatgtgtgtagtaggagaggaagagggaagtctcatgaacaaaccttagtttctatttggtgactgtgttcatggtcatgtcagtaacttgcaccaaaaacaaatgagacacgtttagcttgggggagacagagaatgagtttggttctggacatggtcagtttgaaaggcctatgccatcttcatgagaagatatccaatacgatgctggaaataaagagtcacaaaagaagaaggaataaactaaatccaaaatagcaagtgctttttcaagttctaacatggttataaaatatcctttactttgtgtctataaaawaacctggttataaagtatttaacgtggttagaaagtattcaaagtctcccatacttttttccgttgtatagaccatagtccaaaagtccttaaactcagcaagttactacttgtgacctaatttcagcaaagcatccctcctttctgcta

SEQ ID NO: 722427 - DNA, 336 bp, Homo sapiens
atacmtatatatatgtacatatacgtatatgtatgtatatatacatatacatgtgtgtgtgtgtctatatatatatataaagaattctacatgctgaaacagagttgcggtttataatatctcactttatatgagtgactaattgctatagagaacgattcaaaagaccaaaggttgggctttaaagaacccagtctttacttagtaaagactgtttactttactaactttacttagtaaagtttaagtatcagattcataaactaatattttcatctatcgtatcaagctgtgcatagtgaactgctgtttgcaatactattatttagcatgcta

SEQ ID NO: 722428 - DNA, 336 bp, Homo sapiens
atacatatatatatgtacatatacgtatatgtatrtatatatacatatacatgtgtgtgtgtgtctatatatatatataaagaattctacatgctgaaacagagttgcggtttataatatctcactttatatgagtgactaattgctatagagaacgattcaaaagaccaaaggttgggctttaaagaacccagtctttacttagtaaagactgtttactttactaactttacttagtaaagtttaagtatcagattcataaactaatattttcatctatcgtatcaagctgtgcatagtgaactgctgtttgcaatactattatttagcatgcta

SEQ ID NO: 722429 - DNA, 1996 bp, Homo sapiens
aaagtacagaaggtttcagataattattttataattggaaataaaaagaaaataaaagacaggatctgggagatcatgaggtttgcccaaggtcacacagctaattgtggcagaacttctagcctttttcttcaaagcctggaaattttttttwatttattttatttattattattatttttattttttatttttgagacggagtctcgctgtgtcccccgggctggagtgcagtggtgcgatctcggctcactgcaagctccgcctctcgggttcacgccattctgctgcctcagcctcctgagtagctgggacttcaggcgcccaccaccatgcccagccaaatgtttttgtatttttagtagagacagggtttcaccatgttagccaggatggtctggatctcctgacctcgtgatctacccgccttggcctcccaaactgccaggattacaggcatgagccgccgcacccagccaaagcctggaattttctaattgttgtagcctaagctcattgctggttccttttgcccaggatcattttagctgatagcaggcacttgaacaaaaattagtaaaacaaaaatatatgaacaaaaattagtagaccttgttctcatgctatcctgaagcaatctggcatcatggctttgggaaagtcacctatgaagtacagacctttctaaagaagttcttacataatttgacttttttaaaaagtaaatgcaattattaacttttttatgatcatacagataataaatacttatagagaaaattcaagcaatagagaaaaatataaagaggaaagcaaaaaccacccaatgttctccaaatgagaaataatccaattcatattttgattaatgttattctggatctctatgcagacatacacatatataattttatgtaaatgggatattcttagccatgctatttgatagcttgttcacatcaacattttttccatttaataaaaattataaaaattttgacattagaacttggtaaggtttttctatgtaaaatccaacttaatgctcaaaataaattttacggaactcagtcacagacaagatatttgtgcaagggcacaaggctggtatttggtgggctggggtggaacaagatttcaatacagccaactttaactcaaggcattcctttataatggctgtattgcatccactgaatgaatatctaggatctattttaaataaatagagatgggtaatgaaataactttaagatttctgatactataaagatctcattgataaatatcaaatatatttgtgtgtatttgatcaaacatctccttggatataattccaaataaataattttggggttaagatgtacatctcttcaattgccagatgaaatactatgcttttatagaagagtcatttctctacatcctcaacaatgagtgttactgatattaaaataagcagagatttacttcattaacacagactctctcttttggctttgtaatgcagaattaaaaacatatacttgctatggcccattctttaaaatttaataaatgtttactaggtgattttaagagtagatattgtgggggaaacaagaatgcttgcttcatatatctcacaatataatagctgaaaaatcatcatttttgggaaacagtaaggatcgttccacatattgctggtaaaaatagtaatattatggatagaaatgctacaacacacaccaaaatcttttatatgttcatatctatgactcagtaatttaactagttggattcaattttcagaaaatgacgagatgtgctgtcaaaatatttattttaatattacctatgaaagtaaaaaatgggaaacttaaatatgtaaaacagacattgattatggactacgacacatccattagatgagctgttatttagccattaaaacttttgtaacttttgtagactgctttaatcatatgccaaaatgttctcaatattttaaaca

SEQ ID NO: 722430 - DNA, 1996 bp, Homo sapiens
aaagtacagaaggtttcagataattattttataattggaaataaaaagaaaataaaagacaggatctgggagatcatgaggtttgcccaaggtcacacagctaattgtggcagaacttctagcctttttcttcaaagcctggaaattttttttaatttattttatttattattattatttttattttttatttttgagacggagtctcgctgtgtcccccrggctggagtgcagtggtgcgatctcggctcactgcaagctccgcctctcgggttcacgccattctgctgcctcagcctcctgagtagctgggacttcaggcgcccaccaccatgcccagccaaatgtttttgtatttttagtagagacagggtttcaccatgttagccaggatggtctggatctcctgacctcgtgatctacccgccttggcctcccaaactgccaggattacaggcatgagccgccgcacccagccaaagcctggaattttctaattgttgtagcctaagctcattgctggttccttttgcccaggatcattttagctgatagcaggcacttgaacaaaaattagtaaaacaaaaatatatgaacaaaaattagtagaccttgttctcatgctatcctgaagcaatctggcatcatggctttgggaaagtcacctatgaagtacagacctttctaaagaagttcttacataatttgacttttttaaaaagtaaatgcaattattaacttttttatgatcatacagataataaatacttatagagaaaattcaagcaatagagaaaaatataaagaggaaagcaaaaaccacccaatgttctccaaatgagaaataatccaattcatattttgattaatgttattctggatctctatgcagacatacacatatataattttatgtaaatgggatattcttagccatgctatttgatagcttgttcacatcaacattttttccatttaataaaaattataaaaattttgacattagaacttggtaaggtttttctatgtaaaatccaacttaatgctcaaaataaattttacggaactcagtcacagacaagatatttgtgcaagggcacaaggctggtatttggtgggctggggtggaacaagatttcaatacagccaactttaactcaaggcattcctttataatggctgtattgcatccactgaatgaatatctaggatctattttaaataaatagagatgggtaatgaaataactttaagatttctgatactataaagatctcattgataaatatcaaatatatttgtgtgtatttgatcaaacatctccttggatataattccaaataaataattttggggttaagatgtacatctcttcaattgccagatgaaatactatgcttttatagaagagtcatttctctacatcctcaacaatgagtgttactgatattaaaataagcagagatttacttcattaacacagactctctcttttggctttgtaatgcagaattaaaaacatatacttgctatggcccattctttaaaatttaataaatgtttactaggtgattttaagagtagatattgtgggggaaacaagaatgcttgcttcatatatctcacaatataatagctgaaaaatcatcatttttgggaaacagtaaggatcgttccacatattgctggtaaaaatagtaatattatggatagaaatgctacaacacacaccaaaatcttttatatgttcatatctatgactcagtaatttaactagttggattcaattttcagaaaatgacgagatgtgctgtcaaaatatttattttaatattacctatgaaagtaaaaaatgggaaacttaaatatgtaaaacagacattgattatggactacgacacatccattagatgagctgttatttagccattaaaacttttgtaacttttgtagactgctttaatcatatgccaaaatgttctcaatattttaaaca

SEQ ID NO: 722431 - DNA, 1996 bp, Homo sapiens
aaagtacagaaggtttcagataattattttataattggaaataaaaagaaaataaaagacaggatctgggagatcatgaggtttgcccaaggtcacacagctaattgtggcagaacttctagcctttttcttcaaagcctggaaattttttttaatttattttatttattattattatttttattttttatttttgagacggagtctcgctgtgtcccccgggctggagtgcagtggtgcgatctcggctcactgcaagctccgcctctcgggttcacgccattctgctgcctcagcctcctgagtagctgggacttcaggcgcccrccaccatgcccagccaaatgtttttgtatttttagtagagacagggtttcaccatgttagccaggatggtctggatctcctgacctcgtgatctacccgccttggcctcccaaactgccaggattacaggcatgagccgccgcacccagccaaagcctggaattttctaattgttgtagcctaagctcattgctggttccttttgcccaggatcattttagctgatagcaggcacttgaacaaaaattagtaaaacaaaaatatatgaacaaaaattagtagaccttgttctcatgctatcctgaagcaatctggcatcatggctttgggaaagtcacctatgaagtacagacctttctaaagaagttcttacataatttgacttttttaaaaagtaaatgcaattattaacttttttatgatcatacagataataaatacttatagagaaaattcaagcaatagagaaaaatataaagaggaaagcaaaaaccacccaatgttctccaaatgagaaataatccaattcatattttgattaatgttattctggatctctatgcagacatacacatatataattttatgtaaatgggatattcttagccatgctatttgatagcttgttcacatcaacattttttccatttaataaaaattataaaaattttgacattagaacttggtaaggtttttctatgtaaaatccaacttaatgctcaaaataaattttacggaactcagtcacagacaagatatttgtgcaagggcacaaggctggtatttggtgggctggggtggaacaagatttcaatacagccaactttaactcaaggcattcctttataatggctgtattgcatccactgaatgaatatctaggatctattttaaataaatagagatgggtaatgaaataactttaagatttctgatactataaagatctcattgataaatatcaaatatatttgtgtgtatttgatcaaacatctccttggatataattccaaataaataattttggggttaagatgtacatctcttcaattgccagatgaaatactatgcttttatagaagagtcatttctctacatcctcaacaatgagtgttactgatattaaaataagcagagatttacttcattaacacagactctctcttttggctttgtaatgcagaattaaaaacatatacttgctatggcccattctttaaaatttaataaatgtttactaggtgattttaagagtagatattgtgggggaaacaagaatgcttgcttcatatatctcacaatataatagctgaaaaatcatcatttttgggaaacagtaaggatcgttccacatattgctggtaaaaatagtaatattatggatagaaatgctacaacacacaccaaaatcttttatatgttcatatctatgactcagtaatttaactagttggattcaattttcagaaaatgacgagatgtgctgtcaaaatatttattttaatattacctatgaaagtaaaaaatgggaaacttaaatatgtaaaacagacattgattatggactacgacacatccattagatgagctgttatttagccattaaaacttttgtaacttttgtagactgctttaatcatatgccaaaatgttctcaatattttaaaca

SEQ ID NO: 722432 - DNA, 612 bp, Homo sapiens
tattcaacatattaaaaaataaacattacttgatcacctattctgttctagtacttctctatttaccgcctgtacagagaagtaacacacagtcctcaacttcaagaaggaatcctaagcatctcaaatagccagtgtttatcttctacctgttttcttccctgccataaatccatgcggatggcttaactctatagaaaggaaragaagctcagcttattcatatgcaagcagttggtaagaaaaggaagtttcttcactttgattgcatttcatcagtgtcatttcataagtttccttattttagagctgaactgcccaatatggtagtgaacagacaaacctggctatttaaattttaatttaaattaactaaaattaaataaaatttaaaatcagttcctcagtcccagtaatcacgtttcacatgctcgatggccacgtgtagctagtggctagtctgctggataatgcaggcataggacgtttccattatccattattgcagtatggcatattacacagaactgttttagagtatggctttgcttgttaaggtgttatctttggttataatctggatatgtcccagagctggtactcagtatgtca

SEQ ID NO: 722433 - DNA, 1061 bp, Homo sapiens
ttttcccctcaccttctccatctctcccaacctcaacatcaaatccatgacaggtcctgccaattttatgtcttttttttcttttctgaagacaaggccttgctctgctgtccagactggagtacaaggcatgatcacagctcaatgtagcctctaattcctaggctcaagcaatccttctgctttagcctcccagatagccaggactataggtgtgcaccaccacacctagctagtttgactgattgattgattgattgattttcattgttattttgtagagatgggatctcactttgttgcccaggctgatcttgagctcctggcttcaagcaatcctcatggctcggtttcccaaagtcctgggaatacaggtgtgagccactgcgcccagccccaatcttacatcttaagtctataaaattgactttctgtctccgtccctaccatcaccatcattcctcacctagaaratggcagccaccatctaactggcctatttgccttctaccttgtgccacaccaagttgtttttcacatagcaaccatcctgatctttctaagagacaaaattgaacgtatctgtctcttgcctatacagccattattcgttctctgttcccttagaataaagtccacatactggcccttctccctcctggtcatttatgatccatcgttgctgcttctccagccgtgtagatcaccttgcaagttccactttagcaagaagaaccgctgtctccctcaacctctgcacgttgattcttgaccttgccctctggctcagacatcctctcttcctaaaacgccctcacatccccttccttaaacttctaagcttgtctgccctttaaaactcagcttgagtgacaccctactcagaaagcctttccaaccagcctccatgctgcccccagccgtcttctctactccacttcacatgctcagagcatctttgtcatttcacccaatagcttgtgtgattgctgctgacaaagcctcggtctcttccatttaaactctgagctcctagaaaacagaagcaatcatatgcgttt

SEQ ID NO: 722434 - DNA, 1021 bp, Homo sapiens
tatatgtggtctgttgttgaccaagatgtcattatgcagcaaatgattgtatctgcatcaatacaaacttctgaattttcttctctttttttgttttgttttcgtttttcacwctgtggatttcaatccaataatatagttatttcttttgctgctaagtttggtctagctttggccagtgggatctcctatagtgggggctcctgtgtttttctcacctgctcccattctttcttgagcacttaatttctgacaacacaagatgatccgggtttagcttagatttttccctcccccagctctggaatcatccgcttctccaagtagtcctggtttctttgattgggaatggtatttagaaacaaagatctgtgtactaaatgtcctcattgctactagggtgtcattaattctaagccttcatagtggacatagctagaaaatatatgtatgtgttctgatccacatttgtgaacaccattatatttgtgccctctctgcatatatatttaaaactgtgagttcatattgatacttcctatgacaatccaaagccacagggttaattctagccttccctctttccttatttcgtaatttatttatttatttttatttatttacttattttttgagacagagtcttgctgtgttgcccaggctgaagtgcagtggtgcaatcttggctcactacaacctccgcctcccaggttcaagcaattctcctatctcagactcccaggtagctgggattacaggcacccaccaccatgccagtttcattttttgtattttagtagagacaaggttttgccatgttggccaggttggtctctaactcctgacctcaggtgatctgcctccctcagcctcccaaagtgctgggattacaggcatgaggcactgtgcccagcctgtaatttatttatctgacagtgagaaaccctgaagatgtcatctacaatatatttattcatctattcaatccaagtaaacccatagtttcagaattgttaactca

SEQ ID NO: 722435 - DNA, 691 bp, Homo sapiens
tgaaggttctagtcaaatgattcctctggttttgactttttaaatggctctttcactgttgttgcctctggcaactaccattataattggaggaaattttgttccgctaagaggctactccatttacggactcaagccagaccaaaataatgaagctctcttataatcccggtatgtttcctgatcattcccatttccctctctggctgtccagaaatagactctcttccaaggtatcacttttatttatagccaatatgaaggtcttgtagaaaaacactgacttccaaaaacaacagacgcatgttggcaagagtacagagacaagggaatgcttatacactgttggtgagaagtaaattgtacaacctctataggaaacagtatgtagatttcccaaagaactaaaaatagatctgccctttgacccagcaactccactaatgattatctatgcaaaggaaaagaaattatcaaaaaagatgcctatgcttacatttttattgcacctcaattcacaatagcaaaatcgtggaatgaacctgaatgttcattggatgaagaaaatgtggtatacacacaccaaggaatactatgcatctataaaaaagaatgaaactgtakcactgtatcttttgcagcaacataaatggagctgcaggtcaatatcctaagtgagataactcagaaa

SEQ ID NO: 722436 - DNA, 691 bp, Homo sapiens
tgaaggttctagtcaaatgattcctctggttttgactttttaaatggctctttcactgttgttgcctctggcaactaccattataattggaggaaattttgttccgctaagaggctactccatttacggactcaagccagaccaaaataatgaagctctcttataatcccggtatgtttcctgatcattcccatttccctctctggctgtccagaaatagactctcttccaaggtatcacttttatttatagccaatatgaaggtcttgtagaaaaacactgacttccaaaaacaacagacgcatgttggcaagagtacagagacaagggaatgcttatacactgttggtgagaagtaaattgtacaacctctataggaaacagtatgtagatttcccaaagaactaaaaatagatctgccctttgacccagcaactccactaatgattatctatgcaaaggaaaagaaattatcaaaaaagatgcctatgcttacatttttattgcacctcaattcacaatagcaaaatcgtggaatgaacctgaatgttcattggatgaagaaaatgtggtatacacacaccaaggaatactatgcatctataaaaaagaatgaaactgtatmactgtatcttttgcagcaacataaatggagctgcaggtcaatatcctaagtgagataactcagaaa

SEQ ID NO: 722437 - DNA, 691 bp, Homo sapiens
tgaaggttctagtcaaatgattcctctggttttgactttttaaatggctctttcactgttgttgcctctggcaactaccattataattggaggaaattttgttccgctaagaggctactccatttacggactcaagccagaccaaaataatgaagctctcttataatcccggtatgtttcctgatcattcccatttccctctctggctgtccagaaatagactctcttccaaggtatcacttttatttatagccaatatgaaggtcttgtagaaaaacactgacttccaaaaacaacagacgcatgttggcaagagtacagagacaagggaatgcttatacactgttggtgagaagtaaattgtacaacctctataggaaacagtatgtagatttcccaaagaactaaaaatagatctgccctttgacccagcaactccactaatgattatctatgcaaaggaaaagaaattatcaaaaaagatgcctatgcttacatttttattgcacctcaattcacaatagcaaaatcgtggaatgaacctgaatgttcattggatgaagaaaatgtggtatacacacaccaaggaatactatgcatctataaaaaagaatgaaactgtatcamtgtatcttttgcagcaacataaatggagctgcaggtcaatatcctaagtgagataactcagaaa

SEQ ID NO: 722438 - DNA, 691 bp, Homo sapiens
tgaaggttctagtcaaatgattcctctggttttgactttttaaatggctctttcactgttgttgcctctggcaactaccattataattggaggaaattttgttccgctaagaggctactccatttacggactcaagccagaccaaaataatgaagctctcttataatcccggtatgtttcctgatcattcccatttccctctctggctgtccagaaatagactctcttccaaggtatcacttttatttatagccaatatgaaggtcttgtagaaaaacactgacttccaaaaacaacagacgcatgttggcaagagtacagagacaagggaatgcttatacactgttggtgagaagtaaattgtacaacctctataggaaacagtatgtagatttcccaaagaactaaaaatagatctgccctttgacccagcaactccactaatgattatctatgcaaaggaaaagaaattatcaaaaaagatgcctatgcttacatttttattgcacctcaattcacaatagcaaaatcgtggaatgaacctgaatgttcattggatgaagaaaatgtggtatacacacaccaaggaatactatgcatctataaaaaagaatgaaactgtatcacygtatcttttgcagcaacataaatggagctgcaggtcaatatcctaagtgagataactcagaaa

SEQ ID NO: 722439 - DNA, 1592 bp, Homo sapiens
attatatttgtctacactgctaggatcaaaatcatgggtaaggaaacttaagatatactggcagagaggacatttatttctgatcatataagtcagcatcataaatttaaatgctaagtagaatatacaactcaaagttctatatgcatttaccttatgctaggccatgcacttttagtttatttgcacaacaataaattgggaactttgttttcccatttccaggtaatagactagagctcagaaaggtttagtaaaatttctaagtttgcacagttagtcgaagccagatcttattgggttttactgactcttaaggtcttactggctcttaaccaccactcacttcactgatgaaagtgccagaaagccatcatggttaccaaatcatgcgatgaaaaatcaaatgacaacgcaataaatttccgtgatgtagatgaaacacagactgcggcaaaaccatctgttagattttgttagttaaataaaccccaaaatgaatctcgcaggaatatttgcacctatcctaaccaagtgtacacttatatacatttatattttttaatgcaaatttgcatgtacaggctatgttcatgctcagaacaagtctacttttggagagattattcttattatgctatgattatcatcaatgaaaagtcgaatcatcatttaatgcatcatttgctatgtaaattgtttttcacagaaaactgtttggtttgacctttctgggagttgtcatttcaaactcatggtcatttacatttttcacctttcaggaaggtgcattgagtagtgcatagcttgagtggtgcatttcaaaactataaaaatattggcagggcagtcctgtgataggcagtcctgtatttaaactctgctgtctttatttaaagttagattcggaggagtcaggagctaacagtccatatggaagaggagggatggatcctgggaattcacccttctatgctccatgctaaactagatccatggccttgaagtcttttcttcacaaactctatcaaaattggagcatcagcccaatagttgaatgttattttacttatagaaagatccctgtgctttgggtcaaatagattgtgcatgctagcaagcttacacccaaaccagaatgtccaaaagaataaaatgtggatgaatgaacaatgttttaaaattgctcaggacatagtgtgtgcattaatttatatgtccatgttaggtgttaataaccataatttctttaacaatttagattaaaagatgcatagaaattgacattttaataaccactactccttgtccctcagctaactgtgcaattctgggtgttcaccttgctcagtaaaccactgcccagaaaagggtcacactgaatctacagatgaggtctcaccatttctgaatctagaaatgttggcgggtacaattgcatagtttagcaaaamaaaaaaaaacatacatacacatatatatgcatatatatatatacacacacacacacaaatgcaatatttatacataaatttgtcatgtcagaaattttgaagaaaattagtattgatcctaatttatttttattttca

SEQ ID NO: 722440 - DNA, 1592 bp, Homo sapiens
attatatttgtctacactgctaggatcaaaatcatgggtaaggaaacttaagatatactggcagagaggacatttatttctgatcatataagtcagcatcataaatttaaatgctaagtagaatatacaactcaaagttctatatgcatttaccttatgctaggccatgcacttttagtttatttgcacaacaataaattgggaactttgttttcccatttccaggtaatagactagagctcagaaaggtttagtaaaatttctaagtttgcacagttagtcgaagccagatcttattgggttttactgactcttaaggtcttactggctcttaaccaccactcacttcactgatgaaagtgccagaaagccatcatggttaccaaatcatgcgatgaaaaatcaaatgacaacgcaataaatttccgtgatgtagatgaaacacagactgcggcaaaaccatctgttagattttgttagttaaataaaccccaaaatgaatctcgcaggaatatttgcacctatcctaaccaagtgtacacttatatacatttatattttttaatgcaaatttgcatgtacaggctatgttcatgctcagaacaagtctacttttggagagattattcttattatgctatgattatcatcaatgaaaagtcgaatcatcatttaatgcatcatttgctatgtaaattgtttttcacagaaaactgtttggtttgacctttctgggagttgtcatttcaaactcatggtcatttacatttttcacctttcaggaaggtgcattgagtagtgcatagcttgagtggtgcatttcaaaactataaaaatattggcagggcagtcctgtgataggcagtcctgtatttaaactctgctgtctttatttaaagttagattcggaggagtcaggagctaacagtccatatggaagaggagggatggatcctgggaattcacccttctatgctccatgctaaactagatccatggccttgaagtcttttcttcacaaactctatcaaaattggagcatcagcccaatagttgaatgttattttacttatagaaagatccctgtgctttgggtcaaatagattgtgcatgctagcaagcttacacccaaaccagaatgtccaaaagaataaaatgtggatgaatgaacaatgttttaaaattgctcaggacatagtgtgtgcattaatttatatgtccatgttaggtgttaataaccataatttctttaacaatttagattaaaagatgcatagaaattgacattttaataaccactactccttgtccctcagctaactgtgcaattctgggtgttcaccttgctcagtaaaccactgcccagaaaagggtcacactgaatctacagatgaggtctcaccatttctgaatctagaaatgttggcgggtacaattgcatagtttagcaaaaaaaaaaaaaacatacatacacatatatatgcatatatatatatacacacacwcacacaaatgcaatatttatacataaatttgtcatgtcagaaattttgaagaaaattagtattgatcctaatttatttttattttca

SEQ ID NO: 722441 - DNA, 1051 bp, Homo sapiens
ctgaaattccatttgtggtatagttttccttgggtggtgcatgacaccaatgaagatatcctagcaatgatgacaaaacaattacaaaaatatttagtcaaaaatactcctaataatcaaagttattcttatgctttgttttatcattgccaaaagmagttagttttaaaggaagatgttaatgtctaacaaaagtgtttagtaatcttctgagtaaggcctaattaattcatatgctaacttatttatttgtgcattccgggcaaaccagcagtaaaggtaaaactttagcaaaccagcagtaaaggtcaaacttcagcagtttcgtcagatgttttaatgaagtgctgaatttcctgctgcttggactagataaaatccacttgttactgcattttatgtgtgttgtatttagtgaatctagcacctttggttgttgataattattctttttctctacattaaattcacaggtcaattaacagaatatattaactgtctgataacagaaagcattttaaaagatgattttctttgttgatcaaatcagtttcaaataaatttgctgtttaaaaaaacagcagtaaatgtcttttctacttaggtggcagttaatttttttttggtttgtttttaacttcacatacagaaagtggaataagttattctcctctctagttcatggcataataatgtatgtttatgcagaaccctgcgaatgctttattttatgtatttttcctttcactttgaacaatcataatgcccttgctggaatatttaatttctatcttcaaagtattattgaatatttgaaaacctttatagtgatactatgttgtgtatataattttagaccacataaaacacattttcttctaaattctatgttttaaacatcttgaccaattgtcatatatgcatataactcattgcttttactacttcatcatagtccaaagtgtataaatgcaatatatttttgtaaatgtatttctaaaatttatattgatgcataatgattgtacatattcctggggtacatgtgata

SEQ ID NO: 722442 - DNA, 621 bp, Homo sapiens
acatacaatgattagccaggcgtggtggtgggcacctgtaatcccagctacttgggaagctgaggcacgagaatcacttgaacctgggaggcgggggttgcagtgagccaagatcgtgccactggactccagcctgggaaacagagcgagactcactctgaaaaaaaaaaaaaaataggaagatatgtgaaggaaggtagggaaagaaggaaggagaatgagaagccaggaggagaagatcatccagacatccagagctggcagggaggaggggaagagttatattataaaatcctaggacctgaagtgaataatcccctccactccctattatttttatgtcagattttaagaaacaataccgcttttgttaaaaaggcatctacctcccagcactcgctggcacatggaagttcactactatatttcaccctgcagctgtctttcccatattagtacacaactttgattgcagaagcagctttttgtggatagagtgatgataacagtcaatacaaatttwatggtgaaatatatgcattttcctgatgcacctgtgctgcttgagtgctcacttgacatcataaacaccaaggaaacaaaggtattcttgtgtcattc

SEQ ID NO: 722443 - DNA, 1225 bp, Homo sapiens
ctaggtgctgaaatctttgtgacttcgtgactacttaaatgtgcatgcatgtaagcagtgccttagttttcttttttttttttttttttttttttttttaggcagagtctcgctctgtcacccaggctggagtgcagcggggccatctcggatcactgcaagctccgcctcccgggttcacgccattctcctgcctcagcctcctgagtagctgggactacaggcgcctgccaccatgcctggctaatttttttttttttttttttgkatttttttagtagagacggggtttcaccatgttagccaggatggtctcgatctcctgaccttgtgatccgcccgcctcggtctcccaaagtgctgggattacaggcatgaaccaccacgcccggccagcagtgccttagtttttaatgtttaaaatagtaatgattttaaatgtccattttatctcagtaaaatggtcatacttaatgaaagaatatatcaaacttatctagaaaatagttcaatataaatttacaataacatgtatatggcatctttacaattcgattgaatgtattcttaatttattttaactaattaattcactaattagacaggtaggcataaatattgactgctcatatcaaaatagtctattgttggcataaattgttatttactagataatgtttgtggttatttttaagcatttggctcaactaacttttgtgattagctgcatatgagatgtttaaagtatgttaatgcaaaaaggatagaaaataatttaaatatggcaaaacttctatttttttttaaattcagcctttcaacaacaacaaaaaactctttaatgccagcaacatgaaataacatacaaaattaaaatttttacaagaagctgctactttgcttggaaagatgaaatgttctccaagacagttttggttacatgttccagctacacagtagttagttcccattttactggataagttaaacacctttgccatgcctgttgggagttacatcactctaatgagaaaagaatattcctgttaagaagcaaaaagcatagattaaggcttttaaaaagtgctgattaaaaaataaagtcacttaaaatgtaaacaaaatgcctattaagcgcaaactggttagctttcatggcataatttaaagcccttatccagtattttctccctggttgcaggcaccctgtcaattcttgacaaac

SEQ ID NO: 722444 - DNA, 831 bp, Homo sapiens
cgtgcctcagcctcccagagtgccaggattacaacaggtgtgagccaccacacctggccaactttaagtttcttagttctatttaatgtaaaagacctacaacatagttataccactcaaatgacagagggaaattaactgttctcctacacactaccatgatttacttaaatatttaacacatttggggtggaacttagcacaatgcatccatagacacaaactcatgttattttgtagcaattgtggattaagcctttttatatcacatgaggtaagaactaccatatccattccaaaactgacaaacaatattttcttgaccagagtacttttaaatatctggagacatggtaaaatttacgttcagaaccaatgcggagaattgtttcataracatcacaaatcgttatgatgcacacagacagccaagactttggaaaaatcaaattacgatcattttctcttttgtttagaataacttaagttgaaactgttcaaaaaccattaggaattaccagtccaaatagaacaacaagaataacgcccaaaaatatcactatctttagtatcaggcatgaatacaaatggaaaagaaggatgatagtccacgtctgtatgctaaatggacagaggatatttgctacagccaacagataagttgataaatttgacttcagtaaaattaagaacttttcctctgtaaaagattcctcattaaagaggatgaaaagacaagctacgaactaggagaaaattattaacaaacctcatatccaacaacaaactagcacctaaaacataaaaaaactttaaaaactctgtaacagg

SEQ ID NO: 722445 - DNA, 599 bp, Homo sapiens
catttttgattattttaaatgataacaaaagcaacacacaaaaacacaaagaaggcaggtttctcttttgtggaagatgagaattctttctaataatcctttcttctatgtttactttaacacattttatcactttgattaaataggtatacaagtatagtttctcaggttcctgtgaccctgtctttattaaatgaccaaatctttttgacaactcttgcttttagcttcctaagatcagatcctaaattaaaactaaactaaaataaaaatttcatrttatctctcacagctaaaactatctttgagtcttcccaaaggacaccaagaaaatcacaaagattgattttatctattaaactggaaatgggttctagcaataactaggttggcttggcagactccttatgttttaattagctcaatatcgttgtaagagctacacaagaagtgtcaaatcaaatagtctcatttcctaggttaagtttattttttaaagtattaatattagtatttagaaattgtattctttggggaagggcttaaaaaatttgtttttaagtggtatctgattctccctatgtccttagaaattagaa

SEQ ID NO: 722446 - DNA, 1464 bp, Homo sapiens
ataaaaaatgaaaaaaatccaccaaactacattacgattacaggtaaatgacttcttcatagcaaaaagtgagtctagatctgaaattactgatagcaaggagaacgacagtttgtgtatatgaatacaygtttagacctcaaaaactcagaaagtccatcttcattttacaaatgaggaagcttgcccatagtttatgccttttaaatgtacagactttcagtagataggaaaacctcagtttttaagacaatagtaaattttaccacatgtatacgaaaatacatattataagcctaagataaacctctgcattgtacaagcaaaggaaacttggaccatccttctggattgctctagaaatctgccaggaattttcctcttggcattgctaaaggttttgtctaaagattttttcagtaatggaagatttctaacattgcaataccacacgcttttgggaagctcaggtaaggagggagacaaggagcagataatgaattctgaaaagttgtagtacgcttattaactaggagtgctgggagggggaatttcagacaaccgaaaaccccatagctcattaaaatgtagtacaaaattaatttaacataatttttttttttttttgatatggagtctcgctctgccgcccaggctggagtgcagtggtatgatctctgctcgctgcaacctctgtctcctaggttcaagagattctcttgcctcagcctcccaagtagctgggactacaggcctgcgctaccacgcttggctaatttttttgtatttttagtagagacgggatttcgccatgttggccaggctggtcttgaactcctgacctcaagtgatccgcccaccttggcctcccaaagtgctgggattacaggtgtgagccaccgtgcccggcgaacaaaagctttaacaacaaaatttactattctacttagtagctgagctctccttttcttcaatagcagaattgacccacgatgagcaaataaatgctcccctacttcctttccccatttcctccccttcccagagtcccaactgaggccaagaagctgctgaagccagaatctgacctgggtcacatacctgacagacagcaaatggtggtcctgttacaacggacattgtggtataattggtactctgggattctaaacaacatatgtcgctgttcatttgtggtccctaaatttttttttcagagatgatgtctcactatgttgtccaggctagtctccaattcctgggctcaagtaaacctctggcttcagcttcggagtagctaggactttggaatagcatgtaacactgtacccaaataaaaatgtttttaaacaaaaatgtaactttggggggggctatagtttatctgggatactagttatctgccccagtaaaaaaattttttagtgtaatatcctttagatccaatagagcaaaaagtcaccc

SEQ ID NO: 722447 - DNA, 596 bp, Homo sapiens
tattttagctttttttttttttttgataaggagttttagtcttgtttcccaggctggagtgcaatggcatgatctcagttcactgcaacctctgcctcctgggttcaagtgattctcctgcctcagcctcctgagtagctgggattacaggcttgcagcaccatgcctgggtcattttgtatttttagtagagacagggttttaccacattggccaggctggtctcgaactcctggcctcaaatgattggcctgccttggcctcccaaagtgctgggattacaggcatgagccaccatgctcagccagaatgttgctggctggtctcgagctcctgacctcaggtgatccgcccacctcagcctcccagaatgttaggattacaggcgtgagcaccacrcccagcctctattttagctctttagcttgttcagtgtattaattcataactcaatataaatatattttaaaaatgaatatatatttttcttcactcactactaaatctgagtgtataagaatctaaaacattttacttgtggttattttgttaaaacatagtgtaatggaatataaaaacttggcaaaaacaccttg

SEQ ID NO: 722448 - DNA, 1325 bp, Homo sapiens
tgaaggactgaaggagcctgagtctttttttttttttttttttttgagatagagtttcgctttgtcacctaggttggagtgcagtggcacgatctcagctcactcctacctctgcctcccgggttcaagcgattctcatgcttcagcctcctgaatagatgggattacaggcatgcgccaccatgcctggctaattttttgtatttttagtagagacggggtttcatcatgttggcaggctggtcttgaactccttacctcaagtgatccaccaaccctggcctccttaagtgctgggattacaggcttgagccgccgtggccagcagagcgtggctcttgatgaaagtcacttatctttttagtgccttagccagtttagaatgctggattagagccctggatgctgattcagtggtcttttgtactaccattaagctgcaggatgacaagcccttctgggactgatacagaaaatagtttctagtcctcaaagagagattattgtaagaaccttacttttaactccttcctttgctgggaggaaaagtaaaaagtaaaaattttttttctctgaagagacccttaacaggtcacatggacctgcacggttttatcatgtgcatctatgagagtgggatggaagatgctttatatagaaaatcttagaatacaggaaaacagtttttctaaaaaagcaataaggccatgttttttactttagctttaaaaactttttttattttatttttcagtagctacaaggttgtctttaaatattctttatagtaactaacaccctgtaggcatgaccagtaatagaaataatttcctcttttccttggctccactgatgcccactgcctcttctttgtgatcagttaaatgtacactttagatgattctaagctttgtaactstactctccttaagttttaaatcccattactgaaaagcgtatacagtttggctatcaacaacatgtgtttgtcctgtggaaatttttttcaataaatatattggtaaattttttggagattttctgcagtttgaaaaaacttgaactatgtaccctagaaatatttaaaaacattaaaaaggtatgtcatgaatgcttaaaatatttgtagatgctagcctgttttatcatttaccaacatgaaatgtacacaaaatgtgtgtgtacagactgtacacggcactatttgcagtcaagagaagtgcaaacataaaggtgcagtgttaaatcataactgcatggaattaactgtagtatatgccatactgctgtaataactttgtagctacctcctgttgcttttgcag

SEQ ID NO: 722449 - DNA, 580 bp, Homo sapiens
tgaaacaataatatgtaagccatggaaggaaaaacactccaaaaaactatacatgtaaaacattcaataaaataacatttttaagttataaaatactatgaaaatttccatctttgatatttctataagtacagttttgcattcaggtaatagcgctgattaaaaatcaaaagaaaacatattaccaagaattggacaaaatatttcattctaaaacaagtaatacatactataaaatgatgtccctatatggaaattacggtggtatctaaaattatgtggttgtcaccctagactaataaaaagtagtgaagtttagtggctaagagtaaagtcatatagacaggcttcctgggaataaatgtagacccagtcttttactaattgaatagtgattggcaagacagttatcattttcaactttataaagcagggataagaatagcaacgaattcagaggattattgtaagggttacaaaatagggtcagagtaacccatttaataaaaygtctgacctctaggaaatgtataaaacttttgctatttttttgaatacactaaatttcaatagcctttaa

SEQ ID NO: 722450 - DNA, 606 bp, Homo sapiens
gtctcagctcaaacagggagagtgaattcacctttcttctgtctctttgttcaagccttcaagggattggatgatggccaccttattggtgagggtaatcttctttgccttattctataaattcaaatgctaatcttttctctaagcatcctcagacgtaacagaygcacccagaaatgttttaccagctatctggctatttagcttataatacacacacacacacacacacacacacacacacacacacatccacacacgaatttagggagaaacaatttgctttagggttccccagataacatatgtttttatataccatatttgttctgtttctctggggaaccataatacaaattgtttcccccaaaatttatatgttgaagtcctaatccccattacctcaaaatgtgaccttcaggccgggtgcggtggctcacgcctgtaatcccagcactttgggaagccgaggcagatggataacttgaggtcacgagttcaagaccagcccggccaacatggtgaaaccccacctctactaaaaatacaaaagttagccgggcgcagtggctcacgccttgtaatcccagcactttgggaggccaa

SEQ ID NO: 722451 - DNA, 1466 bp, Homo sapiens
tgcaattctcccaatcagaataaaccagcctctaatccatggactcagaatgaatgaatggtctactgccacccttgtcacaggggaccaaggttagtgttagctatctaccttctccattagcaagtgattatttcaaggctattgtatttcttgctgaacacagtgcttaaacatagtagacatgatcagcaaatgttagttctttcccctcttatttttgttgaatggttgaatctaactcttcaaatctaaaaatgaatatatagtatttttacaatattataaaataagaatattcttttaaaaatttggatgtcgaaggaaaataccatggaaattaaaagaattttaaattaattattaataaaatctttcatctatttccaaaggatakgaggccaagaaaacatatttcattttgtacagcttgtaacaaaagccaaaatttaccaaaatactgatttatttaagtaaaaagcaaaatatttagaacaagaatttctttagtaactaaaatcatattaatgccaaatgaaagcctggattccacttttcatacaaattgtcgtttctggtttcctgtctgtaaaatcaagatgggcaagtgtgatccgtgtctgaaatgcctttgtggtgtcagtgataaggtgaactctggcataatcagtgtagttcccagagtaaagactttgaggataccatgactagttataacaaatctgttgtttagacaggtaccgcttcattttatctgtctatcccaagcgacttaaagctttgctattctatactccctcagtctcagccctgtcatccagtataatggcgtagttaaatgaattgtacttggaaatgtttttactttagtcaaggtcgtgcaggttttaacatctcacagccaattcttgatacgccactcacaggtgtatgatacccttaatagcagtgattcttggatgaaaaggagttgacaggtgattattgatgaggggaggtttagtttagttcttgtgaacttaaatagtcatttttgttttaaactgaggagctgaggagctaagaaccatatttataaaaacaaatttacaaaactattggaattattggaatgccattttctttactaaatctgatttttaaaatatctctttcctgatgcaaaaaaaaaaaatgctgaagacattttctcttatccttagcaaccttggagaatccacctgcaacattcctcagagaagctgcaacattactttaaaagaagttacagcagtgcatactattgttgctttcctacaatgtagcaaacagaaactttggttccagaatgttcctgaatataacacagtaaaatttcttgataggagtgcttcacaaaagatgtcattgaagatacccagtttggaagttaaggcattggctctgacattacttttgccccatctaagcttagtttggtagagtca

SEQ ID NO: 722452 - DNA, 1466 bp, Homo sapiens
tgcaattctcccaatcagaataaaccagcctctaatccatggactcagaatgaatgaatggtctactgccacccttgtcacaggggaccaaggttagtgttagctatctaccttctccattagcaagtgattatttcaaggctattgtatttcttgctgaacacagtgcttaaacatagtagacatgatcagcaaatgttagttctttcccctcttatttttgttgaatggttgaatctaactcttcaaatctaaaaatgaatatatagtatttttacaatattataaaataagaatattcttttaaaaatttggatgtcgaaggaaaataccatggaaattaaaagaattttaaattaattattaataaaatctttcatctatttccaaaggataggaggccaagaaaacatatttcattttgtacagcttgtaacaaaagccaaaatttaccaaaatactgatttatttaagtaaaaagcaaaatatttagaacaagaatttctttagtaactaaaatcatattaatgccaaatgaaagcctggattccacttttcatacaaattgtcgtttctggtttcctgtctgtaaaatcaagatgggcaagtgtgatccgtgtctgaaatgcctttgtggygtcagtgataaggtgaactctggcataatcagtgtagttcccagagtaaagactttgaggataccatgactagttataacaaatctgttgtttagacaggtaccgcttcattttatctgtctatcccaagcgacttaaagctttgctattctatactccctcagtctcagccctgtcatccagtataatggcgtagttaaatgaattgtacttggaaatgtttttactttagtcaaggtcgtgcaggttttaacatctcacagccaattcttgatacgccactcacaggtgtatgatacccttaatagcagtgattcttggatgaaaaggagttgacaggtgattattgatgaggggaggtttagtttagttcttgtgaacttaaatagtcatttttgttttaaactgaggagctgaggagctaagaaccatatttataaaaacaaatttacaaaactattggaattattggaatgccattttctttactaaatctgatttttaaaatatctctttcctgatgcaaaaaaaaaaaatgctgaagacattttctcttatccttagcaaccttggagaatccacctgcaacattcctcagagaagctgcaacattactttaaaagaagttacagcagtgcatactattgttgctttcctacaatgtagcaaacagaaactttggttccagaatgttcctgaatataacacagtaaaatttcttgataggagtgcttcacaaaagatgtcattgaagatacccagtttggaagttaaggcattggctctgacattacttttgccccatctaagcttagtttggtagagtca

SEQ ID NO: 722453 - DNA, 1944 bp, Homo sapiens
cataacttctgtccctattggagaagacttcaaaatcccaatcataatacaatttggcatccccatttatggtccagtgaccaaagttttagactatagcttgatggccatttcattattctttattacttacacaagagtgtttttcatcttatggttggtatgtctgtgttttatgaaatgcactgcaatatcttaggtacaagggaatctgcctattaaggaagacttgatgattggtacatagaactgaagacaagtttgccgtggttgcctgcttcacagcttgagtttttccctgcacaaattgtaaccaactccagatcctcatggtctgagaagcatgaaaatgaagaataaagagcttttattttcacaaacttgcttcacacacacatttctctgcttcacacccctaccccatccttctagcatctgtattctctggtaattataggaatggtggggctgagttataatcccttgttattacaagaagggcctctaaaccagggtttgatttcctcactggaaataatggtatatrttatgtttcaaggatgtcatttaaactcgtaataacatttaccatagaaacaaaaatcggcatatattttcacattgagtacaatgtatgctatctatttgctaaaaaggaaatacattggatccaacttttatgtggagaaaatagattgtattatttcttagttttcatatgaaagaaataatattcatagtaatattagctagtgtgacagtgacttttagctctagacattagatgggttttgaatcctgactttgtctcttactacctaggtgtgcactggcaacttttttaacttccctgtgcctctaaaaaaggcagagatggtacatctcttaaagagtggtggttttcgagaattgaatgagataaaagtactaagtatgtattaactacttaatgaattctactattagtaatataaccctcagtactgttcccactgctattactattaatattgttattattacatcccattactcaacacccttcaggtttttcatcgctccatccccaccctattctgcttttttgactgttgtccttatgttttccaaatattccaaaatattttgatcctatagttcatcctggaaatgtcttctttcacacctattgacatcctattcatcttttaaatgccagctcaaatgaaccctctcactaaaccttcatcagtcttgccagttaaaatcaatccttcccacagctgtgctttcaaatccttagattttcacctttattacagcacttcaattctgtcttatcttatgattgtttacaactttgttcctctttctctctctttcttctctctcttgttcttatccctcttccttatattgcaaagtatttgaaacactttcttacttatctttatccagtccccctacatacagtcccttccggtaagcacacgagttttctatatgatcaccattctgttaatacttgttgaattaacattgtcattcagcattgtttagtagcaaagatttccattctttgctagaaaaatgaaaattaatggttatactgatagttctgaggtaattgaagagactgaaatgttctctaaataatcaaatcagagtcagcatattttagaattgtgtttttttgtttgtgtgtttttttgttttttgtttgtttgtttgtttgcttgtttgtcatagtctgttcttttgctttttgtcatccaagaaaacctatatgatattttcatttcctatacatctccatggttcttagcttagatgttttcattggataaaccatttgcaagggaaaattgcaataaacagtaataagaacaataacaataatattaaaaatgtccggccttaattgagctcttactatttgccatatactggccaaacacttcgcaa

SEQ ID NO: 722454 - DNA, 583 bp, Homo sapiens
tcacatttggatcaaggtggtttctggtgttttttttttaaacatcttgaaagatcaagatttaccactattgtgagcattcagaagaatgtcacacattctgttttcaacagtggggacacaaatcagtgtctggcctgctgccactgcagcccatgaggaccaggcyaaaggagccagggagccagggaatgctggtggccttactcgccccattcctctgagctccggggcagaaagactgaacctacctacagcttcagcctaccctcctgaatgctgaaaggcagtgaagagctaaactgcatatcagttgcctgggggacatagttgggcatgaaaactcaaatgttcgccaaagctaggtagggaaagttccagaatgcagaatgctagagaaagcaataaagaaagagcccagtacctcattagagccttgcaaacactcaggcctaatggttgccagaatctttaattatccaagagacttaaaaacctggatttttaaaaataataatcttctgattatctaatgtgggcaaaaaaaagttaaaattctaaacagaagtacaaaaatgcataa

SEQ ID NO: 722455 - DNA, 583 bp, Homo sapiens
tcacatttggatcaaggtggtttctggtgttttttttttaaacatcttgaaagatcaagatttaccactattgtgagcattcagaagaatgtcacacattctgttttcaacagtggggacacaaatcagtgtctggcctgctgccactgcagcccatgaggaccaggccaaaggagccagggagccagggaatgctggtggccttrctcgccccattcctctgagctccggggcagaaagactgaacctacctacagcttcagcctaccctcctgaatgctgaaaggcagtgaagagctaaactgcatatcagttgcctgggggacatagttgggcatgaaaactcaaatgttcgccaaagctaggtagggaaagttccagaatgcagaatgctagagaaagcaataaagaaagagcccagtacctcattagagccttgcaaacactcaggcctaatggttgccagaatctttaattatccaagagacttaaaaacctggatttttaaaaataataatcttctgattatctaatgtgggcaaaaaaaagttaaaattctaaacagaagtacaaaaatgcataa

SEQ ID NO: 722456 - DNA, 583 bp, Homo sapiens
tcacatttggatcaaggtggtttctggtgttttttttttaaacatcttgaaagatcaagatttaccactattgtgagcattcagaagaatgtcacacattctgttttcaacagtggggacacaaatcagtgtctggcctgctgccactgcagcccatgaggaccaggccaaaggagccagggagccagggaatgctggtggccttactcgccccattcctctgagctccggggcagaaagactgaacctacctacagcttcagcctaccctcctgaatgctgaaaggcagtgaagagctaaactgcatatcagttgcctgggggacatagttgggcatgaaaactcaaatgttygccaaagctaggtagggaaagttccagaatgcagaatgctagagaaagcaataaagaaagagcccagtacctcattagagccttgcaaacactcaggcctaatggttgccagaatctttaattatccaagagacttaaaaacctggatttttaaaaataataatcttctgattatctaatgtgggcaaaaaaaagttaaaattctaaacagaagtacaaaaatgcataa

SEQ ID NO: 722457 - DNA, 583 bp, Homo sapiens
tcacatttggatcaaggtggtttctggtgttttttttttaaacatcttgaaagatcaagatttaccactattgtgagcattcagaagaatgtcacacattctgttttcaacagtggggacacaaatcagtgtctggcctgctgccactgcagcccatgaggaccaggccaaaggagccagggagccagggaatgctggtggccttactcgccccattcctctgagctccggggcagaaagactgaacctacctacagcttcagcctaccctcctgaatgctgaaaggcagtgaagagctaaactgcatatcagttgcctgggggacatagttgggcatgaaaactcaaatgttcgccaaagctaggtagggaaagttccagaatgsagaatgctagagaaagcaataaagaaagagcccagtacctcattagagccttgcaaacactcaggcctaatggttgccagaatctttaattatccaagagacttaaaaacctggatttttaaaaataataatcttctgattatctaatgtgggcaaaaaaaagttaaaattctaaacagaagtacaaaaatgcataa

SEQ ID NO: 722458 - DNA, 636 bp, Homo sapiens
catgcactaataaaaataaaaggaaaagattaaaaaaaggaaaaaaaatccaaaataaaagacctatgaaacactttaagctctcctgttaagactgatttgacgttctaacaggatgcatacttagctacatattacacaatatcctcacacctattttatttttataagcatcttgtttgaataaggtgtatttaaaacaagttttttttttaagctttggaaactacccatattgggtaggcagtctttaagacagcccctgaagattctgtgtcyctcgtacatttttttcttacactgcaccaagattggtctatatgaacaataggaaacagcagaaagaatagtttttcacttccaaaatcaggttatgaaagatgctgtgacttctgtttctgtctctctctttctctctgtcacttgctttaggggaaaccagcttttgtatgtcgtgaggatattcagacatcgatgtggagagcttcacaaggcctataattaaagcgtgcccaacagtctgtggacaaccatgcgatcctctgaccttcagatgaccacagcccctgctggtagcttgaccataagttcatgagagaccttgaaccctggctgagctgctcctggattgctgac

SEQ ID NO: 722459 - DNA, 591 bp, Homo sapiens
acatactcacacgcacagataactgaaaccactgatagacctgctgtgtttagtgctatacaatgctatatttcctatctgtcatttttttaaatacacatttactggacattgagttgtttttcccctaaccggtgggacttttgttatatccatagctataacatcattctttcatctccaatgtggaatttatacttttatttgatttcatgttttctgtttgggacctcattattttctttttcagatgtgcatttaaggaaacttcaggcactctcatagtattatagtttttaatattattggattggcttaaaaatgaccaaaaaaaamcctagagatacaattagatagttcatgaaatcatatgtttcatgaacaaaactatagagccggtctattcagccaccctctagcatttgctagaagtttctctccctgtggccttcaatagaaacaaatgtatgtctttgtaacatccacaagagtgaaattaggcaaatttaaagtttttcttccttgtttacaaaacctaaaacttgccaagttttttcaaaattaaattaaactctttgaggttgtagaagc

SEQ ID NO: 722460 - DNA, 674 bp, Homo sapiens
ttgccagtgagtgcaagaggactgagcattgaaatgttttaggctctatgaattctgagaagtcagaaactaaagttcccttctaagacaaaatcctgctttggagaaaaaaaaaaattatcggagtaaagtctaagctgagttgaaaaaaaaaggtgaaaaggaaagaggtcaaaataaaaatgaagaggaagatgggacgggatacagagtaggcagatctcagaaaatctgactatatttgtatcactctgtgaacamaccagatgggcatcctgggagccatgaagctagaagaaatcctggctcactcatttcacttgaaaatgaccaacagaaaagaaaaagcagttgaatcccatacaatgtttcatgaaaaaagagattaagatcagactgacttccccatgaataatgaatgcctatcaaaaaggcccacaaaacaggtgaaaactgtagcctaacatttcaaaataagctaaatgaaattaaggaaataatggaagttatgaagatcaatgtaaatcacaatttgaaaaaatcaacttgagatgtgtagaaaatagaatgacttgaaaagagatgagatggaactcaaggaatttagaaataaaagattaaaatagattagaattaaaaactatgctagaagcaacacaagagtaaataaatat

SEQ ID NO: 722461 - DNA, 826 bp, Homo sapiens
tcgcttggtggattacagacagctcccaaaacagtgccacttggagagtgggggctgggttggcttttataggcctaggctaatgagtcatgatatgattggatcttgtagtcaggtgatgccaggaggtgtgatctgactggatgctgcaatggggtgatgccagggctcaatctgattggatcctggatcctggtgggctgtgtctgyttcttaatttagtccccatgccccgatcctagcacttaggatccccctgtgggtgcaggcttggttcgtctggacgtgctcaggttacataatctgagggttccaggcaactgataaactaacgactttgttacataaaagttgaagcaggccgggcgcggtggctcatgcctgtaatcccagcactttgggaggccgagacgggcggatcacgaggtcaggagatcgagaccatcctggctaacacggtgaaaccccatctctactaaaaatacaaaaaattagccggcctggtggcacacacttgtagacccagctactcagaaggctgaggcaggagaatggcgtgaacccaggaggcggagcttgcagtgagccgagattgagccactgcactccagcctgggcaacagagcgagactctgtctcaaaaaaaaaaaaaaaaaaaagttgaaccagattggtctagtgcagctacaggcgcggtggctcacgcctgtaatcccaggactttgggaggctgaggcaggcgatcctaatggtgtatccccactttgagaactacttaactagaagaagccaaagtcacgaatacatcccctaatgcaaagcctca

SEQ ID NO: 722462 - DNA, 602 bp, Homo sapiens
taaccagaatgtgcaccaaactcacctgaagaggttttgcagaaaaggagcctgtatcctcctcactgcccccaccaaataccagttctcctgcctgaagtgcagcctcagcatctgtatmagcagcacacacatgcgcacaacagtccaatggagtcccctgcaaacctacctaaacctcactaggcaaataggaaataatagtggtggtcacctcttcatctgtcaaacaacctggaaaatgtgaagattcctcttcattgttgcattggcctttattaccttgagcacaaagggatttttctcctactggatatgaccttaatgctgcttggcaggaatgaataacactccagataatggcactggcttcttcaaggtatagtgacaaaaaatgaaaaatacccagcccagatcctacctggggctgaagctctggatacaacttttgccatcttcaagagagaagcagccattgaacaccgactgtccccggatgtatctttcttttctgatgctaaaatagccccccagcaggacagggaaggtgaagaaaagatgtattctctagttttcccaagttaattatacttgctcagaaa

SEQ ID NO: 722463 - DNA, 602 bp, Homo sapiens
taaccagaatgtgcaccaaactcacctgaagaggttttgcagaaaaggagcctgtatcctcctcactgcccccaccaaataccagttctcctgcctgaagtgcagcctcagcatctgtataagcagcacacacatgcgcacaacagtccaatggagtcccctgcaaacctmcctaaacctcactaggcaaataggaaataatagtggtggtcacctcttcatctgtcaaacaacctggaaaatgtgaagattcctcttcattgttgcattggcctttattaccttgagcacaaagggatttttctcctactggatatgaccttaatgctgcttggcaggaatgaataacactccagataatggcactggcttcttcaaggtatagtgacaaaaaatgaaaaatacccagcccagatcctacctggggctgaagctctggatacaacttttgccatcttcaagagagaagcagccattgaacaccgactgtccccggatgtatctttcttttctgatgctaaaatagccccccagcaggacagggaaggtgaagaaaagatgtattctctagttttcccaagttaattatacttgctcagaaa

SEQ ID NO: 722464 - DNA, 746 bp, Homo sapiens
tttttaagagctcactggttcccttattaattaatgagtttaataaagtcttggacacatgttgattgattttgtctgagaatcacaatttgaccatttaaaaattatatggtgaccactcccagtagaaatgctggttgggtggttggctttttgaacctagagtcctgacccaggccaggttgaggtacacaggggagagttgtccacatacaaggggtatgtatagccacaagatggaacgattggaggaaccagccctatgatccttgccttatctcatctaactttcasaactgtccacgagagtaaacatgtttcttattaaaattatctccattttacagatgaggaaactgaagcagggaggctgagtaacttgacagagtccacagagccagaactcgaacccaggcagttggctagagaaccttcacttgaaaccagtagtcctcaatctggggacactgggcaatgctggagacatttgtgatggtcacaactggagggggaaaaggcagatatgacagcatctaatgtgtaaggccagggatgctgcctagtgctctacggcacacaggactgccccctacagcactgaattgctgagccccaaatgtcagtagcatggacatgcagaaactctgacctcagccgtgacactgccaccctccagaccaggtggcctcctcttccacacgtttccacagcccttctcacacctgcagggatttacttgctagtaa

SEQ ID NO: 722465 - DNA, 1158 bp, Homo sapiens
gccataggtaagatgcttcctccatcctgctcaaagccctcccacccttcaccaccaccaaacaccatmtctgctcctcatgtggaatctagggccctccacaattgaaagtcagccttccagaagtgcctcctgtgatgctggtgcacagacccctgggccctttctgtttgctgttcaagtctcgagactgcctgtgccctcccgcagctgtgctcttgccgctgccgttctcaccacccgatagctccttcccagactttcaggccgtcaaaatcctcaccttcctttaaaattctctggttcacatcagctttgtaagtatatcctgagcaagtattaagtgatcttgatgatttttttgagtcttccagctatgcctttgaacacgttttcctgtctctatctttttcatcttgaaaatccacattcgctgctgccttttttctgatcacctgttcggtccttacctcctttccatctggcttcctctgtctatcgattgctctcacaaggtctctgctcagccactaattgccacaagttccaggaagaggcagagccggggccaggccaggaggcagaagccactcgggggactggggggccatgccgggggcagtttggtccaacaaagaagcgcttgaaggaaaataatggaaaatcagttctgaaaggtagattgagataagtagagctgtataaacgttgtgacatagataattgtgaataatattccactgtctagccctagaacaatttgactgtccagtggaaaaaccttaccagcaaggtggtttcttgaagaaaaggaagtttgccacacagaaagctccaactggttctaagcaaagggtagcacctgcaccaagtatcagggcatgaacctgcctcctgggttgtcccggccttaatcgtacttcattttgatcagatggcttgcagggttgctgctcacagcctatttctactatctatacgtccacatttgaaagccacctccaagcacacaccgtgcacgccctgtggagaggaagcatttgcatttctacccctcagataactgctgctgcccagttcatgtttcaagtatgagttccttcattctatcaccaggcttaagatccctttggtagatgaactggatgtttacatcca

SEQ ID NO: 722466 - DNA, 1158 bp, Homo sapiens
gccataggtaagatgcttcctccatcctgctcaaagccctcccacccttcaccaccaccaaacaccatctctgctcctcatgtggaatctagggccctccacaattgaaagtcagccttcmagaagtgcctcctgtgatgctggtgcacagacccctgggccctttctgtttgctgttcaagtctcgagactgcctgtgccctcccgcagctgtgctcttgccgctgccgttctcaccacccgatagctccttcccagactttcaggccgtcaaaatcctcaccttcctttaaaattctctggttcacatcagctttgtaagtatatcctgagcaagtattaagtgatcttgatgatttttttgagtcttccagctatgcctttgaacacgttttcctgtctctatctttttcatcttgaaaatccacattcgctgctgccttttttctgatcacctgttcggtccttacctcctttccatctggcttcctctgtctatcgattgctctcacaaggtctctgctcagccactaattgccacaagttccaggaagaggcagagccggggccaggccaggaggcagaagccactcgggggactggggggccatgccgggggcagtttggtccaacaaagaagcgcttgaaggaaaataatggaaaatcagttctgaaaggtagattgagataagtagagctgtataaacgttgtgacatagataattgtgaataatattccactgtctagccctagaacaatttgactgtccagtggaaaaaccttaccagcaaggtggtttcttgaagaaaaggaagtttgccacacagaaagctccaactggttctaagcaaagggtagcacctgcaccaagtatcagggcatgaacctgcctcctgggttgtcccggccttaatcgtacttcattttgatcagatggcttgcagggttgctgctcacagcctatttctactatctatacgtccacatttgaaagccacctccaagcacacaccgtgcacgccctgtggagaggaagcatttgcatttctacccctcagataactgctgctgcccagttcatgtttcaagtatgagttccttcattctatcaccaggcttaagatccctttggtagatgaactggatgtttacatcca

SEQ ID NO: 722467 - DNA, 606 bp, Homo sapiens
  misc_feature 77, 450, 451: n = A,T,C or G
gaccgtattgaaaggttttaagtgggaggggacgtgattggcttgtgctgtaggaagatcactctggtcacccagtnggcagtggagctgagaagggggagactgaggcagggagacatcatttggtgkaggagtttgaagcattcattgctcccacataccagagtcctgggatccttagacatcctcagagctccctccaggtgctcttctccacaattacccagaggattgaatcaagctgagagttctcagctctcttttctcgagacagctgctcatcctttgtttggaaccctgggcctgtgccgatttgcccagtagctttcacgaacggctttcacataaagccagacttgtgctttctaaacagttgaccctgtgtgagggccgtgaccttgcagaatacaaaacaggagaggttagatctaagtcctccactgagtgctnncctgcatcctgcccccagggaggctgtggtctacccaagagcagatgtagaaaccccaattcgaccaggaggctgaatggagccactttgtcccatgctccccactgctgtccttcctccccagaggcaggaacgaggctgcctcatccagagct

SEQ ID NO: 722468 - DNA, 1287 bp, Homo sapiens
cagtgtgaaggaaccacagaaacagtatgccaagtgaaagaagccagacacaaaagggcacatatgatatggttacatttatgtgaaatgtccagaagaggcaaagcagattagtgattgccaggggcgggaggaaggggaaatggggagtgactgcctagtaagttatggaatctcctttagggaagatgaaaacattttgaaactagacagaggtgatggttgtacagctttgggaatgtactaaatgccaccggattgtctattttaaatgactcattttatgttttgtgaatttcacctcaattacaaaaaaaaaaaaaaaaaaagacccttgcagatgggaagactcaagagggcaagtctaaaccaccagggccacgtatggctaagtgagcatgtttcggagcactggggcccagggaggggagggtcacagtggcaaaaatggcacctgtcggaagaaactgcacttactgcatacggggtgtatgtatgcaaatgggagtgtacatatctatgcaaaatactagccattatcattagagtaggatacataatgataagcgtacagttggccctcgaacaacacaggcttgaacgttgaggatccatttatacatggattttcttcctcctctgctaccccagagtcagcaagacccacccctcctctcctcctcagcctactccgtgtgaagatgacaaggatgaagacctttatgatgatccacttccacttaatgaacagtaaatatattttctcttccttatggttttcttcataacagtttcttttttctaacatgttttattgtaagaatacagtatctaatacataaaacatatacaatatgtattattaactgtttatgttatccrtaaggcttccagtcaacagtaggctactatcagttcagtttttgaggagttaaaagttatacgcgggttttttactgtgtggggcattggtgtccctaactcctgtgttgttcagaggtcaactgtgaattttataacagaagataaccagcagttgaggacggccatggtaactgtcaaatgaatggttttaacattgggcttcaggaggtgtgtagcaaacagcacggggactcataatatctgttttgccattagccagctagctctcaagtgggataaaaaggagtaggcagcccgggtgcagtggctcatgcctgtaatcccagcactttgggaggccaaggcaggcagatcacgaggttaagagatcgagaccatcctggccaacatggtgaaacgcca

SEQ ID NO: 722469 - DNA, 614 bp, Homo sapiens
tgctaggattacaggcgtgagccacaaagattatttttttagccaaggcagatgatgcttgaggaaggagctgttgtcactaccaactgctcatgagaatgagggaaacccatctcattcgcttttccttactgggttttccagtrtgatttatttattttttcaattactaagtaagaaatacaagcatcctaactgtaatggtcccttttttttactatagcttcttcaaggtctggtgggtagttgtagtttattgctctccttggaggaacaggaaaggggttatattgtttgtaggtaagtggaaaccaaacattccatggggaggaaagtgaatagttgtttagggtcgtttgtatgtaaatccttgcatccattcattcatcggtccatgctctatccatgcttccatccatccacccacttcctggccagccttctcctctaactgacttccacatccaggagctcgccccagggttctcccttccctgtacacattctctctgtaaatgaccgctgccattttcatggctttccataaagtgatgccaagcctctctgttttacctctctggccctgacttctcttttgagcttcagaccccaca

SEQ ID NO: 722470 - DNA, 1717 bp, Homo sapiens
aatttcccacacctgcttgcatattcacatgcatatattcatttgatttagaaaacatttggaacaaatggtaagactttaatttaatcatagagaagcatatcatctaagcacttagagccatggctttaagtctaggttgataaaactcatcagaaatcctagcttagtatttctgttactgtttcctaagtgaagtctaatataagaatagacacttcaaaacatttgtcaactaagaaataacaatgactgtagaattttaaaaaggactaaatttggccaggtgtggtggctcatgcctgtaatcccagcactttgggaggccgaggcaggtggatcatctgaagtcaggagtttgagaccagcctgaacaacatggtgaaactctatctctgccaaaaaatacaaaacttagccaggcgtggtggtgtgtgcctgtagttccaggtactggggagcctgaagtgggaggattgcttgcaccagggatggggaggtttcagtgagccgagatcacaccactgcactccagtctgggtgacagtgtgagaacctgtctcaaaaacaaaagacctaaatttttataaacttatcaaaaaaccttcaataaatattaataaatgaatacatggtcttayggtatgttaaaaaaagaactctcagataaatgtaaaagcattttttcctatgtgtaagtattttcatggtcatgggagactcatttggcataaattattgagtttgatccttctactgaacttaattctttcctttcacctatttattctaattttcaaataaatagtgatgttaacagaatttaacactgaacgagtatatagtacctacatagattcaaccattacagttgttttatcacacattattcctcatttattcctctatttatcttggattttaaaattttttaagcaaactttttattttagaattgttttaaatttgcagataaattaaaaatatagtaccgtgctccaattaccccacagccagttttgttttgtgtaattaacatcttattacattattatggtatatttgtcctattgatgaatgtaatgatacattactatttactgaagttcatactttattcatattttccttgtttttacacaatgttcattgttctgttccagaaatccatccgtgataccacattgtacttacttgttatgtctttttaggttcctaatagacagtggattttttcaatactttgttttggatgatgttaacagtatttttacaatatctgtaatatgaatttgtttaacattttccccatgattataagactgaggatttagggtttggggaggaagaccacaaggattaagtgtcattcttttcatagcatatcaatatcaatactaacatgacttacccctgctgtgaacctctattgcctggctgaggaagtctgtgaccggttttgtcactgtcagtttactaaaggcgtcattctaggcagctcacacttaagagatagggaattatgctccatttccctgggggcagagtatctacataaatgacttaaaattattttgcataggatatcaatttttctcatttatttagcaatatactatttgtaggtgcttgatatatattttatactctgagctataatactaatttctttatgttgttgctcaaattgttccagctttagctgtagatgttattg

SEQ ID NO: 722471 - DNA, 1717 bp, Homo sapiens
aatttcccacacctgcttgcatattcacatgcatatattcatttgatttagaaaacatttggaacaaatggtaagactttaatttaatcatagagaagcatatcatctaagcacttagagccatggctttaagtctaggttgataaaactcatcagaaatcctagcttagtatttctgttactgtttcctaagtgaagtctaatataagaatagacacttcaaaacatttgtcaactaagaaataacaatgactgtagaattttaaaaaggactaaatttggccaggtgtggtggctcatgcctgtaatcccagcactttgggaggccgaggcaggtggatcatctgaagtcaggagtttgagaccagcctgaacaacatggtgaaactctatctctgccaaaaaatacaaaacttagccaggcgtggtggtgtgtgcctgtagttccaggtactggggagcctgaagtgggaggattgcttgcaccagggatggggaggtttcagtgagccgagatcacaccactgcactccagtctgggtgacagtgtgagaacctgtctcaaaaacaaaagacctaaatttttataaacttatcaaaaaaccttcaataaatattaataaatgaatacatggtcttatggtatgttaaaaaaagaactctcagataaatgtaaaagcattttttcctatgtgtaagtattttcatggtcatgggagactcatttggcataaattattgagtttgatccttctactgaacttaattctttcctttcacctatttattctaattttcaaataaatagtgatgttaacagaatttaacactgaacgagtatatagtacctacatagattcaaccattacagttgttttatcacacattattcctcatttattcctctatttatcttggattttaaaattttttaagcaaactttttatttyagaattgttttaaatttgcagataaattaaaaatatagtaccgtgctccaattaccccacagccagttttgttttgtgtaattaacatcttattacattattatggtatatttgtcctattgatgaatgtaatgatacattactatttactgaagttcatactttattcatattttccttgtttttacacaatgttcattgttctgttccagaaatccatccgtgataccacattgtacttacttgttatgtctttttaggttcctaatagacagtggattttttcaatactttgttttggatgatgttaacagtatttttacaatatctgtaatatgaatttgtttaacattttccccatgattataagactgaggatttagggtttggggaggaagaccacaaggattaagtgtcattcttttcatagcatatcaatatcaatactaacatgacttacccctgctgtgaacctctattgcctggctgaggaagtctgtgaccggttttgtcactgtcagtttactaaaggcgtcattctaggcagctcacacttaagagatagggaattatgctccatttccctgggggcagagtatctacataaatgacttaaaattattttgcataggatatcaatttttctcatttatttagcaatatactatttgtaggtgcttgatatatattttatactctgagctataatactaatttctttatgttgttgctcaaattgttccagctttagctgtagatgttattg

SEQ ID NO: 722472 - DNA, 827 bp, Homo sapiens
tttgagatggagtctcgctctgtcacccaggctggagtgcagtggctcaatctcggctcactgcaatctccgcctccgaggttcgtgattctcctgcctcagcctccttagtagctgggattacaggcaggcgccactgcacccagctaatttttgtatttttagtagagatgggggtttcaccatgttgcccaggctggccttgaactcctgacctcaggtgatccacccgccttggcctcccaaagtgctggggttacaggcgtaagcctccatgcccagccacacctggctaatttttgaaatttttttgtagacatgggggtctcactatgttgcccaggttggtctcgaactcctggaatcaagcagtcctcctgcctcggcctcccaaagcactgggattagaggcgtgaaccaccatgcccggcctcacaggattttgctgggggctgcatctctgcttggtttcctctccttccttgacccgcttctcttactccagcaccctctgagagcatggccttaatgcatcactcactcagaaatccgtgtgttgargtctgctgcccagcagctgccctgagacccatggtgtagttctggcaaatggagtctgggctggggcactcccccatcaggtggcaatagggacctgtttgttgggggtgagtggtggttacctttggctgccttttttttttttttttttgagacagggtctcactctgttgcccaggttggagtgcagctacaatcatagcttactgcagcctccaactccatggctcaagggatcctcccatctcagcctcctgagcagctca

SEQ ID NO: 722473 - DNA, 1831 bp, Homo sapiens
  misc_feature 4, 5, 6, 7, 8, 9, 10, 11, 12, 13, 14, 15, 16, 17, 18, 19,20, 21, 22, 23, 24, 25, 26, 27, 28, 29, 30, 31, 32, 33,34, 35, 36, 37, 38, 39, 40, 41, 42, 43, 44, 45, 46, 47,48, 49, 50, 51, 52, 53, 54, 55, 56, 57, 58, 59, 60, 61,62, 63: n = A,T,C or G
  misc_feature 64, 65, 66, 67, 68, 69, 70, 71, 72, 73, 74, 75, 76, 77, 78,79, 80, 81, 82, 83, 84, 85, 86, 87, 88, 89, 90, 91, 92,93, 94, 95, 96, 97, 98, 99, 100, 101, 102, 103: n = A,T,C or G
ggannnnnnnnnnnnnnnnnnnnnnnnnnnnnnnnnnnnnnnnnnnnnnnnnnnnnnnnnnnnnnnnnnnnnnnnnnnnnnnnnnnnnnnnnnnnnnnnnnnnaaaaatttagtttttcagacttatggaccaccaaactagcctcccaagcttcctcttctttgtttttgcagtgtacctaaaagcatctcccagaactaagtgttaatgaatcacagtttgggaaacactgatttttaccagagagactaaaaaagtatatgcctggctgttataatgcagtgatgacagagtaatacagccgcagaaaaagtgatcgcagaatccaaaaggcaccaccgccattctactaggttctcastcaaaatgcctgatgggtttcacgctatgtgccaactcggtgaattttcagcggctgcctggaatgctgtattgagagagagtctgcagtcacaaccaggtgccttacttgattagtaaagatcctcctgagcacagaagggacagctgtgacatcattcaagttcattctgagacctctgaagtgacattaagtcctaagcagatcctagaatcatcccaaagcttcccaagttgttttaaatctgaatcaggccagactaatttttaataattaaaagggtaataaagtgtttaagtgtgtagactccagagttaattaagagagacgtgggtttaattcttagttttttcactgattttatagcctgagcacatggtttaacctcactaaacctcagttttcccatccacaacatgagaataacagtccctacctcccatgattgatgtaagaattaaactgggtaacgtaatgcagttaatacacctgcaaacagcaggtgcaagaaatgttaagtttagctctacccattactaagggattcacttcacgacgttcacattacataactcctgtaatacacctatttgtccactgtattcatagccatagattacagtgaaatcaatcaaactggggccacaggaatgatttccctgaacccattaacaatgccaacatatgccatgctaagcaaatgacatagaggattacaaagcagtgttcaaaggaagtgtcactggcctttaagaagagagaatatactggccgggtgcggtggctcacgcctgtaatcccagcactttgggaggccgaggtgggcggatcacgaggtcaggagatcgagaccatactggctaacacggtgaaaccccatctctactaaaaatacaaaaattagctggcgttagcccgagtagtgggcgcctatagttccagctactcagaaggctaaggcaggagaatggtgtgaacctgggaggtggagcttgcagtgagccgagatggcgccactgcactccagcctgggcaacaaagcgagactccatctcaaaaaaaaaaaaaaaaaagaagacatagaatataaaaatctaactactgggtgattgtgttttgcaatacatagatctcatatgtatttttttcagatccttccatagaggaagtcaagaaacaatgaccagtccaatagcaacaagcctccctgacactctgaatgacttcttgaaatgccatttcccactttaaaaaaacaaacagggctcctcttggagaaatggttaattccagatataagcagaagacattcaaaatgagcctgaaacattttgttataccacatagcaagaaaacactcaaagaccacaagggttatgtccaaaggatgcaagagtcaactaaaaagggctcccactggccaaagatgggataacacaggcttcaaaaaaaatattaatcacaactta

SEQ ID NO: 722474 - DNA, 593 bp, Homo sapiens
tccaacaagatgcccaattgggtacatgaaaatcccggcccaaattaaacacctgtttccaggaacgctaggctcttgtctacatcccctaccgtccccggaaggcagataacccctcgggcctcgtgggttaggttcgagtccctacaagtaggaagaagtcgtcagggcccggcatgtggtcgcggcccaatctcaatttagggctgatcctgaccctcaaagccacccggaacgcgcgagaggggggacccgccattctcacaggggaccgggtggracggcgccgcgacccgccgcgcggcccctgtcgtgggggcggtctcccaccgtccgcgcaggcttcgttaaacccaccccgagtactcgccgccgcctgggctccggagcggggagacggatgcgaacggaaaggagcgtggcgggcgcccgcgagcagggagccaggagccgctcgcgcgcccctcacctgagagccgcggccaccacagccccacgcgcggcgctggcactcccgcggccctgaacgggctcccggcgccccgcgcttccggaggcggagagagcggaaagggaaaggaggggcggcgtgg

SEQ ID NO: 722475 - DNA, 593 bp, Homo sapiens
tccaacaagatgcccaattgggtacatgaaaatcccggcccaaattaaacacctgtttccaggaacgctaggctcttgtctacatcccctaccgtccccggaaggcagataacccctcgggcctcgtgggttaggttcgagtccctacaagtaggaagaagtcgtcagggcccggcatgtggtcgcggcccaatctcaatttagggctgatcctgaccctcaaagccacccggaacgcgcgagaggggggacccgccattctcacaggggaccgggtggarcggcgccgcgacccgccgcgcggcccctgtcgtgggggcggtctcccaccgtccgcgcaggcttcgttaaacccaccccgagtactcgccgccgcctgggctccggagcggggagacggatgcgaacggaaaggagcgtggcgggcgcccgcgagcagggagccaggagccgctcgcgcgcccctcacctgagagccgcggccaccacagccccacgcgcggcgctggcactcccgcggccctgaacgggctcccggcgccccgcgcttccggaggcggagagagcggaaagggaaaggaggggcggcgtgg

SEQ ID NO: 722476 - DNA, 666 bp, Homo sapiens
gacccatcttgatgtataaacccatagccagacaggacgtgcaaacaggtctcatggtgaatgcgatgctgtggaaaatgacatggagaatggctgtctctcagctagggaggagggtcttggtgtcctagtaaagaatgttcacgtcctggagttggtggttggtgttctatctaggcgatgagagaaggatgcttttcctaatgagcacctggtgggaatagagtctctctttgcacttcgctggaggaagaaatttctaccacttattttttcttcttgcttatagaatacacattgcagaaaaaggatgaagttgaccagtgaaaagttgcccaagaaccccttttatgcctctgtatctcagtatgctgctaaaaaccaaaaattyttccagtggaaaaaggaaaagactggtacaaatcctgatatttaagcttcccttggaaaacactttaacagttcattttgcatgctagagcaaacgagacaagaaataatgtgttttattgatttcaaggaagtggttaatcattagtccttttgagttttcccgcaagaatctgtgaaattgctcatttatctggtagcaaatcgtcagtgaggtctcacagatagttaggtcttgattttactctcaggacttaaggacatgcttctagaaaa

SEQ ID NO: 722477 - DNA, 624 bp, Homo sapiens
gggtggcctgggaagtagactgaggaatggctatgccagctgtcccctcaacttcagtaatgtagtttcggtttttcattgacttccccgggaagacttgaaaagggactgactgtctttcaccatttgttgactatttgggcagctgttcacctatatcccacttactctctcacttttcgatggcaccttcgtctatcctggcaacaaatgtttgctgagggctcatcgtgcgcctgttactctgasgatggcagagcaccatggctgagagcatgcttcctcagcgtggggcatgggttcagatatggctgcattgcttgttaactgtgtgtttaacttgggcacaaacacttgaccacttggtgcctttgggattactttaagatcataataaaaataattaaatatcttctgggtgcttctagggatggtatgaagaagcattagaacagtttgaagaaatcaaggagaaagaccatcaagcaacttaccagctaggagtgatgtactatgatgggctggggaccactctagacgctgtaagttaatgtcttggtcacagtggttaagatttcattgtcagtggattattggacacaattaaaattatttatattttaa

SEQ ID NO: 722478 - DNA, 623 bp, Homo sapiens
gaagcagctctctgcatctaagacagatcccgaaagggctgacagctagaagtgtctgctaaccayacaccccacacaccccacagctggacagcaagtttttccttgaaaggggaggatctttgtggtgcatctccttatctgccccactgccccagctgatgctatgtggagcagagatgagtttccctggggagtttttgttatacagcaatagtaactgtgatacaccaaaacttttccaagctataaaatgacaaaaaagtgaaaactctaatttaatttaggtatttatttatttgatctctgtgtgagtaaggattatttaggaatttattcgtttggtctccataaataatagaaagaatcaaaaagaaaaaatatcaaggaatagacaactctttagtgaaaaagtatcataaagtttgaacaacaaataagacaatatttataacaaaaaataggcaaagaatttttatcatatatgatatactcagacaaatcaataagttttagtacagaaataggcatgtcagaaaagagatatctatctctctatatagatagataatatacatataaaaactgctcaatcttgtgaatacataaaggaatacaagtta

SEQ ID NO: 722479 - DNA, 652 bp, Homo sapiens
gagtgcatttattttacagcccctaatatttttaatgtgctttgtaatgcacaaaacatatttatatagaagagaatatgtttaattattaattgattcattcaacaaatattaaaggactactttgggctagatatagtcctccatactgatggtacagtggaraacaagataggaaaaatctctgccctcatggagcttgcagtctagttggcataccagtcaataaataaatatattgcataaggataaacagtaacatgtgctgtaaaaaagaaagcaagagacagaaaatgttggtaaaggggcttatttatattggctgaatggggaaagcctctttgaggaggtcatagcggaaccgagacctaaagagtaacccagggagcttaactttttaaaaaaattatactttaaattccggggtacatgtgcagaacatgcaggtttgttacataggtatacatgtgccaggatggtttgctgcacccattaacctgtgatctacattaggtatttctcccagtgctaaccctccttagccccccaacccctgacaggccctggtgtgtgatgttcccctccttatgtctatgtattctctttgttcagctcccacttatgagtgagaacatgaggtgtttggttttct

SEQ ID NO: 722480 - DNA, 652 bp, Homo sapiens
gagtgcatttattttacagcccctaatatttttaatgtgctttgtaatgcacaaaacatatttatatagaagagaatatgtttaattattaattgattcattcaacaaatattaaaggactactttgggctagatatagtcctccatactgatggtacagtggagaacaagataggaaaaatctctgccctcatggagcttgcagtctagttggcataccagtcaataaataaatatattgcataaggataaacagtaacatgtgctgtaaaaaagaaagcaagagacagaaaatgttggtaaaggggcttatttatattggctgaatggggaaagcctctttgaggaggtcatagcggaaccgagacctaaagagtaacccagggagcttaactttttaaaaaaattatactttaaattccggggtacatgtgcagaacatgcaggtttgttacataggtatacatgtgccaggatggtttgctgcacccattaacctgtgatctacattaggtatttctcccagtgctaaccctccttagccccccaacccctgacargccctggtgtgtgatgttcccctccttatgtctatgtattctctttgttcagctcccacttatgagtgagaacatgaggtgtttggttttct

SEQ ID NO: 722481 - DNA, 655 bp, Homo sapiens
tttggcaatgtccagtggacatatttttgtgtgtcatgactcggggagggagctattggcatccagcaggcagagcgagggatgcaaagcatgctgccgtgcacaatacagccctcacagcaaagatcartgagatgccaaatgtcactgatgtggctgtggagaaacctggctctgcaacaccccttcttgcctgcctggcgaattcacccagtaaccaactcactgcgtccattcttgctgcacctctgaccttccttcacagggcctttataaatgctaatttgaccatattaccattctgcttaaaatgctaatgatttcccagggctttcaagataaatctcaaaattctgaacgtggctcactagccttgcatggtgtgtcccctgccaaggtcactgtccagcctgtggtctcttctctagctgcctgtgcttcaggagtgctggtaactgcctccttcggttccctggctcccaccctccataggtccttggcgcttcctcttccttttgcctggcaggctctcactttcccttacctcccttcactctgctcctgcagctcctgcagattttagtgcagagaccttctcaccagggaggcctttctgcatttcccagactgactgggaacgcctagttgcagcact

SEQ ID NO: 722482 - DNA, 616 bp, Homo sapiens
gaacagaaccatgaggagctgaatagtagacagtttaattgagaaaccttatactcattgaggtctaaaaatagtatttgtttgtcttgtatctgctgcccactgttctctaaccccctccctgataagtaacagaaattctaattattcttgtatgtatctggttaataatcaatcaatcaaaaatattagtaatgtcatatgtactctttgatgttctaatccctttccttaatttccctattttgcagatgaggaagtttggrttaagaaacctgcccaggctcgcccgctagaaagtcatagaggcaaggtttgaaccctggcagtttgactttagagcccataaccattataaaaagctcattgagagaaaccattacttatgtaagatagctcttaatatatttagtatattcatttttcatcaagggcttttatctaacatacttgaataggcctcatgacttcataaaatccttgaatttgaaggagacttctatgtgtatacagttcagttcttgatatttgcagtagttgtgctttataaagtgaccatgaacacagaattagcaaatactgagtcattgctcctagaggaaatttagtgttattt

SEQ ID NO: 722483 - DNA, 616 bp, Homo sapiens
gaacagaaccatgaggagctgaatagtagacagtttaattgagaaaccttatactcattgaggtctaaaaatagtatttgtttgtcttgtatctgctgcccactgttctctaaccccctccctgataagtaacagaaattctaattattcttgtatgtatctggttaataatcaatcaatcaaaaatattagtaatgtcatatgtactctttgatgttctaatccctttccttaatttccctattttgcagatgaggaagtttggattaagaaacctgcccaggstcgcccgctagaaagtcatagaggcaaggtttgaaccctggcagtttgactttagagcccataaccattataaaaagctcattgagagaaaccattacttatgtaagatagctcttaatatatttagtatattcatttttcatcaagggcttttatctaacatacttgaataggcctcatgacttcataaaatccttgaatttgaaggagacttctatgtgtatacagttcagttcttgatatttgcagtagttgtgctttataaagtgaccatgaacacagaattagcaaatactgagtcattgctcctagaggaaatttagtgttattt

SEQ ID NO: 722484 - DNA, 1311 bp, Homo sapiens
ctattctgtgaagtgttctaatttgctagtgtttctgatgaaaattttagtgaacaaaatattctagataccatctaattggcatagagtccaatgaaactactgtaattacattactatgattttaaattatattatttcttgtggtaaatatagactagtgctggctcatttcaaggcccctgtgaattaaaagtgttaaagtacttttaaaattgctgtttgtttatatctcctttattcttgttgtcaactcttcggaaactaaatacagaagtttatgttgatgcctactacaattctacttgttgatttaagcctatgcttcagcaatttgaatctggattcaatcttcwaattcactagtattgttttttcagatttgtcatctgaaaattttatattcatattttcaatttgtttggtcatgtagtgtattaaaaatattgaacagaaagagccctgtgtcctaccactttcaatctatctctatgagacgggttatgcccatatttctcagtcatgtacaagtctacttcgattttattaaatgttttgatgaaatacaaaatgactagttacaattatgtttcttcggcacattatgtgaaagatacttagatctaaatccattaaatacttaaatttatttaattttcacaaccatcatatggggttggaactattagtatcctaatagctactagtgaattattatctttatagagacaaaggaatagagcagttaggcaacttgcccaaactcacacaggtagtacatggaagaactggaaatcagacttaagcagtcttattttaaagtcattattcttatacactgtgctatacagagtctgctacgaaatgtgtgatattcacctagtaacaccctactagcctttgtatctcctgatccccccaaataggttaattgattatgaccactattattaaacagttggatctgaactgacttctagacttcgtaagtacttctaatatatgttaattaattattaatatgaatgaaattttaaaaataaagtacacaagtacttctaatgaagttatatcaaatttaccagagttgtgtctaaaggataatgtttttgaagaccaggttgtcagccctctacaaccaacctctgttctgttctctacaattcctcaaatattttttgtgagtgactttgacccagcaaccccattactgggtatatacccaaaggattataaatcattctactataaagacacatgcatatgtatgcttattgcagcaccatttacaatagcaaagacttgggacca

SEQ ID NO: 722485 - DNA, 1285 bp, Homo sapiens
atggtgaggtgctgacgattctggtccactggatcccaccatccctaggacagtaaataccgtcctagtcactacccagcaagttaccaccgcatcatttcctgcatgttccaaaatgaataaaggtaattaagcataagtgcaaataaaaagtcatttctcatgtttttaatctaaactgtcacagtttagtttactattttaagttcttttcgtgctaaaacatttgtttttatttatttatttatttgagacrtagccttgctctgtcgcccaggctggagtgcagtggtgcaatctgggctcactgcaacctccgtctcccgggttcaattaattctcctgcctcagcctctagagtagctgaaactacaggcgcgtgccactacacctggctactttttgtatttttagaagaaacagggtttcaccgtgtttgccaggctggtctcacacttctgacctcaagtggtgcaccagcctcggcctcccaatgtgccgggattacgggcatgagcctccatgtccggccaatcatttgtttttttaaagtggcagccataggtcctgtccgtctggatatattttgaacttttgtatgttaaatataacactaaaaaactttattatgttttaggtaatctaagattggtgtatacaaacaaactttacagattactgtagggttcaggaaatgatgtatataatatgacatttatatctctagtttcttatgtataaatcttcctttagaaaagattggctttttaaaaaatgtctccacaaatttaggcttattttataaaatgtcacaacagtaaaaaaaaaaaaatactttttacctttctaaaaaagtaaaatactcttttgccatttcataaaataaacctgaatttgtcatactatataaatactggtactcaaataaaataccaactattttaatcaaaattatttagacagtctatttatataattttatgatttttaactacagtgatgggcattcacaaatctttcataaatcaaacatattagtattaggttttacttagtagttatatacgaaagatcgggccgggcacggtggctcatgctcgtaatcccagcactttgggaggccgaggcagatggatcacgaggtcaggagttcaagaccagcctggccaacatagtgaaaccccgtctctactaaaaatacaaaaaaaaaaaaaattagctgggcatggcagcgtgtacctgtaatctcagctactcaggaggctgaggcaggagaatcacttga

SEQ ID NO: 722486 - DNA, 1285 bp, Homo sapiens
atggtgaggtgctgacgattctggtccactggatcccaccatccctaggacagtaaataccgtcctagtcactacccagcaagttaccaccgcatcatttcctgcatgttccaaaatgaataaaggtaattaagcataagtgcaaataaaaagtcatttctcatgtttttaatctaaactgtcacagtttagtttactattttaagttcttttcgtgctaaaacatttgtttttatttatttatttatttgagacatagccttgctctgtcgcccaggctggagtgcagtggtgcaatctgggctcactgcaacctccgtctcccgggttcaattaattctcctgcctcagcctctagagtagctgaaactacaggcgcgtgccactacacctggctactttttgtatttttagaagaaacagggtttcaccgtgtttgccaggctggtctcacacttctgacctcaagtggtgcaccagcctcggcctcccaatgtgccgggattacgggcatgagcctccatgtccggccaatcatttgtttttttaaagtggcagccataggtcctgtccgtctggatatattttgaacttttgtatgttaaatataacactaaaaaactttattatgttttaggtaatctaagattggtgtatacaaacaaactttacagattactgtagggttcaggaaatgatgtatataatatgacatttatatctctagtttcttatgtataaatcttcctttagaaaagattggctttttaaaaaatgtctccacaaatttaggcttattttataaaatgtcacaacagtaaaaaaaaaaaaatactttttacctttctaaaaaagtaaaatactcttttgccatttcataaaataaacctgaatttgtcatactatataaatactggtactcaaataaaataccaactattttaatcaaaattatttagacagtctatttatataattttatgatttttaactacagtgatgggcattcacaaatctttcataaatcaaacatattagtattaggttttacttagtagttatatacgaaagatcgggccgggcacggtggctcatgctygtaatcccagcactttgggaggccgaggcagatggatcacgaggtcaggagttcaagaccagcctggccaacatagtgaaaccccgtctctactaaaaatacaaaaaaaaaaaaaattagctgggcatggcagcgtgtacctgtaatctcagctactcaggaggctgaggcaggagaatcacttga

SEQ ID NO: 722487 - DNA, 1045 bp, Homo sapiens
  misc_feature 697: n = A,T,C or G
agccagatcatggaaaccccaggcccacgagaagcatggaagtcaggaaaagattaaggccagagtggaagctaaagcccacgcagcatcaatcatccatcccactgccatgtggctccaggaatgtaagtccaaagggagagtgggccagaaaggcacagtttgtgctgcaatggtttcccgaatgttggcttcctccttcctctgaagcgggctatggtgtgcaaagcttgtgcaatgaagggaacgcgaggatggagttggaagcaccttctgtgacatctgtctgcacctctcctgaaggggaagtttccggaccctatccacacctcatcaggtcagccctgcctcaccagattttatcctcagccatatccgactttattgctgctcacactctctgacccggaatgaaatcccaagacaatggtggagtgccggcctcatgacctgaagctccttctcttttggtaatcgaattcgaagtggactcaaggggccctgcggacaggactcctatgctttggcccaggtttggcctcagataaatgaggccctgggaggtgtctgttcttgagtgtggtgtgctcctcttattttctagaagagtggctccgttgcagggaaaggtgatttggattcctgcgtatctcactcacccagccccgctcttcaccgcggttttaggaaccgcgangaaaacaaaaaacaggcagcctcacagcccaagcggcgccacacagaggscgacaaaaggtcgaccgactcgaaagaacaagcgttccagtgcgtgagctacatcctttcagcaggtgccacttacacgcacacacagaaacacacacgcagacatctaacactcgcaacactcccacagaaacacacagttcagcaacttctgaggccgcacggttctgctctgccagaaagcccctccggggagacagcagccctggggaacacaggcaggctgtacctagaaatcacagtggggcaaatttcaaggagactcacccccacaccgtctaggcaggcctgaagcatc

SEQ ID NO: 722488 - DNA, 1045 bp, Homo sapiens
  misc_feature 697: n = A,T,C or G
agccagatcatggaaaccccaggcccacgagaagcatggaagtcaggaaaagattaaggccagagtggaagctaaagcccacgcagcatcaatcatccatcccactgccatgtggctccaggaatgtaagtccaaagggagagtgggccagaaaggcacagtttgtgctgcaatggtttcccgaatgttggcttcctccttcctctgaagcgggctatggtgtgcaaagcttgtgcaatgaagggaacgcgaggatggagttggaagcaccttctgtgacatctgtctgcacctctcctgaaggggaagtttccggaccctatccacacctcatcaggtcagccctgcctcaccagattttatcctcagccatatccgactttattgctgctcacactctctgacccggaatgaaatcccaagacaatggtggagtgccggcctcatgacctgaagctccttctcttttggtaatcgaattcgaagtggactcaaggggccctgcggacaggactcctatgctttggcccaggtttggcctcagataaatgaggccctgggaggtgtctgttcttgagtgtggtgtgctcctcttattttctagaagagtggctccgttgcagggaaaggtgatttggattcctgcgtatctcactcacccagccccgctcttcaccgcggttttaggaaccgcgangaaaacaaaaaacaggcagcctcacagcccaagcggcgccacacagagggsgacaaaaggtcgaccgactcgaaagaacaagcgttccagtgcgtgagctacatcctttcagcaggtgccacttacacgcacacacagaaacacacacgcagacatctaacactcgcaacactcccacagaaacacacagttcagcaacttctgaggccgcacggttctgctctgccagaaagcccctccggggagacagcagccctggggaacacaggcaggctgtacctagaaatcacagtggggcaaatttcaaggagactcacccccacaccgtctaggcaggcctgaagcatc

SEQ ID NO: 722489 - DNA, 1045 bp, Homo sapiens
  misc_feature 697: n = A,T,C or G
agccagatcatggaaaccccaggcccacgagaagcatggaagtcaggaaaagattaaggccagagtggaagctaaagcccacgcagcatcaatcatccatcccactgccatgtggctccaggaatgtaagtccaaagggagagtgggccagaaaggcacagtttgtgctgcaatggtttcccgaatgttggcttcctccttcctctgaagcgggctatggtgtgcaaagcttgtgcaatgaagggaacgcgaggatggagttggaagcaccttctgtgacatctgtctgcacctctcctgaaggggaagtttccggaccctatccacacctcatcaggtcagccctgcctcaccagattttatcctcagccatatccgactttattgctgctcacactctctgacccggaatgaaatcccaagacaatggtggagtgccggcctcatgacctgaagctccttctcttttggtaatcgaattcgaagtggactcaaggggccctgcggacaggactcctatgctttggcccaggtttggcctcagataaatgaggccctgggaggtgtctgttcttgagtgtggtgtgctcctcttattttctagaagagtggctccgttgcagggaaaggtgatttggattcctgcgtatctcactcacccagccccgctcttcaccgcggttttaggaaccgcgangaaaacaaaaaacaggcagcctcacagcccaagcggcgccacacagagggcsacaaaaggtcgaccgactcgaaagaacaagcgttccagtgcgtgagctacatcctttcagcaggtgccacttacacgcacacacagaaacacacacgcagacatctaacactcgcaacactcccacagaaacacacagttcagcaacttctgaggccgcacggttctgctctgccagaaagcccctccggggagacagcagccctggggaacacaggcaggctgtacctagaaatcacagtggggcaaatttcaaggagactcacccccacaccgtctaggcaggcctgaagcatc

SEQ ID NO: 722490 - DNA, 843 bp, Homo sapiens
ttttacagttgcaagaacccctcattattttttgctgaaatgtctttgctatgctcttaataatcagcattttagatatgatttagacattgtatcaagtttttttaaaaaagcctgtaattttgatttgaattgctttcaatttataaatgaagtagaaaaatactgggttaactatcaactgtttccccatttttattatttatgatttgtaattttcttcagagaagttgtacatttattaaatttattccttattatattacattcttagtactattattaagaaaattttttacttttcaagtaactgctgaaatataaaaaggctatttatatatttacactttactgatagcaataatttttcaagtcatcttttaaaatattacctacaaatacagaaaattttgcttcctcctatctaaaagcactgcctttttccccttctgtgttaatatatttttaacagttttattgaggtataatttacataacacaaaattcacctaaatgtacaattcaataatttttagtaaaaaaatctagtggcccggcacggtggttcatgcctgaaatcccagcactttgggaggccgaggcgggcggatcacgaggtcaggagattgagaccatcctggctaacatggtgaaaccctgtctctgctaaaaatacaaaaattagccgggtatggtggcatatgcctgtagtcccagctactcaggaggctgaggcaggagaatcccttgaacccggaaggtggaggttgcagygagccgagatcgcaccactgcactccagcctgagcgacagagcaagattccgtctcaaaaaaaaaaaaa

SEQ ID NO: 722491 - DNA, 620 bp, Homo sapiens
tctcttacttggagaagtgtatccactttttagggaaaggaaatataaacttccatatttccatggaagtggtcaatatcacattacaagaagggcattgtgagatacacctaatgttaaatgacgagttaatgggtgcagcacaccaattgtggagtatgtattggcagacccatcttttaaaatgataatctacaacataaacatacatttattgcgtatgccaatttgagttaaattatttgttgtgtgcactaaaatacacaatttgcatcacacttacatatgttattttcatttaatgtgcacaacatctctaggataaaggaacttttagtacatgtatcagagttctccagagaatcacaacaaataggatgataagacggataactgatagatgatagatagatagatagatagatasatagatacatacatacatacatacatacatacatacatacatagacagatgatagatagatagatagacagatgatagatagatagatgtagattttacggaactggctcatgtgattgtgggagttgacaactcccaaatccataggcaggacaacaggctgtaaactcaggcgagaataatgttgtagtct

SEQ ID NO: 722492 - DNA, 768 bp, Homo sapiens
  misc_feature 135, 166, 263, 264: n = A,T,C or G
actcacttgcctgcccaacccctgtggaaatttgaatttgtcacctgtaatattgaacaagagtaccctctccttgatatgaaagctgtttaaataatagaaaaagtaaaactatcatttcgatcctaatgttgnctcctctgcaagttcctacttcagttctgtntaagatatagttctgattcccttcatcattgtagttgctctcctgtgaacaagtttacttctatattttcaaaagtgcattagaawttttgaccccnntgccgggattatttttaatccctactaagttttggttggatttatgcaaggcacttggcctctcatcagtaacttgcggactaatttgaaggatttagaggtagatgtaggcaaaattaagtaattgggtattgatttatttagcaataaaatccagtatttctagtagctttgcagagagctctatttaaggacttatcctgtttaatatttttatcagtgactgaaatcatgggaccgattgcaggcttgtcaaatttgcaattgatatgaatctgagaggtatagcaagtatactaaataaaatatcaagattcccaaaatatagcaacgagctggaaaaagacttcttgtgtatttaaggttagtttgacataactagtctctgaattattaattatattttaatcatcctaccagattttgttttaagctattaactgataaataatcttaggtaacagcatttccaaagaaatatactgtaagcaaagtctatcatat

SEQ ID NO: 722493 - DNA, 768 bp, Homo sapiens
  misc_feature 135, 166, 263, 264: n = A,T,C or G
actcacttgcctgcccaacccctgtggaaatttgaatttgtcacctgtaatattgaacaagagtaccctctccttgatatgaaagctgtttaaataatagaaaaagtaaaactatcatttcgatcctaatgttgnctcctctgcaagttcctacttcagttctgtntaagatatagttctgattcccttcatcattgtagttgctctcctgtgaacaagtttacttctatattttcaaaagtgcattagaaattttgaccccnntgccgggattatttttaatccctactaagttttggttggatttatgcaaggcacttggcctctcatcagtaacttgcggactaatttgaaggatttagaggtagatgtaggcaaaattaagtaattgggtattgatttatttagcaataaaatccagtatttctagtagctttgcagagagctctatttraggacttatcctgtttaatatttttatcagtgactgaaatcatgggaccgattgcaggcttgtcaaatttgcaattgatatgaatctgagaggtatagcaagtatactaaataaaatatcaagattcccaaaatatagcaacgagctggaaaaagacttcttgtgtatttaaggttagtttgacataactagtctctgaattattaattatattttaatcatcctaccagattttgttttaagctattaactgataaataatcttaggtaacagcatttccaaagaaatatactgtaagcaaagtctatcatat

SEQ ID NO: 722494 - DNA, 628 bp, Homo sapiens
tcttttgctaattggactctgattaactcaggtatgagggcacaagaatggcatgatacagcagaaatgcagagacaggaaaaaagtaaagcactgttgctttttaatacaaaatattaaagccttaatgaaatggtgcgcactcatgcacatagacaattactgtgggaaaatatacaaaaagagataaaagattctyatgctagaacagagaaatatcctggagttagagggattggagaaaaataaaggaaatataaacagtaacatgagggtcccaaaaggaaggactaagttacaaattatacaagaaagtgtaccagatacacttgcaccttggagaaagaaaatgtacaagatgcaattgtaccttggatatacaaaatgtacgtggaagagtcagcattcagaatgctcctagtcactagcagccacttgaggaaatctcatccgttacctacacctgggaactaaatgcttagccacacagaacccctagcctacaagcattgatcaacaagcttacctgtgccaagaattaaatataacttcactctccactagccaagaggacttccttaggcagcagcaagggtgcttcctttagactttccaggaacggtgaagc

SEQ ID NO: 722495 - DNA, 628 bp, Homo sapiens
tcttttgctaattggactctgattaactcaggtatgagggcacaagaatggcatgatacagcagaaatgcagagacaggaaaaaagtaaagcactgttgctttttaatacaaaatattaaagccttaatgaaatggtgcgcactcatgcacatagacaattactgtgggaaaatatacaaaaagagataaaagattctcatgctagaacagagaaatatcctggagttagagggattggagaaaaataaaggaaatataaacagtaacatgagggtcccaaaaggaaggactaagttacaaattatacaagaaagtgtaccagatacacttgcaccttggagaaagaaaatgtacaagatgcaattgtaccttggatatacaaaatgtaygtggaagagtcagcattcagaatgctcctagtcactagcagccacttgaggaaatctcatccgttacctacacctgggaactaaatgcttagccacacagaacccctagcctacaagcattgatcaacaagcttacctgtgccaagaattaaatataacttcactctccactagccaagaggacttccttaggcagcagcaagggtgcttcctttagactttccaggaacggtgaagc

SEQ ID NO: 722496 - DNA, 631 bp, Homo sapiens
tatttgaaaccctaagtttaaacttgctggctataagaatttatacaagttacttagcagctctatgcacaagctatctcatttataaagtctgaaatactttgccctcctgaagacttgaaaatcatatacatgaaacatttaccaaatgcctaggactgattatattattatttttttgccaaaacagaataactttagttatttctttctttccctacatcatattccattgtctcgggtggcatccagtaactagttaaaataactccaagatccatagctctcagagctgcacatggagcctgggctatgttgtaatcatagcaactgttttccaaatttatagcaaaggaaatatctttaataccctttcatttcagtaaccactccacctccctccatcaactgaaacaaattcaagtagtagttctttttttttttttgcacrtttttctattacctatgaattaatattgatcttagtagattccagattcactttcagtatcctcaaactcaaatttgtttctttacagcggacctccaatttcaaaatgaagtggttcatgaagcattttaaattctgaatgataattcttaatttggtattctttcgccggtcttcaat

SEQ ID NO: 722497 - DNA, 2821 bp, Homo sapiens
tgtggatataattacagtaaaggtctatgagagccatgatgagagaagaacagctgctactggggcctagagcaggggcgcctgacccgcctctgggggctggtgtcagaggcagcttccgtaggctagcaagggatgcttctataggcagtaggctactgctacttcatctttgggctgtgtgtagaaagtaggtcttggaacaagcccaccctacccagagggccttgcctgttcttctgctctgccctgtagaaagtgtatgaggtggaggttcagaggacaagggtgactctcaggtatctggcttggtggtactgagttggggctgtccctgtactttcagcccattcctctgtggttaagggttaatgatcattcagtggcccccactgcctggaaggctcactcctctgcccgcagcctgacccatcctgacccctgccctcccactagccacaccatggaacacctgccctcctgcagggagcccttcatcagcctggtagatgtgccagcagcccctcctagcaagtttcctcctcccaccaatttccagacttacctgctcttaggtgctcacttccactcctgctcccctgggctaccagcccacctggccacacaccatggcatagctttggttttctctgaacatttcttaaatacaatacaatcatatgcttccccatgacctgtcttctgttgtctctgttagctaaggattttaaaatgttaactttttcaggtacaaaaaccgtaattgaattttaagcatcttctgaggtctatgtcttagtcatcatttcacccctccccacctgcaggtagtttgtgcttattaagtatcttgatttgaaaatgatgagattatccttgctgtgtgagatttgctgatggcccatcagtagattaaaagtgaaggaagttgaggtggcttgaaataggattcctatttcaaattcctgacacctgctgcttttttaagccagattttttaccagcaatatcttaagaatcttggcttactgcaacctccgcctcccgggttcaagcaattcttgtgcctcagsctcccgagtagctgggactacaggcccacaccaatacgcccggctaatttttgtatttttagtagagatggggtttcactatgttggccaggctggtctcgaacttctgacctcaagtgatctgcccacctcagcctcccagagtgctgggattatgggtgtgagccatggtgcccagctggatcatgtaaccttggtcatgcgcaactcacaattcatctcaaaaaacctgaagttcttggggggcacttcctcattcctagtctctgaagaaatacatgagaacaaccaggccaccagaggtggaaagggacacaccagacctcagcttgccagagctcactttgacatctggaagaaatcaccctgttgccctgagccttagcttccttctcttgatttctctcctcccaatttttctcctttcctcagtggctggcataagaaggggcactttgtggaggttgggtacaggcccagaacctttgcttttttatttgtttaaacagatgtgtgtgagtgagagagtcagacagacaccaggatgagaattaacctgtacttggtataagaggaaggtggcacctttaatctgatgatgcatagcaagagaacttgccagcaaagaaaaaagaaacttagaatatgttctggctgcgtagatgtaataataattactgtcttttgcatgatctgatgatcattatcatttgcagcccccagattataatgaatcacattaaattataacaaaataaggctgggcgtggtggcttacgcctgtaatcccagcactttgggagaccaaggtggcaaggtgggtagatcacttgaggtcaggagttcgagaccagcctggccaacgtggcaaaatcctgtctctactaagaagtacaaacattagccaggcatggtggcgcatgcctataatcccagctacttgggaacctgaggcaggagaatcgcttgaacccgggaggcggaggtttcagtgagctgagatggcaccactgcactccaccctgggcaacagagcaaaactccatcccaaaataaatatatatatatatatataacaaaataaccttattgtccttttgttccttattctatccctaaaatcagtctatgactatctttatagatgttgccccgacattgcaaactttgcagactggccggggccaggcccaagggtggtaacatttgtatcccatccaggctgcagatttcccctgtcctccccacccaagtcgtccattgttgccgaatgcatcggccattgaatgtgtagggctgtctggtttcagtgtggttaactttgggaaattattggacagaaccactggggaaggtgacagaaggctaggtagaacagcagaattcataaacattcagggtggactaccgggaaagctgatgggcattttctctgcgtctgccattcttttccatttctcaccacagggaagagaagccgagggagctctggtggaggttgccagggagaagtaccagacacgccctgaaatggacagcttttgttagggtggaaagacaggctgccaggaaatggggctccaagcagggcctggggactggaagcccctgggaacttggaatgccagtccagtctttgtttcctagaacaagggaaggaaaagatgaagactcacaactcttaaggactcctaggatgttctttaccatatcttggggcttgagatttcaaaattgttttcattatt

SEQ ID NO: 722498 - DNA, 671 bp, Homo sapiens
tgatttttaaaaggctatttcttcctgttgaattttcttggcacctgtgttgaaaattaattgaccataaacgtgagggactatttctgggatcttccttctattccactgatctctctatatatccttatgtcatgaccataccttcttcattattatagctttgtagtaaactttaaaattcagaattgagtcattccactttgctctttctcrggatatttttcactgttctgaatgtcaattttcacatgttattctaatttatttttgagttgtttatcgttagtgaatggccttttattttgatgtacattgttatttttcagatgcttcatattggttttattatctccttttcccaccaaataaggtgaactatttctatgacatttgacaagagtatgtggaaagctcctttcccaacaatctgaacaaatgattatgatcatatccctatttcagtacagcagaaggcaaatttgttgacctagcaaaagagacatagtaactgcatattaactaatctttttgaatgatgataaataactcccaatccaatttatattggcaagcacacatactaaaagggagtttgtcacatgactaagggaccagtgacatttaagttctctagcttttagtgtaatacatacatgaatataaggaat

SEQ ID NO: 722499 - DNA, 2697 bp, Homo sapiens
gggatcctggaataatggggttttgggtgctgtgggggaagggcagacgattgaacagaccgaactacttcctcagaaacaggtcccctgatggaggatagaagtgaaggaggccgggcgcggtgggtcatgcctgaaatcccagcactttgggaggccgacgcgggtggatcacttgaggtcaggagttcgagaccagcctggccaacatggtgaaaccccgtctctactaagaatacaaaaattagccaggcgtgatggcgcgcgcctgtagttccagctacttgggaggctgagggaggagaatcgcttgaacccgggaggtggaggctgcagtgagccgagattgcaccactgcactccaccctgtgcgacagagcgagactccgtatcaaaaaaaaaacaaaaaacaacaacmaaaaaaaacaaaaaacaaaaaaaggggcagaggactgggctgccagctgagaggtgctgaacggggaacccgggccaaactgttgtatgtgtgtggataaggaggccctcttggttgctcaccctggggctccttggctgctccactttgtccttagttcctgtgcccgattaggattggggatggtacttttctcctgtggctagattctttgggttccacctagctacaggggcaggaacaatggtaccaagccctcagcctgttctctttgattcttaggtcttttctcctggcaccctgtattcatggccttggcggtgagtttaggcttctatctgatttgtttgggtatgcctcacctcattctcccagggaagcacccagctttcagaaagctcagcctttctaaggctaagacaggtggaggaaacatctagggctcatctttccctgcagcctatgggattgggaaacctggagggctgggccataggcagttgtcagatggttgaaaagggcgggagggcatggaagataatttctttctccattggggccggaaaggagaaggggggagaggtgttatccggtcatctcccgacttgtccccaaagttcaggaagaagtttaacatttgctactccactggtcaagaaatgggagtcattgtagaggttgggatggggagatgtcaacctgaatgaggagacgtgcactcaagtgctgattcccaaatgttcccagaaatgttgagctgtgaggctggtggtcctggttgaacttatttaacccttaccctttgtcctctttgttaggatgtatgagagcacctcctttttctcaggcctccaagccagacatgaggcttactggctctctcctatgttcacagttctgcctctgcatggctgaagccatcctactcttctcacctgaacactccctgttcttcttctgctcccgaaaagcacggatccggctccactgggcagggcagaccctagccatcctctgtgcagctctgggcctgggcttcatcatctccagcaggacccgcagtgagctgcctcatctggtgtcctggcacagctgggtgggagccctgacactgctggccactgctgtccaggcactgtgtgggctctgcctcctttgtccccgggcagccagggtctcaagggtggctcgcctcaagctctaccatctgacatgtggactggtggtctacctgatggctacagtaacggtgcttctgggcatgtactcagtatggttccaggcccagatcaaaggtgcggcctggtacctgtgcctggcactgcccgtctatccagccctggtgatcatgcaccagatttccagatcctacttgccgaggaagaaaatggaaatgtgagttcctgcgaacgctgaatctaggtgggacgcttgccttgaacatcatggttcctttggtgatctataagggatctatttaagaagtggtcaggttttcgcacttcttggctggtccagggactgcagaaaccaaagctgctattgttgaggaataattcagtgggtcaaaatggggagatgtactgggtatgagtggaaggtgatggagagcctgatcctgaagcctctacttgatgagagacagagttttgggtggtgatagtgatgtgctggtggtcatttcttgcttgtgtgcctgatgaaaaactgggttcctgtaagttatgaatggcatccagggatatttgggttacttttaagaaagcagtgtgatgtagtggagagagcccatgggtcttatttatgggatatggtcctcttaggctctgttgtacaaccttaggtacattccatatcttaagaccactgtttcttcatctgtgaaatgtttctaaacaatctctaagtcccttccttctctaatatacagcgtctgtcaggtcgatgtctcagaacactctcccagctgtggaccacgtggaccacttagcagactcagggggtagttctttactctccctttactaccctggagggacagctctgcccttgaggcccttcagaaatttgtgctgatttggtccctgtgccagggcacagggggtcaggcactgtggaaagaagggactcaggtgagggtcttctggactctaagacggtaaaggcactaaagtcactttaaagcttttggagaagcaggagggcattggcttaaccaagccgaaggctgctggctgggctgcctagcccagctaagatcttccttcagcccacctcag

SEQ ID NO: 722500 - DNA, 679 bp, Homo sapiens
tgatgatcatggagaggaatttaatcatctactcattgtagccatctatattgtttgtggggaacaggctctctgctgagagaaaaatctgccaagttcagattatgggtaaaaccatgggagatagaattagcctcacgaattgtcaggagcttttaagagttactcactcttaaagtattttaatgcttaggtatctcaaaattcagccattatagaagcaaagataaatgtcagttttaatctcccaatccgtgatttctcaaaatgaatctggcaaactgttcaacatctatcttccagcgtgcctgtgaggaagaaactggagcaaaaaagatggaaaccccagcaaggacgatgagtaatgaagattgcacctttgcaatttatcttctctctcacaaaattaatgctggaattcgagattactgtggggctgtttattagtgatgacaactgtatgggcttggtttggaaaatgtgttctctcctgagttgttgagtcatgtgaggccatttgcagttcttttttttttyccccctaaaaatgacaaagagtgataatttaatttctgaagtctaatggccacacagctatttttgcctagattcctttctttttcaaacaaaataagcaattctccctagataccctttgtttcagatacaaatctcaaga

SEQ ID NO: 722501 - DNA, 2030 bp, Homo sapiens
atcatcatctcagctttgtgaatgaaaaagctgctgcccactgaggataaatcacttgcctaaggtcacacagctggtaagtgcttacacggaaaaattagaactaggtggtctggctctgctgtctgcgctcctccccactacatgctatagtccatcaaaataataattgtctcatctctttttttgttctagagaactttaaaatacaaaaaaagtacaaagaggaaaataaagttcatctttgttcctaccacgtggagataatcactgttgacaatactgagttgtgttgttaattgcagatcaaattacagaaaaaatgtccatgtgttttagcagccatgtaattcagtgaagtttctttcattggatgtcattggatgttacaacatgtccagggtggagatttctcagaatatttttggccttgtaaaataaaaggccattatttgaaagcttactccctattttttttttaagaaattaagggttttattgaaaatgtaagtacactccacagtggtgtgggagcgggcctgagcayaggggctgaaaggccctgctacggaatttttgggagtttctccccagaggattccttcgattacttggggtacaccctgtgtaaatggagaggatgttcacacaacactggtgtgttgctggccctttggacatcctgacaaaatattcattaaaatgcactttcttaaatgaagtgatcgcctctggactgattgaagtttcctgtgtatctggcccacttccaaccattatctaggatagagggaggagagttggtgccgcaagagcttgtgacatttccagactaatgtgtcttatgtttataatcatacagttatttagaattctggataaaagtagctttctatatgtaagcaataattctgtggttaccaataatgtgaagatagagtaaatccaaaggcaaacatttaaaaaaaggacagccttctcgataaacacaaaacaagcagcttaaacaccttgggctcactcttctgactttagttcagtaaagaaactgttcataggaatttgctacttaagacattttcttgggtcatccatgattaattccttcaaaggaggcaggttaggtatgccggaatggatgtcttctgggatttgacttgagtgtctgagtgctaagcaggggcttcgttatatattcagcagcattttttcactagggaaatagttgtagggcacacaaatgaggggaatttgtatatttttaatttccttttctaacttaaaaacaatttaatgcaactatgcataatctcataagcaggtgaaaaggggaaagtgatttcaagtgccagaatcctttggtgtcctggaaaatacatgtggcctaaacattacaaatcagttttatttgctgtgcttgtaatatttcagattaactcgttgcctttcactggtttattatacaacctgttttcaaggagacattatttaattgtaaggaataaattgcttgcgtgtgtgtgtgtgtctgtgtgtgtatgtatcgagtcctaatataattattttcaccgtagattccagtgaatttctaaataatcttgggaatacaatcttttgtttatgaattatttgcaagcagacaaaattcctgatatttattctataattaaatcatgattcttatagccaagtaatgatgcaaccattgtgaattatataaaaaaagaaaatgcatataaaatacaaatttaataaaagctttctaaatggtaattctggcaagataaaatgcaaaaaaagtaacttattatatttttttagcgaggagagaccaaagcttgtgtggaaagctgggaggagatagacttctgtgagctatggattcaccctcatggaatttagattccagttaggtaacgaaaagtaagcaaagagtgagaactaaacccataaattgtgattcacataaaatggcagaattttataagtataaattatagtttgttgctatacaacttttatttttgtta

SEQ ID NO: 722502 - DNA, 603 bp, Homo sapiens
taagattaggcaaatagtatttactgcagaaccaactagtgaaatttgatctgtagaaaaaaggaaatgtaatcttaaagcattaaatttgtgtcactttaaagagaattttctgcaagtcgaggccaagtgaattctctttttttacagcccattaattgttcattgtaatgccatagtttagatcaattaatatgtaaaccatgagggggtaaggctttcagatatgtgcctgggaaactgaggagtttggagaaaatgwctaagaggagagataaggaatgagtcaggactgtttgatcaatgaggttttaattgtcacagcaaagaggtctgtcataaacttgttcctggctctgagagaggaagcaaataagtaataaataagataattattttcagtgaaatttctgtaggttagttaaggtatagggtattattgctttgataatttgacatactgctaactgaataaaatataaaaagggtaagagaaataattacataactctatccagtgaaattttcaggacttgaacaaaaacattcaatgatactggcttacagggcctagtggagactgtggggttagtgaacatagtg

SEQ ID NO: 722503 - DNA, 1193 bp, Homo sapiens
tgtgtatatacagaaatgcacatatagttaactatatattcaatttctacagttgtatagaaaataatatatatttatagataaatattataaaattatataataattcagttatatatgtaattcaagcttcataaagggccatgaataattaaataattatatatacacatatatttaaatacagatacaattatttagttatttttggagcttaatgtagcttatataaaagctgatggtttcaacacaatgataaaagaattatctccaaaatgcatattcagtatcaactgtttcttattcctctatagtagagattgaaaaattatagactatgctccaaatttagctcatggcttgctcttttaaaaaagggttaattagagcacagatatactccctttacatattatctataactgctgtttaattacaatagcaatgttgagtagctgtgatagagaatatatggctcacaagtctaaaatatttattatctagctttttacagaaaaagtttgtcaatctctgctctattggtacataaactaaycctataatattcatttagactgttgattagaacacttctttctggatattttacagcatagaaaatgaattacattgtgggattgtgaattttttaaatattcataaaaatcctcgtagcattaaaggatttagaaagatatatttaccactgagaaatagttcctacaaaggaaataataattacattagccagacgcattttaaaaattatgattcccttcagaaatctgaagaaatggataactttgataggctttggtgttacttttggatgccaaattctataagggtccatccatctcatacttaagaatttcaaagactgtattgaatatggcatactgaaatgtttacatatttgtaaaatagataaattgagccaaataaatatttgccagtattttgcatttggaacagtgagtagatcatcagttacctaaattataggttaaataaatatatagacttctctctcccattcccacctagccaaaactgaattacacattttcggtgtatattgatagctgctggagtctctctgatgctacttagatatcacatggcaaaaaagagaggcttttaaatttttttcctgaagtcctttcatcctgattgcttgttataaaactatt

SEQ ID NO: 722504 - DNA, 854 bp, Homo sapiens
ctattttttactcacaactgagaatttgggtgattagcactgaaatttagcccttttacaattacggtcataaccaatataacatcttgttttatgaggcgaaattttcaggcttctttaaattttgcttcattccctgtctctcactatatgaactatacaatcctttattttgactaacttcttacttggccacagtatattcttgaataatttttttcagagtgtataaattaaaaaattaacccttgcatttaaaaaaaattgacttttctcctcttcaattggaatatyaccttctttaactatataattcgtgggtcacaattttttccccctgaaaactgcaatgtttttattgtagagaagaaatttggggcctgcctagttttctgtttcttagcagtagtaattctcccctgctttgctggtagaattgcttctttgttattgaaactggaaaagtttgaccaatgtgtttgagcatttgttgcttctcaccactttttccttgaacttagtaggtgcatttagtttgcagatagaagtaattattcagccaagcaaagttttcttcactacctcttggtactgttgcctctccttcccattctacaattttgggtgttgtgaatccatgctctgtatcttttacttttcctttttcatttccatgtttctaagttttcttaacctcatctttattttttaaaaattgatcctttatcattttcaatctactgtttcatgcttcaattgcaattttatttttaactgggtcaagttgtttttcatttccttggccttttccagatttcataggtgcccctctctgattatcccctctagttaca

SEQ ID NO: 722505 - DNA, 1346 bp, Homo sapiens
  misc_feature 679, 680, 681, 682, 683, 684, 685, 686, 687, 688, 689, 690,691, 692, 693, 694, 695, 696, 697, 698, 699, 700, 701, 702,703, 704, 705, 706, 707, 708, 709, 710, 711, 712, 713, 714,715, 716, 717, 718, 719, 720, 721, 722, 723, 724, 725: n = A,T,C or G
  misc_feature 726, 727, 728, 729, 730, 731, 732, 733, 734, 735, 736, 737,738, 739, 740, 741, 742, 743, 744, 745, 746, 747, 748, 749,750, 751, 752, 753, 754, 755, 756, 757, 758, 759, 760, 761,762, 763, 764, 765, 766, 767, 768, 769, 770, 771, 772: n = A,T,C or G
  misc_feature 773, 774, 775, 776, 777, 778: n = A,T,C or G
agaaatggacatgagactgctccagtgttcttccatgctgcatgctattatagcttaagttgggtttctgtcccttgccctccaaaatggtcactttctccagcattcacctgaatgctgcgaaacctcactgcaagttcttgaaaagggcagggagcctctaccacatgggaggaagtggtgcagccagtaagtacaatcgttggagccctgcctcaaaactctgtcctgctccttctcagggctgtgacccctttgagaactggatgtcagtctttcaatacaattattcttccttgagttaagcctcactcccacttctaacttgcatccctgcctccccttttgcctccacctcaaatctactattcacactgcagcagaggaccctttgagaactcaaatctgaccaggccacttgttgctaagaccaaagtgtaacatctacaaccaggggtcctagttcttcaagttagcctatagaatcctccaaagtttggattctgaccactgttagcctcatgtcttagcaccctctaaaccacagttttcccttcaccaacattgggtggcttctacttctctgttcataccatttgtcttagtctatttgtgttgctatgtcaaaataccatggactcggcaatttataaagaacagaaaattatttcctcacagnnnnnnnnnnnnnnnnnnnnnnnnnnnnnnnnnnnnnnnnnnnnnnnnnnnnnnnnnnnnnnnnnnnnnnnnnnnnnnnnnnnnnnnnnnnnnnnnnnnnaagccataaaacattgaactgtgtgaagacagagtccacactttttttttttttttttttagacgggatctcactctgtcacccaggctagagtgcagtggcgagatctcagctcactgcaagctccgcctcccgggttcacrccattctcctccctcagcctctggagtagctgggactacaggtgtctgccacgatgcttggctaatttttttgtatttttagtagagacggggtttcaccagagtccacacgtttttatgttccagactgtgctgcttccttacacctgtgaaatagaagaccaaattgtatccagataattcagactaaataagggccatatcatcagtgttcaagatgtttcagagagattggataatggagagttcaccatggtgaaattagaagcaaacatacaaacacaaaacagcaacagagaggcctggaaagacctgggttctgattctggttttgctgccaactgtgtgtccttagttaaatgctctccctcctctgggcatttttgatgatgttgaactgtgaatcatgtataaaaaattattta

SEQ ID NO: 722506 - DNA, 1346 bp, Homo sapiens
  misc_feature 679, 680, 681, 682, 683, 684, 685, 686, 687, 688, 689, 690,691, 692, 693, 694, 695, 696, 697, 698, 699, 700, 701, 702,703, 704, 705, 706, 707, 708, 709, 710, 711, 712, 713, 714,715, 716, 717, 718, 719, 720, 721, 722, 723, 724, 725: n = A,T,C or G
  misc_feature 726, 727, 728, 729, 730, 731, 732, 733, 734, 735, 736, 737,738, 739, 740, 741, 742, 743, 744, 745, 746, 747, 748, 749,750, 751, 752, 753, 754, 755, 756, 757, 758, 759, 760, 761,762, 763, 764, 765, 766, 767, 768, 769, 770, 771, 772: n = A,T,C or G
  misc_feature 773, 774, 775, 776, 777, 778: n = A,T,C or G
agaaatggacatgagactgctccagtgttcttccatgctgcatgctattatagcttaagttgggtttctgtcccttgccctccaaaatggtcactttctccagcattcacctgaatgctgcgaaacctcactgcaagttcttgaaaagggcagggagcctctaccacatgggaggaagtggtgcagccagtaagtacaatcgttggagccctgcctcaaaactctgtcctgctccttctcagggctgtgacccctttgagaactggatgtcagtctttcaatacaattattcttccttgagttaagcctcactcccacttctaacttgcatccctgcctccccttttgcctccacctcaaatctactattcacactgcagcagaggaccctttgagaactcaaatctgaccaggccacttgttgctaagaccaaagtgtaacatctacaaccaggggtcctagttcttcaagttagcctatagaatcctccaaagtttggattctgaccactgttagcctcatgtcttagcaccctctaaaccacagttttcccttcaccaacattgggtggcttctacttctctgttcataccatttgtcttagtctatttgtgttgctatgtcaaaataccatggactcggcaatttataaagaacagaaaattatttcctcacagnnnnnnnnnnnnnnnnnnnnnnnnnnnnnnnnnnnnnnnnnnnnnnnnnnnnnnnnnnnnnnnnnnnnnnnnnnnnnnnnnnnnnnnnnnnnnnnnnnnnaagccataaaacattgaactgtgtgaagacagagtccacactttttttttttttttttttagacgggatctcactctgtcacccaggctagagtgcagtggcgagatctcagctcactgcaagctccgcctcccgggttcacaccattctcctccctcagcctctggagtagctgggactacaggtgtctgccacgatgcttggctaatttttttgtatttttagtagagacggggtttcaccagagtccacacrtttttatgttccagactgtgctgcttccttacacctgtgaaatagaagaccaaattgtatccagataattcagactaaataagggccatatcatcagtgttcaagatgtttcagagagattggataatggagagttcaccatggtgaaattagaagcaaacatacaaacacaaaacagcaacagagaggcctggaaagacctgggttctgattctggttttgctgccaactgtgtgtccttagttaaatgctctccctcctctgggcatttttgatgatgttgaactgtgaatcatgtataaaaaattattta

SEQ ID NO: 722507 - DNA, 1346 bp, Homo sapiens
  misc_feature 679, 680, 681, 682, 683, 684, 685, 686, 687, 688, 689, 690,691, 692, 693, 694, 695, 696, 697, 698, 699, 700, 701, 702,703, 704, 705, 706, 707, 708, 709, 710, 711, 712, 713, 714,715, 716, 717, 718, 719, 720, 721, 722, 723, 724, 725: n = A,T,C or G
  misc_feature 726, 727, 728, 729, 730, 731, 732, 733, 734, 735, 736, 737,738, 739, 740, 741, 742, 743, 744, 745, 746, 747, 748, 749,750, 751, 752, 753, 754, 755, 756, 757, 758, 759, 760, 761,762, 763, 764, 765, 766, 767, 768, 769, 770, 771, 772: n = A,T,C or G
  misc_feature 773, 774, 775, 776, 777, 778: n = A,T,C or G
agaaatggacatgagactgctccagtgttcttccatgctgcatgctattatagcttaagttgggtttctgtcccttgccctccaaaatggtcactttctccagcattcacctgaatgctgcgaaacctcactgcaagttcttgaaaagggcagggagcctctaccacatgggaggaagtggtgcagccagtaagtacaatcgttggagccctgcctcaaaactctgtcctgctccttctcagggctgtgacccctttgagaactggatgtcagtctttcaatacaattattcttccttgagttaagcctcactcccacttctaacttgcatccctgcctccccttttgcctccacctcaaatctactattcacactgcagcagaggaccctttgagaactcaaatctgaccaggccacttgttgctaagaccaaagtgtaacatctacaaccaggggtcctagttcttcaagttagcctatagaatcctccaaagtttggattctgaccactgttagcctcatgtcttagcaccctctaaaccacagttttcccttcaccaacattgggtggcttctacttctctgttcataccatttgtcttagtctatttgtgttgctatgtcaaaataccatggactcggcaatttataaagaacagaaaattatttcctcacagnnnnnnnnnnnnnnnnnnnnnnnnnnnnnnnnnnnnnnnnnnnnnnnnnnnnnnnnnnnnnnnnnnnnnnnnnnnnnnnnnnnnnnnnnnnnnnnnnnnnaagccataaaacattgaactgtgtgaagacagagtccacactttttttttttttttttttagacgggatctcactctgtcacccaggctagagtgcagtggcgagatctcagctcactgcaagctccgcctcccgggttcacaccattctcctccctcagcctctggagtagctgggactacaggtgtctgccacgatgcttggctaatttttttgtatttttagtagagacggggtttcaccagagtccacacgtttttatgttccagactgtgctgcttccttacacctgtgaaatagaagaccaaattgtatccagataattcagactaaataagggccatatcatcagtgttcargatgtttcagagagattggataatggagagttcaccatggtgaaattagaagcaaacatacaaacacaaaacagcaacagagaggcctggaaagacctgggttctgattctggttttgctgccaactgtgtgtccttagttaaatgctctccctcctctgggcatttttgatgatgttgaactgtgaatcatgtataaaaaattattta

SEQ ID NO: 722508 - DNA, 630 bp, Homo sapiens
ataatgaaatttaccacaagtgttgtggggagatgagcataaaaagacatttaacaagcatgtacatttgtcagctaatgccacaataatgctgtgtaacaaaccacatccaarctcaatgttctaaaagattaatcatttcttttattattaactttaaaatttttttttaatttcaataggtttttggggaacaggtggtgcttggttccataaataagttctttagtagtgatttccgagattttggtgcacccatcactggagcagtgtacactgtacccaatgtgtagtcttttatccctcaccctcctcccaccctttttccccaagtccccaaagtccattgaatcattcttatccctttgtgtcctcatagttaagctcgcatttgtgagttaaaacattaatcatttattctcacttgtgcaactgcagttagtttatcaatgctgagcccagctgggcttgggtttagatctgtttcacatgcactcatttccctggaccagtggtcacctggacaagttccaacgtgatggtagaagtgcaagagaggcaagtgggaaaacacaatctttcttaaggcctaagcctggagctggtacactgtcattctttccctactcc

SEQ ID NO: 722509 - DNA, 976 bp, Homo sapiens
tatctcctcctcttgactaactagctatgtgaacttgaatgcacctatgccctaccttggtctatctcatttacacaatgcaaatacttctgtccatagctgacatcctgctctaggacagggtctattattctttaacctttcttttatttcctctttcattcccaaaagaatgttgctgatatatatagcaggatctgagcacatttgttgaatgaatgtgtgtgcaacataattatatcacagagctgtcattaggctcaaatggtataacagtgcacacaatgtgagacatataacatgctccaggcaccagaggctattttagacagatccatttctggcttgaaagctagggtcagaggaaatagggattagttcacatgttctcctcgacctttgtggctgaatttcctttgtttcagttgggttctttcagttgcaagacagagactccttcaagttacctttttaaaaagcagtttattattaggagctgtgaactgtaattagaactggaaagttktcagcacctacagctgttttaggaatcagtctctctttcattctctctctcttgtcctctctaattatttgttcaattctcctttctctcgattatgttttccctcatattcttcttcttttttgctcatgtagaaatttggtttattcatgattttgcctgccatgtctcaaggtgtcttttcatcctcagtccttatgctatctcaatttcccagcttgataatgctcagtactccagaggaatctgattggccaaagagatctttttatcccagatgatacaggtcccaagtcactggccacaggttggatccatcatacttgtgtcgcagagtccatacaatgccccaattagctggcaaggtggaaggaggttgctgaagcaatagggattgtgagacagacagtttccttaaatgggtgtgtgggaataagcactgactgacat

SEQ ID NO: 722510 - DNA, 728 bp, Homo sapiens
tcaggttggtattcttggaaccaaggatacagaaggaggaaacaagaacttcagaaatgatgggctgagactggatcgtgtctggcctcctgagccacagtcgggagtctgaactcttcttatctcaagaggaatccaaaggattttaatcatgaaagtgactcagtgaggtatgctttataaagacggtcctagctgcagtggacaagaaagattggcaggagagagatgggagacagagagaccaatwagaaggctacagtccaagatctgaatagcagggatacttgtcagagcaatttctttgaggcatttggtctctgattgctggtgatcttccccagcctcgtgtgtttgcaatgactctaaactgcagagaaaagccatttactcatgttcacctgccgcattgcacacttagccttgccctgtggtcgcacactttgtcgggagagttgtgagttgtactgcaaaggaaagaggacttgggggtcagctaccccactgtaaacccccgaagcatcctatgttgtcacatccttaaaaagtgctggttattatgcccgatcctttccacccatgaaactgttgggatcgcctagtcaattactagtcaagtggggtaatgtgcatttcattagaagcctctcatttcagatatacaaggccgtatagaaatgaaatattctgaagttttttttttcagccagtgattgggcattgtaatt

SEQ ID NO: 722511 - DNA, 728 bp, Homo sapiens
tcaggttggtattcttggaaccaaggatacagaaggaggaaacaagaacttcagaaatgatgggctgagactggatcgtgtctggcctcctgagccacagtcgggagtctgaactcttcttatctcaagaggaatccaaaggattttaatcatgaaagtgactcagtgaggtatgctttataaagacggtcctagctgcagtggacaagaaagattggcaggagagagatgggagacagagagaccaattagaaggctacagtccaagatctgaatagcagggatacttgtcagagcaatttctttgaggcatttggtctctgattgctggtgatcttccccagcctcgtgtgtttgcaatgactctaaactgcagagaaaagccatttactcatgttcacctgccgcattgcacacttagccttgccctgtggtcgcacactttgtcgggagagttgtgagttgtactgcaaaggaaagaggacttgggggtcagctaccccactgtaaacccccgaagcatcctatgttgtcacatccttaaaaagtgctggttattatgcccgatcctttccacccatgaaactgttgggatcgcctagtcaattactagtcaagtggggtaaygtgcatttcattagaagcctctcatttcagatatacaaggccgtatagaaatgaaatattctgaagttttttttttcagccagtgattgggcattgtaatt

SEQ ID NO: 722512 - DNA, 632 bp, Homo sapiens
tctagttctgtcattctaagatttcaaaactattatcaattttgagggaaaaaaagtcaagactcaaaagcaaataggataccctttatggcaaaatgatggctaataagcgttactgttgttatagttatgagctcataaaatggcatggtaattcatcctagcactctttctaaatcttaaactagcttgttaaactggttttcacactcaaaaatttttttaaaaatgctatcagtatctgagtgttttgtctatttttcatagtcagcaatgttattcaactagatgagctttagaaagaccaattttatawatttagtttttaaagtccagaaattacatttatggatgcttattacattctagtgacttcaaaagcattatctaacttaattctcaaaacgttctagacagacagataccattattcctgtttcacagttaaagataatttgtcaaggtaatctaaatagaaagcactaaagttggcattcacatctatttagtctgcttccagaataggcacattttggcatgaaatgacattgtccaagaagaagatcaaataaatttataaagcaaataaactggtagatcttcaacattttgggttatatataaatatacca

SEQ ID NO: 722513 - DNA, 646 bp, Homo sapiens
tctaaggctcacaaacatgctggcttcaactgccggatgaacacacaatgaaagtatatataaaccaataacctttcactatatcaacctacctttctttatatttttttacctattcattttttgaaaagagatttatttctgtgtctatgaagacacataatcaaaagcagatttaaacagtatttggacaattaaaaataatctattatttaaaatattttcactaaaacttgccattgattaaattgataagacagtgtttcagtttctaaatccaatattgttcaaaaacattttatgtcctctatgtttatagaatgaagcctaagattctcatcctgatatttgatgcccttaaaaattgtctttatttatttattttttctagagtaaatgtgatgtctccttttctctacttttgcctgagagattcctcattgttcaaagtcacatcacactgatgtctgcaaccatgctttggcttggtttattttccgaatagtaattacccttatttccctttttattgtgtcaaattgttctcatactgaaagcccaagtaaccagaayaacacctattacatccaaatcacgtgcacgtacttttatttgtttaaatgttttctcttcacctaaattacta

SEQ ID NO: 722514 - DNA, 1207 bp, Homo sapiens
tttccaaagagaccaaaaaatgagggaaaatgccaagtgaagaactggaaaagaagtttgagaaactacttcaattttagttgcaatagaagcaataatgtatactcatatttctattataatttttattgttatataattagtrttgctatcagccagcactattcaaaggtagaagtggatttcttccctatagacaataagttccctctcactatgtgtattgaaacatctgcaatgtcacttgatgggatgttctgggaggataaaggtaatcaggcaataattgaaacatcttgttgttgttgggttttaggtactgttcacatatttctgtatttccatgcattcttacatctattttaaaaaatctactgagataagaataatttttgtcttttaaaagatgagaatattggaccttagctaattattggggtaactgaaatgcaaacattaacagatcaactaaagacctttatgttatatttcactattaggtttggttgtccatttccaaaatgttgcagcctagattacttttattaaatgaaattgtacatttacacaatatataacagatagaggaaaagtgttttaatagactaggaagtgggggaccttgaattcttactgctcattgattttccccaaatggatagtatcatggatcactggtagctgctgcagagtgcagtaagaaaaatatgccacttagtgacttctcagatcatttccaaacatctaattttttaattttgcaattcctcttcagatttaatttaggaaatatttttcccccaccacaatatactacctgtattagtctgtttggtcttgctgtaaagaaatacctgactttctttagagtaatttctttaacaaaagtagtttattttgctcatggcccttcatgttgtacaagcactgtagcaccagctttcaggaagcttgaagtcatgatgaaagatggagtgaagtaggcatgatgcagtgagagaaagggaacaggagagcggggaggaggggccaggcgttttttacaatcacagtacaagggaactaataatgtaatatcgcactcataaccctgaggaaggcatcaagccattcataaggtatctgcccctgcctacccaaacaccttccaccaggccccgtatataacattagggatcaaatttcagcatgacatttggagggaaca

SEQ ID NO: 722515 - DNA, 617 bp, Homo sapiens
cccacattctgtatctaaaagtttgcctccctgtggggtcattaacatattcccctgtccctgaatttccagtaaactaatggttagatttagaggctcaatcagattcaggtgggatgattttggcagaacaatctcataatggtgatgygtattcctttgcactgcatcagacgactgtctttttgtgctgctgaaactggcttatagaagttcctgctccaggtcagatgcagtcatcacacctcactctggctttcccactgaatatcacttaaaaaacctgaagagaatgcatgcagtagctgtgaagggtaatttggagcaggccaaatggagaataagaccaaaatttaaactatcaccaaaatggtggcgagtttaccgtattttctcccttttggagccccagggaactggaaagaaccagagacactaagaagagaaaggagctcagaaaagctaacccataaaactgtttacaaactcctaggatgatcccctcaagctgcatgcacatggacctggtcctaatcagcacatcaaagactgaactcacaaactactggtagggccataggcaggatacatccaaatagcattgcaaaaacagcgtg

SEQ ID NO: 722516 - DNA, 629 bp, Homo sapiens
aaactcaactgtgcagtttggtttgggatgttgttcactcttgtgacctgccagaagaatcttgagtcatgggtagtcactgccgttcagccttgtcctgagacaattaatatgtataggctgaagaccagctcagtgccatgcagagaaaccacttacctgagcccttccttgatcggccagatgattgtgaacatgagcacccatgaacatgaaaacatgtttaytgttttctgtcactgagttgtgtatttagccagttaccaatcattaatgcataaaagcttcctgatacagtatttacacctctacctatatatacacacatgtattttttcttaaattggtggtataaatgtgaatatttagtaatcaaattataaagttattaaaagaaaattaatgacaaaattaaaactaatatttcaataaaaaattaaaatttaccttatttgtggaaaaatgtgcataaatgtatgtaagatatgtacaagtaaatatatatttgttaaaatggctacaatatatatagtatttatgtttaattgtgtttcttctattatatatgcaatataagcctatttgtaaaattattatctacattgaatacatttaaataatttttgtta

SEQ ID NO: 722517 - DNA, 844 bp, Homo sapiens
aagtaaacaaaatgaaaataagagaaagttaataaacataaaagcagaaatccatgaactagaacacaaaccaccagacttaaaaacagaacacttgattaataagactaaaaactgtttytttgaacaaataaaatacaccaatttttggcaagtttgactaagaaaaatagactttaaaaataacattattataaagaaatactgcagaattatggatatagactagattttaaaagaaaatttatttctcaagaaatataaattgccaagagcctccaaaagacacagaagtctagattagatcagcaatcataaaataaattaaaaagctagtcagagttctgtccttgaataaacatcagacctggatagtatataaaagagacttaccaacgtctttcctatcatgtacactctatagcccttgaatacagatcggaaacttctccactcattttataagacaaaactattatgatactaagattaggaatatagaaacaaatagatctatctcacttctgaagacagtgaaaggttctgaaagaataaaactgaacaacttaaatccaacattgtatacataacaatgaagtaggattccaagtagggctggtttaagtttaggaactctaaaatgtagttggcgactttaactagttacagaagaaaaaccacaggatcaacttgaaagactctgaatgaagtattcctgagctcaatctaagattagaggaaaactcctttgccttgataagaatatctattaggaagatttcaccaatagggtgaaaattaaaaggattctagttacctgaaaacaaaaataatagcaaaggtg

SEQ ID NO: 722518 - DNA, 1175 bp, Homo sapiens
ttataatactcctcccacctataattttctgttttaggctctctgaaatatcctccctttctgttacctttacctgaccattacctcgaggaatctctcaaggctcacactcggaatcttttttactgcagcttgtagtccacagtagctggctctttactttgggcacagctattgatctctgcccggaagtatggacttgatcttgggacttcccsctaggtctcaaggtctcccttgtgaaggctacctattttgttttccctttcttccatatgcccatgctcaactcccaagatcccagatgcagaaaagctccagctttgccccgaaccaactactcagtatgctcaaaagcaaaaatcacggactataagtatgaggaacttaggtgctgtactgaactttgcaactctcatagtatctaacagaatgaggttacatgttaagtattatttgattaatcaattgataaaatgtcttgtagataaacaaacaagaatccaaataggaccacaaaaatgaaacctgagacttccaaaataaccgaaatggcaggcagtccatgagatagtgtggaacataattgacactaaatagactccaaacaacaaaagattgtgtaatcctaaacactgaagcctactgtaagaaattataatactgtatgatgctaatatggagaattacagtagggattaattaaatgataagagctaagagaagaaacattagttaatagaatatattttaatttttatttttgtgttctgctctattctcttggtctcaggctcagctaaataccatacgtagaaggattaccaacctcttcctgaaagcttgaattacagttccccaggtggatattggtacttcatgaaggatggttggagttgctgaatattttacaaaggaaatgcgtgtggctcaaaggataatctagttatcttgatgaatttatcctttgtagttgaaagaagttttgaaacattagacttcaaagaaaagcaggacagtgattgagcatttatgtaaatactccctaatctgcaaaaagtggttcttagacatttctaaattgagtgagataaacatcaaaagtgctacattattttctattttacaagtgtcactatctctcattccctccacacccagagacggtctctctg

SEQ ID NO: 722519 - DNA, 1175 bp, Homo sapiens
ttataatactcctcccacctataattttctgttttaggctctctgaaatatcctccctttctgttacctttacctgaccattacctcgaggaatctctcaaggctcacactcggaatcttttttactgcagcttgtagtccacagtagctggctctttactttgggcacagctattgatctctgcccggaagtatggacttgatcttgggacttccccctaggtctcaaggtctcccttgtgaaggctacctattttgttttccctttcttccatatgcccatgctcaactcccaagatcccagatgcagaaaagctccagctttgccccgaaccaactactcagtatgctcaaaagcaaaaatcacggactataagtatgaggaacttaggtgctgtactgaactttgcaactctcatagtatctaacagaatgaggttacatgttaagtattatttgattaatcaattgataaaatgtcttgtagataaacaaacaagaatccaaataggaccacaaaaatgaaacctgaracttccaaaataaccgaaatggcaggcagtccatgagatagtgtggaacataattgacactaaatagactccaaacaacaaaagattgtgtaatcctaaacactgaagcctactgtaagaaattataatactgtatgatgctaatatggagaattacagtagggattaattaaatgataagagctaagagaagaaacattagttaatagaatatattttaatttttatttttgtgttctgctctattctcttggtctcaggctcagctaaataccatacgtagaaggattaccaacctcttcctgaaagcttgaattacagttccccaggtggatattggtacttcatgaaggatggttggagttgctgaatattttacaaaggaaatgcgtgtggctcaaaggataatctagttatcttgatgaatttatcctttgtagttgaaagaagttttgaaacattagacttcaaagaaaagcaggacagtgattgagcatttatgtaaatactccctaatctgcaaaaagtggttcttagacatttctaaattgagtgagataaacatcaaaagtgctacattattttctattttacaagtgtcactatctctcattccctccacacccagagacggtctctctg

SEQ ID NO: 722520 - DNA, 600 bp, Homo sapiens
ggcatsagccactgcgctcagctgctttacagcatttttatagacgctcttctttgaacttactaagggttcattgaaatcagctgtgcagagtttaaatccagcaaggaaattcaggcacagacaggttggaggtaacaaaaagtaaaactggaaagtgaatcaaattttggctgaaaatttaatatatttaatagtatgtatgattcctcaatctaacttaggttaaaataatcaaaaataaaataaggtgaactactttttttttaatgggcaaggtggcagaaatggaatttccaaacatctagatcttaggtctttattattctaagcaatttttaatacaatttgagaatctttatttctgtactcttcttcaataataacattaaagcagaaggaggttccaagatggccgaataagaacagctccagtctgcagctcccagcgtgcagacgcagaagatgggtgatttctgcatttccagctgaagtaccggcttcatctcactggggcttgtcagacggtaggtgcagcccacagagcagggtgggacattgcctcatttgggaagcacaaggggtcaaggaattcccttt

SEQ ID NO: 722521 - DNA, 668 bp, Homo sapiens
gaacttyctactgtatgtctacaaaatgccagctgtctccattgcttctgagtcaccacattgctgcagtctcactagagacttggagctgtgtctttcattaggagagcagaagcaagcccagctgttgcttgcacaccccaacatctaccttgtaatctcaagcttttaggtgctgttggtagaatccctgtttcatcttcttctcctgactggcaagatcccctcaagttgggaaagcatagcatgctgggtacttggaactcagcagaccaatcagagttgctcaaagagagatgaccaggtgaattctaattcagctgagagagactgctgtcagagctcatttttggagccttttactaaaatactagaatctaccttgtgttctcagtacccactgagatggccctagattccacctctaggatggctgaactcatgtgataaattcctcttttgtcttttttcagtaacagctttatcgagatagaatgcgcacactgtacaatttatgcatttaaagtatacaatgtagtggtttctagttacaaagttgtgcagccgttaacataatcaatttcagaacacttgcccaaagaaacactgtgtccttaagcaatcataccccattttccctcaaattctaacccctggaaaccactact

SEQ ID NO: 722522 - DNA, 668 bp, Homo sapiens
gaacttcctactgtatgwctacaaaatgccagctgtctccattgcttctgagtcaccacattgctgcagtctcactagagacttggagctgtgtctttcattaggagagcagaagcaagcccagctgttgcttgcacaccccaacatctaccttgtaatctcaagcttttaggtgctgttggtagaatccctgtttcatcttcttctcctgactggcaagatcccctcaagttgggaaagcatagcatgctgggtacttggaactcagcagaccaatcagagttgctcaaagagagatgaccaggtgaattctaattcagctgagagagactgctgtcagagctcatttttggagccttttactaaaatactagaatctaccttgtgttctcagtacccactgagatggccctagattccacctctaggatggctgaactcatgtgataaattcctcttttgtcttttttcagtaacagctttatcgagatagaatgcgcacactgtacaatttatgcatttaaagtatacaatgtagtggtttctagttacaaagttgtgcagccgttaacataatcaatttcagaacacttgcccaaagaaacactgtgtccttaagcaatcataccccattttccctcaaattctaacccctggaaaccactact

SEQ ID NO: 722523 - DNA, 668 bp, Homo sapiens
gaacttcctactgtatgtctacaaaatgccagctgtctccattgcttctgagtcaccacattgctgcagtctcactagagacttggagctgtgtctttcattaggagagcagaagcaagcccagctgttgcttgcacaccccaacatctaccttgtaatctcaagcytttaggtgctgttggtagaatccctgtttcatcttcttctcctgactggcaagatcccctcaagttgggaaagcatagcatgctgggtacttggaactcagcagaccaatcagagttgctcaaagagagatgaccaggtgaattctaattcagctgagagagactgctgtcagagctcatttttggagccttttactaaaatactagaatctaccttgtgttctcagtacccactgagatggccctagattccacctctaggatggctgaactcatgtgataaattcctcttttgtcttttttcagtaacagctttatcgagatagaatgcgcacactgtacaatttatgcatttaaagtatacaatgtagtggtttctagttacaaagttgtgcagccgttaacataatcaatttcagaacacttgcccaaagaaacactgtgtccttaagcaatcataccccattttccctcaaattctaacccctggaaaccactact

SEQ ID NO: 722524 - DNA, 668 bp, Homo sapiens
gaacttcctactgtatgtctacaaaatgccagctgtctccattgcttctgagtcaccacattgctgcagtctcactagagacttggagctgtgtctttcattaggagagcagaagcaagcccagctgttgcttgcacaccccaacatctaccttgtaatctcaagcttttaggtgctgttggtagaatccctgtttcatcttcttctcctgactggcaagatcccctcaagttgggaaagcatagcatgctgggtacttggaactcagcagaccaatcagagttgctcaaagagagatgaccaggtgaattctaattcagctgagagagactgctgtcagasctcatttttggagccttttactaaaatactagaatctaccttgtgttctcagtacccactgagatggccctagattccacctctaggatggctgaactcatgtgataaattcctcttttgtcttttttcagtaacagctttatcgagatagaatgcgcacactgtacaatttatgcatttaaagtatacaatgtagtggtttctagttacaaagttgtgcagccgttaacataatcaatttcagaacacttgcccaaagaaacactgtgtccttaagcaatcataccccattttccctcaaattctaacccctggaaaccactact

SEQ ID NO: 722525 - DNA, 668 bp, Homo sapiens
gaacttcctactgtatgtctacaaaatgccagctgtctccattgcttctgagtcaccacattgctgcagtctcactagagacttggagctgtgtctttcattaggagagcagaagcaagcccagctgttgcttgcacaccccaacatctaccttgtaatctcaagcttttaggtgctgttggtagaatccctgtttcatcttcttctcctgactggcaagatcccctcaagttgggaaagcatagcatgctgggtacttggaactcagcagaccaatcagagttgctcaaagagagatgaccaggtgaattctaattcagctgagagagactgctgtcagagctcatttttggagccttttactaaaatactagaatctaccttgtgttctyagtacccactgagatggccctagattccacctctaggatggctgaactcatgtgataaattcctcttttgtcttttttcagtaacagctttatcgagatagaatgcgcacactgtacaatttatgcatttaaagtatacaatgtagtggtttctagttacaaagttgtgcagccgttaacataatcaatttcagaacacttgcccaaagaaacactgtgtccttaagcaatcataccccattttccctcaaattctaacccctggaaaccactact

SEQ ID NO: 722526 - DNA, 1475 bp, Homo sapiens
ttacttgattttattttttgcaaatatcttttctgagcctggcttatcttttcactttatttgctttgtgcagaagttttcatttaaatgtaatcaaatgtatctatcttttgatgttcctttagtggaatttttggtgtctttttaataaattatatcattccttttttttggtctagaggaagatgggaggttttcatgttggccggtatgtaggtatatgtgctgagaaatattatgtcaatagtgcccaaattccaggtgttatgtttctttgtatttgggaggataatgtatgttaatctgtacattaacctggagtgaaagttctagaataccccataccattggtcacctaaaaaggtaacccatataacaagtccctgaatctttatagggttactttcccaccctctggaatgcatgtcttgccaaagtctccaatatcctagccacttttttttttttttttttttttttggagatggagagtcactcttgttgcccaggctggagtgcaatggtgccatctcggctcactgcaacttccacctcctgggttcaagcaattctcctgcctcagcctcctagtagctgggattacaggtgcctgccaccatgcttggctcattttttgtagttttagtggagatggggttttgccatgttgggcaggttggtgttgaactcctgacctcaggtaatccacctgccttggcctcccaaagtattggggttacaggggtgagccatcaccgcacctggcccacttcttttttatccagtcaaattaccatgactttattcataatgtagcccaacagaatgttctgaaaggtgactagtaggcctgtgtctcttagattacattaaggagagagtagaatagttgacacagcccttattcaagcatggaaatgtacattcttgttcattccaagtgactgcaaaatatttctgatctgattttctgataaggataaaataatgtatttggtagatcaatagccacacaccatgtgcccaaggctatgtcagtctgctctagtaaagatactacaccaggcacagcaactgccactgggctactatgyggttgagtttcttgtcattcactgttgacctctaggattaggagccagactagtgaattgtaaggaggcataatgaagcacccccttgtactttttctttaagaatggcactaatttctaccattctcttgaggatgtgatattggttttgattaattatattggctggtgagtgggtgggggaaaggaggccagtttcaggggtttctatttgctttttcccactataatagctcttatccctaggccaagaaaccagtgtaggaattgtgctaatgaccactgcaggtatttgtagttcagtggttgtaacatgagctaaaccagggccaggactccacttaatacgtggccccctgagagggtaccatgacgctgcta

SEQ ID NO: 722527 - DNA, 1184 bp, Homo sapiens
atctttcatccacaatttcagcaaatatcgttcattttaatttctcactggtcataaggaagagattaaatgtgaagcatctactgtgttctaggttttatgtagactatttcattgaattatcccaataattattattctcgctttatrgatgagcaacccaggcctagaatagcacacctatgggaaacaggctccagctgaatctggactctacaactctatgctccagagagtccccatgcccatcgttcattcacttcactgtgctgggtgtcctgcaaacccattcccaaacaccatcttgcttgacagtcataccatgccaggggtgtagggacttccttcatcctcatttgcagatgtataaactaaggcactgagatcgtcagtgacgtgccccaggtcacacagctggttgccatcaaggccaggattcaaactcacatctccagtcctcaaagtcaatttcaccatgttgggctgttttcagttagtaaatagcatccttcagtgtaagactcagaggtcagtgaagcttgccaagcagtgccaggcaaatcaatgggcagcctaaccaaggggaggttaggaccactcagaggaggttcatttgcattttgacacctaaattaggaaaaccacatcttggctttcatcttcaggaaactgttagagggtgctatttaacaaacaccctctttccagcttttaaattgagaacgaacatgggagccagagtatggcactgttaggattaggaaggctacactggacaactctaacatcccttttgcattctagaacttgataccttattatcccaaccaatacttcaagcaccggcagaaatgatggaataaagagagcaaagatctgattgagcatggcacacatagaacctatctggtctgtttactgcatagaaactaaagctcccaatgctgttggctctagagtgactctatcccatggctaactcgcccacagatggcaggctttccccagactcatcccctacacttgtcattgagccttccttggggaagatataaagtgtctgtgtgtgtatgagagagagaaagagagaaagagagggagggagagagagattgtaggtgttccctctgaaccaatagaggaaacaggaaataggaagctaggggaataagggtttccccttg

SEQ ID NO: 722528 - DNA, 612 bp, Homo sapiens
aaggcagttttgtcctttcttgtactttgagacgacgttttgctctgttgcccaggctagagtgcagtggcactatctcggctcactacaacttctgcctcctgggttcaagtgattcttctgcctcagcctctggagtagctagaattacaggcatgcaccaccatgtccagctaatttttgtatttttagcagagacaaggtttcaccatgttggccaggctagtctggaactcctgacctcaagtaatccatctgcctcggcctcccaaagtgctgggattacaggcgtgagccgccatacacagccttacagaggcagttttggtcatcaagcaagaagggggttagttttgggaagggattgttatcatctctgttttaaagttaacaaaggcagttagcttgtgaagttggagtcagttagcttagatttctctcrctgatgcactttttgtaaaggtggtttcaccctgtgcccatggaccttccttccaggggtcaccatttatgcctctcacctgctatgtctctcaggttaaaagttcacattcctaggagaaaagaatctgactggcaagcttcagtcagatgctctttggtccagtgagc

SEQ ID NO: 722529 - DNA, 632 bp, Homo sapiens
taagaggaagaacagaaaaaaaaagtcatgtttctttgtaatgctattcaattatttcctttgcaaatctgcttactgaagatttgcaggtgcagaagtcatctaatgtgtccatttgctgagaaactacattgcattttaactgcttctagggactatatcttcagccttctaaatgagattgatgtgacacatttataggtattttttwaaaaaacaatatgtgctggaacagcaaagattattttttaatagagaggagaaatcagaatcctgctgcatatgcttaatgtttttcaaaagaaaattagaagaaaagatccacttggaacttcaaactgaaatttttctttttttttcctgatatatgaaatgtcaacatatttcagtacagcaaagagaatcttagagaataggacagtttaaattggtcatctaagcttaaatggctacaatagtatgttaattgaatcgtttttcttttttagggtcctctagggcctccgggacaaaaggtagagtataaacaacaatattgtgaaagtaattatgctctcatgacctaatggcaagcaggagaggtgaatgaaattagctactgtaagccatgctgaagcagttagtctggtttg

SEQ ID NO: 722530 - DNA, 627 bp, Homo sapiens
tactctttggaatagaagacttcaaaagttttgccacacacagaaatayacacaaacaacatttgaaaattacacagagaaagtactcctccaagagaagaaataatttcagaagagtaaataatgacagaagacatgagggatgtgcaaatacatgacagtacctttgtgttttgaaagagaatgatgtcaagcttacaaggaagatacaaaaaattaatatctttacatgttttatcttttccaattttaccctcttttgtttgtttgtttcttccatgagacttcttgggaaagagacaataatgcagaaactagtaaatatctgatcatctctgtgtccttgtctccagctggagacccaggagcgaagaaaagagagacacagcagaagagatgagaggcgatgctgagaggagctccatgccttcttctcaggtagagattttgggaactggcaaaaacccagagaggaatgcgagattcaagagcaaagaggaccttcctcagtagactccagagcatcagcaagaggaaatgcatgccaggtttaggccaatgaactcatcttgtagacactgacatccatggatggaaaccagagaatgatctccatggccatgcatg

SEQ ID NO: 722531 - DNA, 637 bp, Homo sapiens
gaagtttcttcaatgaaaaactctaagaaaaaatttagaatatttaaagtaatatttgcactgtattcaaaaaataaaaataaccatggagcatgagagaagcttattaggaaacaagaaaatattttatctttcacatttctggttcatttttagcagtgacagtttacattgacataaaaatagcctagtctacgttgattttccttttttccagaacactgacctacaaatgattatgtgaaagcattatgtgacttttaatgctgtctagtgtgggtatttaagttgtctatcccaaatacacttaaatttagacaggtactgaatcctatttttcacatattctttaccacatacagtgtacggagtcaaaaggtaagggaccaacgtctgattctactcctcactagatttgaattcagacaattcacctattcttgtctagacacgttccactacagttttctaactcccttagataatttttctgtgagaatcacatttattttaaaaatttaaagatttttgcaaagcaataaacaaatgctactaaaagttattactgtatcttcttactamatttctttttctgttttccagctttattaaggtattattattattattattatat

SEQ ID NO: 722532 - DNA, 2229 bp, Homo sapiens
tctccccaccccaccatccctgtgagtgtgaccttatttggaaacaccatctttgcagatgatcaacttaggatgagggcagtgggttgggccctaattcaattatgactgtgtccttataagaaggaacaatttggatatagagacatgcgcacacacagggagcctgccacatgaagatgagggcagagattgggggatgtagcaaaagctaaaaaatgycaaatgccaaagattgtccacaaactatcagaaggcaggagagaggcaaggaacagattctgcttcacagtcctcagaaggaaccaaccctcccaatcctttgatctcagacttctagaccccagaactgtgagataatacctctccgttggttaagcacagtttgtattactttatcatggcagccctaggaaactaatacaccacttaccaactttaccttctaactctatcattgcctttctccctgactagaatggaagctccatggggtcagggctcttcatctgttttgctcatgcctgaattctcaacatgtagaacaatgtctggcatatgatagctcccaatatttgttgaaaataaggaatggaatttttcatataaacctagacattgttttcatttgaaaacaccctacataaaaatgctcccaataataaagcaataacggaaaactttaacaacttaagaatacactaccctctggctactctgagagggggatcctaaacccttagaagctgtaactattgctgatttctacacctcactagtgacagggtgcttgggactatgaacgcatacatggaagttagcggaggccacccctcggggcttccctttgctgcttctggctttttactctgctttttttctgaacaaagtaaagtaaggtcaagaatacagaacccggccaggcgtggtggctcattcttgtaatctcagaactttgggaggctgaggcgggcggatagcctgaggtcaggagtttgaggccagcctggacaacatggtgaaaccccgtctctactaaaattagctgagcgtggtggtggacacctgtaatcctagctactcaggaggctgaggcatgagaattgcttgaacctgggaggcagaggttgcaatgggccgagattgtgccactggactccagcctaggcaagagaacaagactcagtatcaatcaatcaataaataaaaatacaaaactcttctcctcctcatctccattaccttcctcttagtatggccccaaatatttgagtggttgaatgcatgcgttctggacttataagaggataattcccctttctgttttctcctcatcacttgaaaaaaatagaaaatgaagaaagcattcacacctacaagaactcgtccagttttttagtttttttttttctcagtatactcagcatttctcaacagtcctgagaggtaggtattatttgaaggtgagaaaacaggcagagtgtttaccaccttgcacacgacatgaagaaactgcaaggcgtaggagccaggcctcctaaatctcagtccagtgctccttccgttccgctggtcgtcactgcacacgttttctctttttatgtctgggtgaagaaagagtgggtcccagaaacatgaaagcgatttggttttgcaatgggaaggaacagagacaaatctgtaggactttcgactcagtagacattccctctagcatttctgaggggattgtgggcgaagaggagaggtctgagttccacggagtaaggactggccccgttcctttcagtgaatggtctttctccaaatacacacgcacacaacacacacaaccgggggcctcagccatgagagttgttcgtgatagaaatggtctaccagattaccatgacaggcactggggaccagttgtagttcaaagaaacgagagatgagggcactacaaagaggcagggattaaacaaacaaaaacagcaacaacaacaacgacaacaataaagaatgaagattattcaaccagaaacgacaatgagggtggggagaagatagaggatgaagacagcgcagggttgggagtagaaagaccacattcttgtgctggatgttcaaggatcaccgtgaggagagtgagggcggctttgcccttttgatgttgagttaaactgtaatacagattttccatgtaagtactccgtcattttcaggtggcaaccggataaactttaggtg

SEQ ID NO: 722533 - DNA, 594 bp, Homo sapiens
aggaatttcctcctttcatggaaacaacttgccctcccgtccaccgtccactccattccccattcactgtccattgactcatttgaggaactatcctatgaacaccttccaggtgctacgcgttgcggtcagcaggtcacaggacacagctcctgtcctctsggacctccaggacagcagaggagacaccagcagaggtcctcgtgaagtgatcatggctctgggggcaaaaagaggacatatcagccgagacttgggcgcaggggtggcgaggctggggctgagacggaaagactggctgcggaagagatgggaggaggacaggggctaggcccttggcaggggctcggcagaggggaaagcctggaaaccaagtgggctccaggcagagggcaccgagggggccgcgggaagaggccagacccgaaagtcctcgtcaacagcgccacagagctcgggcatcacccggggtcacggtgccccccagcaatttcttctacttttcactgttttgttattatagaagtaatacatgtctacaacttcattgtaaagaaaaatgagagcgagcaataggaaaaaaataatcagcca

SEQ ID NO: 722534 - DNA, 594 bp, Homo sapiens
aggaatttcctcctttcatggaaacaacttgccctcccgtccaccgtccactccattccccattcactgtccattgactcatttgaggaactatcctatgaacaccttccaggtgctacgcgttgcggtcagcaggtcacaggacacagctcctgtcctctgggacctccaggacagcagaggagacaccagcagaggtcctcgtgaagtgatcatggctctgggggcaaaaagaggacatatcagccgagacttgggcgcaggggtggcgaggctggggctgagacggaaagactggctgcggaagagatgggaggaggacaggggctaggcccttggcaggggctcggcagaggggaaagcctggaaaccaagtgggctccaggcagagggcaccgagggggccgcrggaagaggccagacccgaaagtcctcgtcaacagcgccacagagctcgggcatcacccggggtcacggtgccccccagcaatttcttctacttttcactgttttgttattatagaagtaatacatgtctacaacttcattgtaaagaaaaatgagagcgagcaataggaaaaaaataatcagcca

SEQ ID NO: 722535 - DNA, 1355 bp, Homo sapiens
ggagattcatttccgattgttgcgtttcctcttagagcattgcttggtcatcgtgttctgagtggtccattggcctccatgtcccttttggggtggatatttgctcagtgacttttgagcagctggatctcctgcttcggcaggtgagtgaggggatggatggctccgcggactggcccccgccccaggagaaagagtgcgtggccgtggcaacgctgaatcttccccgacttcaggtattcgtgatttcccttcctcttgctccttttataagtgtcttagcgatttgtaagaaggtttatgtattttgaaggacataggttttagcctgytgggggaagtattttaaagtaagattgtaatgcactaataatggacgcaaggcttaaaaaacttgatctgtttattttatgtttgtcctggaagtcagcctcggcatgcaggaagagtgtatatggattgtgttatttttgctataatcattagtttgttggtattcttactgttttactgttgttgcgtgtggagaaatgactgggtgagatcacaggtgatggagagagacagcgctcagctgagagaccagtgctggcctgtctctcctctgtcctgtgaaaaccctgctcccaggagggtccagtcttttggtttcctgggccacactggaagaagaattgtcttgggctacacataaaatacacttatgatagctgatgagcttaaaaaaagaatcccaaaaatatctcatgatgttttaagaaattttactttgggccacattcaaagctgccctgggccacatgctgccctcggggccgtgggttgaacaagcttgatctactcagtaagctcggctcccaaagcaataccttcctttcctcaccatgaaggctgtggttagggtcaaaataaaagctacaaaagccttcctccctagcaaaactaaagctgaagtgtttgatcatcatcttttgtctttgtaataaaaccctctaacttaatgacaagaaccacggttttctcgacatagtaatttttcccttttattacagtggtttcttgtaacaacccgtcatgtccctcttccagcccctcccctttttgccctgcttctagaatgtacagaactgagtgtagtgtttagatgcagtaatgaactgagcagaggtctggagcatgcttctcctctagtcctctgtagcactcatttatcaccatatctgtggcatcctggcgtttgcgtggttgcgccccaggtgtttgctgcccctcctggtttgcggtgatgtgtctgttctggtcagtgctgtggggcgtggccttgtgtatgtcttaggctgtcgaggtgtcccagc

SEQ ID NO: 722536 - DNA, 1392 bp, Homo sapiens
cacccagctaattttttgtatttttggtggagacggggttttaccatgttggccaggctggtcttgaacacctgacctcaagtgatctgaccgcctcggcctcccaaagtggtgggattacaggcgtgagccaccatgcccagccctcgagctacttctaattcataagttaaatacctgagttatgttaggcagaaaggcaatagataatattacaaaatgcataaccttattctataagacttccttctacaattatcttaaaataaaataatttctatcctcaagtaagcctctgattctgaagtaagttttcttattgataccacaaagggattaaagcatcatttaggaacaataagttattttccttgactatgtagagtgtttatagtagctaaatttataactttgaaaaatctaaagtaatgttttatgatttttttctaacacctagctatggaagtgaattttagggacccttcctaggagagaaactggttaagtgttatcaaaacacagatcagttatacatactgtatccaagtaataagctttgctgagtagtacgccataagtgcctcaccccatcccaatttttctgcagcctgttaaactgagattttattctcttagttgcctattaagtacctggaagccaagtcctgaccctttctcttcatagccatgtgatccttaggactcccaacacttctctaaagtccgttgtagtgttaaatatgtgtaattcaaagaattacaaatcagattgctttgataatgttgtactgtttccggggagcatagaaagctgctctgctttaccctgatctaaagctgaaagaggttttgtctgtaggtttctgaccactcactatctatggctccgagaaatagtactgatttattgtgagagagcctttcatgttagggcaaaccccccaaaaagagcaggagattgaaacgtttatttttatttcatataaatagtttacagacttcttttttcccctatataggcttatgcttgattgtgttttggtagtccagatttatattgtttcactaacaaactgtgagcttgagcagatcactttttatttactgtcctgtagtttcctcatctgtaaaacagagatactaatagtacataactaatgggttgttgttatggatttcaatgagttagtatttataaaacacttagagcagtacctgatacatagtaagtattcagttaatgttagcagtaagtatgaaagacaatattgtatggtggtgaagtcctcaagtcaggkggcttgggtgccattcctagctctcatctttactgatgaaaccataggaaaattgttaaaacctgctgagcttcagttttttatttacagaatg

SEQ ID NO: 722537 - DNA, 926 bp, Homo sapiens
atagaagagtttctttgtttgtttgctatattaaaaatcttgtatttgctagaggcagattttaactcctcaaaaacataatacaattacccattctattccaacagcagtaccatctgatgatttatggtatcagagttataggcacttcgaacttgtagaataaacatgactgagttttcctcgtggaccggggaggaagaatcagtaactattcagcaaaggcaatggaaaaattggtccctaagccaaaatayatgttgtactccagggttctaggaactttggtgataactgttttcagtggaatctccaaaggctgaggtaatcatataatgttcattattagtctcaaattaaaagtaaactgtatttcatttttgttttcacattaatgccaaacaatacataatgtttcagatgtttaatttgaaagggaattgtatctatgtaaagctagaaccaattttagttgtctccccagaggactatattttcctaaagaatgtgagagacatacacattcttaaactcatttatccataacctcaaaatatggaaaatataaaaatgtactttggaaacagtagtttaaagagggtagatctaagaaaaatatcaatagttgtcaaatagtaaaatatagttataaattaaagtcctttgaaataatgtctttggatgattttttaaaatatatcatttttatttggtttgaactttaattttgtcttatctctcatagatgatttgaaaatgccccgctcttgatatctacttataatatatgatggataagagtttaaaaaaaactatttccagctttttaaaatgctatatttgttgattaatatgctgaccacttcagaccaatttggtttaacttttatgtaacaaagttgagagttggttttcattgccatgga

SEQ ID NO: 722538 - DNA, 926 bp, Homo sapiens
atagaagagtttctttgtttgtttgctatattaaaaatcttgtatttgctagaggcagattttaactcctcaaaaacataatacaattacccattctattccaacagcagtaccatctgatgatttatggtatcagagttataggcacttcgaacttgtagaataaacatgactgagttttcctcgtggaccggggaggaagaatcagtaactattcagcaaaggcaatggaaaaattggtccctaagccaaaatacatgttgtactccagggttctaggaactttggtgataactgttttcagtggaatctccaaaggctgaggtaatcatataatgttcattattagtctcaaattaaaagtaaactgtatttcatttttgttttcacattaatgccaaacaatacataatgtttcagatgtttaatttgaaagggaattrtatctatgtaaagctagaaccaattttagttgtctccccagaggactatattttcctaaagaatgtgagagacatacacattcttaaactcatttatccataacctcaaaatatggaaaatataaaaatgtactttggaaacagtagtttaaagagggtagatctaagaaaaatatcaatagttgtcaaatagtaaaatatagttataaattaaagtcctttgaaataatgtctttggatgattttttaaaatatatcatttttatttggtttgaactttaattttgtcttatctctcatagatgatttgaaaatgccccgctcttgatatctacttataatatatgatggataagagtttaaaaaaaactatttccagctttttaaaatgctatatttgttgattaatatgctgaccacttcagaccaatttggtttaacttttatgtaacaaagttgagagttggttttcattgccatgga

SEQ ID NO: 722539 - DNA, 926 bp, Homo sapiens
atagaagagtttctttgtttgtttgctatattaaaaatcttgtatttgctagaggcagattttaactcctcaaaaacataatacaattacccattctattccaacagcagtaccatctgatgatttatggtatcagagttataggcacttcgaacttgtagaataaacatgactgagttttcctcgtggaccggggaggaagaatcagtaactattcagcaaaggcaatggaaaaattggtccctaagccaaaatacatgttgtactccagggttctaggaactttggtgataactgttttcagtggaatctccaaaggctgaggtaatcatataatgttcattattagtctcaaattaaaagtaaactgtatttcatttttgttttcacattaatgccaaacaatacataatgtttcagatgtttaatttgaaagggaattgtatctatgtaaagctagaaccaattttagttgtctccccagaggactatattttcctaaagaatgtgagagacatacacattcttaaactcatttrtccataacctcaaaatatggaaaatataaaaatgtactttggaaacagtagtttaaagagggtagatctaagaaaaatatcaatagttgtcaaatagtaaaatatagttataaattaaagtcctttgaaataatgtctttggatgattttttaaaatatatcatttttatttggtttgaactttaattttgtcttatctctcatagatgatttgaaaatgccccgctcttgatatctacttataatatatgatggataagagtttaaaaaaaactatttccagctttttaaaatgctatatttgttgattaatatgctgaccacttcagaccaatttggtttaacttttatgtaacaaagttgagagttggttttcattgccatgga

SEQ ID NO: 722540 - DNA, 926 bp, Homo sapiens
atagaagagtttctttgtttgtttgctatattaaaaatcttgtatttgctagaggcagattttaactcctcaaaaacataatacaattacccattctattccaacagcagtaccatctgatgatttatggtatcagagttataggcacttcgaacttgtagaataaacatgactgagttttcctcgtggaccggggaggaagaatcagtaactattcagcaaaggcaatggaaaaattggtccctaagccaaaatacatgttgtactccagggttctaggaactttggtgataactgttttcagtggaatctccaaaggctgaggtaatcatataatgttcattattagtctcaaattaaaagtaaactgtatttcatttttgttttcacattaatgccaaacaatacataatgtttcagatgtttaatttgaaagggaattgtatctatgtaaagctagaaccaattttagttgtctccccagaggactatattttcctaaagaatgtgagagacatacacattcttaaactcatttawccataacctcaaaatatggaaaatataaaaatgtactttggaaacagtagtttaaagagggtagatctaagaaaaatatcaatagttgtcaaatagtaaaatatagttataaattaaagtcctttgaaataatgtctttggatgattttttaaaatatatcatttttatttggtttgaactttaattttgtcttatctctcatagatgatttgaaaatgccccgctcttgatatctacttataatatatgatggataagagtttaaaaaaaactatttccagctttttaaaatgctatatttgttgattaatatgctgaccacttcagaccaatttggtttaacttttatgtaacaaagttgagagttggttttcattgccatgga

SEQ ID NO: 722541 - DNA, 926 bp, Homo sapiens
atagaagagtttctttgtttgtttgctatattaaaaatcttgtatttgctagaggcagattttaactcctcaaaaacataatacaattacccattctattccaacagcagtaccatctgatgatttatggtatcagagttataggcacttcgaacttgtagaataaacatgactgagttttcctcgtggaccggggaggaagaatcagtaactattcagcaaaggcaatggaaaaattggtccctaagccaaaatacatgttgtactccagggttctaggaactttggtgataactgttttcagtggaatctccaaaggctgaggtaatcatataatgttcattattagtctcaaattaaaagtaaactgtatttcatttttgttttcacattaatgccaaacaatacataatgtttcagatgtttaatttgaaagggaattgtatctatgtaaagctagaaccaattttagttgtctccccagaggactatattttcctaaagaatgtgagagacatacacattcttaaactcatttatccataacctcaaaatatggaaaatataaaaatgtactttggaaacagtagtttaaagagggtagatctaagaaaaatrtcaatagttgtcaaatagtaaaatatagttataaattaaagtcctttgaaataatgtctttggatgattttttaaaatatatcatttttatttggtttgaactttaattttgtcttatctctcatagatgatttgaaaatgccccgctcttgatatctacttataatatatgatggataagagtttaaaaaaaactatttccagctttttaaaatgctatatttgttgattaatatgctgaccacttcagaccaatttggtttaacttttatgtaacaaagttgagagttggttttcattgccatgga

SEQ ID NO: 722542 - DNA, 926 bp, Homo sapiens
atagaagagtttctttgtttgtttgctatattaaaaatcttgtatttgctagaggcagattttaactcctcaaaaacataatacaattacccattctattccaacagcagtaccatctgatgatttatggtatcagagttataggcacttcgaacttgtagaataaacatgactgagttttcctcgtggaccggggaggaagaatcagtaactattcagcaaaggcaatggaaaaattggtccctaagccaaaatacatgttgtactccagggttctaggaactttggtgataactgttttcagtggaatctccaaaggctgaggtaatcatataatgttcattattagtctcaaattaaaagtaaactgtatttcatttttgttttcacattaatgccaaacaatacataatgtttcagatgtttaatttgaaagggaattgtatctatgtaaagctagaaccaattttagttgtctccccagaggactatattttcctaaagaatgtgagagacatacacattcttaaactcatttatccataacctcaaaatatggaaaatataaaaatgtactttggaaacagtagtttaaagagggtagatctaagaaaaatatcaatagttgtcaaatagtaaaatatagttataaattaaagtcctttgaaataatgtctttggatgattttttaaaatatatcatttttatttggtttgaactttaattttgtcttatctctcatagatgatttgaaaatgccccgctcttgatatctacttataatatatgatggataagagtttaaaaaaaactatttccagctttttaaaatgctatatttgttgattaatatgctgaccacttcagaccaatttggtwtaacttttatgtaacaaagttgagagttggttttcattgccatgga

SEQ ID NO: 722543 - DNA, 590 bp, Homo sapiens
tcttatattttttgtttcatttaatgaaaatggttacacttttaaaacaaactatgttctatacagatgaggatacattttttctgtgtatattttggccatttgttttataatgaatctgggcagaatcctcactaattgcatgaaggtgttctgagaccttagttgacttcccatttcctattgatttgccatcatcaagaaagtgacttagctgctcttagaaaacatactgtcattaaaattaatgatgacrttgcccacttttaaaataacaagaaaatatatttcaggtttttaaaaatagataattgttagagaattatgaatccagagccagattcagacacaaaaaattggtggtagaatttatttaaagataaatatccattatttatcattttcctgcttcctgcctcctgtccctagtctctctaattccatactcttctcatatacttatttctcatctaaggtaagaatggttaattactttttaaaacattatttttgaaggaacaactttatttgcataaaggtcaacatttttaaactaaatttattcattaaaataagagacagatagcttc

SEQ ID NO: 722544 - DNA, 590 bp, Homo sapiens
tcttatattttttgtttcatttaatgaaaatggttacacttttaaaacaaactatgttctatacagatgaggatacattttttctgtgtatattttggccatttgttttataatgaatctgggcagaatcctcactaattgcatgaaggtgttctgagaccttagttgacttcccatttcctattgatttgccatcatcaagaaagtgacttagctgctcttagaaaacatactgtcattaaaattaatgatgacgttgcccacttttaaaataacaagaaaatatatttcaggtttttaaaaatagataattgttagagaattatgaatccagagccagattcagacacaaaaaattggtggtagaatttatttaaagataratatccattatttatcattttcctgcttcctgcctcctgtccctagtctctctaattccatactcttctcatatacttatttctcatctaaggtaagaatggttaattactttttaaaacattatttttgaaggaacaactttatttgcataaaggtcaacatttttaaactaaatttattcattaaaataagagacagatagcttc

SEQ ID NO: 722545 - DNA, 588 bp, Homo sapiens
tgccatataatctttatttctgcatcatgcttattacaattacaattatttatccagtcatctgcctaattcttatcccctctgctggatgtaatgyttcactaggcaggaacaatgtctctcgtttcctgacacatagaaagctgccaatgtttatttattgaataatcagtatttggagactgaatttcaagattgtcatatctaaaaacttaagagtattagacctttatcagtctttaaatccaaactggtccaacttcaattccaatgcaggaatcctctcttaaagtgcttaattgaggacaatctggttgttccttgaacacttccaatgaaggatcagaaagcaatttgtgagacatgatattctatcattcactacttgttagaaaatgcttctgttgaatgcctcctataacttctatccatgtaccagttccaatctcagaaacaatccagaaggaatccattccttttctattctgtattttaagtgtacttaaaatacggcaagatagccataacgtgctgtagtaagcctctcttcctccaggcttaatgccttggtcctttcacctattcctt

SEQ ID NO: 722546 - DNA, 1413 bp, Homo sapiens
ttatttttaatataattcctcaatattggtttagagctatgttaaagactatgtcaagatttcaggaaatcatttgacagaatttcttatamtatacttttaaaacatgaagaaatttggtctgggtgatttactactgggtagactcaggatttctataatgagcatcaccaaatgggtattgttaatgaatccatttattggaagggagatagctaagggtgtgttaaagggctctgcctcatatctttcctattcaaatatatgtagttagtgtcttcagtgaagaacttgtctcattttggggtgacataaaactgagatggatattgaataaagtatttagaggctaaaagtttaagaataccttccaaagggtggaattctgagtcaaacttaaactctacaattaataaagttaaatgtaaatgtaaacaatgtttaaagaatgaacaaacccagaacagacaaaattataggtacacagatatgcctgtgtttcaaagacaatagccaatagtgacagaaaacccttatatagcatttactttgtgaaaaatacttttgtggctatttatgtttcctttcctaatcacaacaactctatgatgtaggtatgacatttctcaccgatcattgatgaacaaagccaagatgtggaatgttaaaatgactgcatggatgagaagataagcagtctgactccagaatctattctatccatctattgtatccaacaacatggctaaatggctaaaccattcaatgtgcttttgagttgaagaaataaacgaataggacaaatccaaaccaagacagaagccatgcagtaataaggctttgtctgaattaccattatcaaatacaggctaactctttaagagacattgtaacaaacaagaatatgttcagagagggattgagactgtatagagtgtaaattatggaaaggatcaataatcaaaagaactgaaaatatactgataatattgaaactgaaatgagaaaacgtgaagactacagtagacgtctttagagatttgaatctacatcacgtagaaacgaggtccgtgtcattttgtgtgggtcaagagagaagagccttggtacagttaatgaatggtagatttggggttcaacataagtaataatttcttaataattagatagacttatgtaataattaatgggatcccttattggataaatatgtttttaatactacaggcatttattgaaggatgcttaataatatgtcaaaaacattgtggagtttttacacacatagctgaattcagattacatgatcttaagcattcacaggtctaagagtctaagatttcatgaatctcaaaagaagaagcaaagtgatgtcacttcccttagtcagataccaccagaaacacatctata

SEQ ID NO: 722547 - DNA, 957 bp, Homo sapiens
gctttagaatgatggatatcctggcagaccccttactattcgatctttaaaaacttcactgaaattgcagttccttgaatttgtcatagggtatatctccaactttctggaatataagtgtcttarcaggtttcccacatgctagccacctcctgttcatcctgcctagtttcctcaatattactgatataaaagattggcttgatattctatgggatgtccagggagtccaaatctccttcagactatgacacagaatgggagaatttatatagtcctgcggcaaaactataaatgaatagtatgtgttccacaaaactaaactctttctaatttgtttcctaattggaatcaaaaagaacacttttgtcaaatcaatggctgcctgcagtgtacatgtggcctcattcatctgctctacaatgaccctaggtatggcactgcagcttcaatttggacttcttgcagtcttctacaaaaattgttcaaagtccttttattttgcagcagggagtggggcagactgtcaaaataaagagaggcaggaaccaccaccacgtccttcaggattacaacggtggcaatactctttatgattctctttgagaatataactctggttttgatcagctgtattgatggtggttggagggcaatttcagaggtttcctaagatagtgtttacttgagcccaagaattcaatgtagggattactccaactgctaaggatatccattttaactctctactgtgggactcagaaaatgacctctgggtgggtctgcagatgcaatctgtgacccagactttatccagggcaccagtttttacttgttcctataagccccaactcaagcaagggtccatgatgatggtcacccttttaagtgcccatagatccaatggaggaaaaactaaagggatcatcctggtcttttctttccacagtgttgcaa

SEQ ID NO: 722548 - DNA, 3770 bp, Homo sapiens
aaacagctgggagagaaggccgttgccaaatgcctcctgtgtgatcagtttcaacccactgagcatcgtctcgcttgcagctggtcgtcccatgatttcggaaacgtaatggtagatcagctatctggaatctgcccagaggtagaagagggtgttggaaaccaagtcttttcattagccaaaaccatatcacaaagaggcaatatgggtgctcctagtcgaacggctgggctgttgactgctttagtaatagacagcttaagttaaatgatagcattcacaaagttccttccatccaactatgaaacaggcccctacctgggcccaatctcctctactctgtacatcagaggccagacgagattgggagcgttcacagtggtatgggtgtaggttgttcacgatgtttctggtagcttttgcccttttaatgcttgttctctttctgtcctctgacaaacgttgtaaaacataaataaggtcaagtgcaccacagaagaccctacctaaggccctgagcagtacaaggttggtgtactttctggagttcaatgatcgcattcatgaagttccttccatccaataccctcttctacctccaggaagattccagatacctgacctagcattacatttccgaaataatgggacgatttatccagagtactcccgaataaatagcgtgaatgttcctagtcctgcttggaagcataagctaccagtgagcttgtctcaggctgtgagaatggataaggacaggtggaagcaatggtgttcttctcagccggaaccccgtgtggtcagtgtgcagcctgacactcgaaactcgttcatcttcctttctaagtcctttcacatggagtccaaccctcgggcagaaccccagattttcttcagtacttcacatgttctctcgttggcctgttccagatccctcttcatgttgcagcacaccaaggctttggattcctccagcaatattcgattacatgagacaagcttcttgatctgagccaccaatttcctgagtgaaggtccaggatccaaacagctgggagagaaggccgttgccaaatgcctcctgagtgatcagtttcaacccactgagcatcgtctcacttgcagctggtcgtcccatgatttcggaaacgtaatggtagatcagctatctggaatctgcccagaggtagaagagggtgttggaaaccaagtcttttcattagcctaaaccatatcacaaagaggcaatacggatgctcctagtcgaatggctgggccattgagtgcttcaacaatacgcagcttaagctgaacaatagcattcaggaagttccttctatccaacaatgaaacaggcccgaacctggacccaatcgcatctactctgtacttcagagaccagacaagattgggagcgttcacggtggtatgactgtagattgttcacgacgtttccagtagcttctgccgttttaatgcttgctctctctctgtcctctgtcaaatgtcgtaaaaaataaataaggccaagtgcaccacggaagaccgtaccaatggcgctgagcagtccaaggttgctgtactttctggagtcagtactcccgaataaatagcgtgaatgttcccagtcctgcttgcaagcataagctaccagtgagcttgtctcaggctgtgagaatggataaggacagatggaagcaatggtgttcttctcagccggaacccgatgtggtcagtgtgcagcctgacactcgaaactcgttcatcttcctttctaagtcctttcacatggagtccaacccttgggcagaaccccagattttcttcagtacttcacatgttctctcgttggcctgttccagatccgtcttcatgttgcagcacaccaaggctttggattcctccagcactattcgattacatgagacaagcttcttgatctgagccaccaatttcctgagtgaaggtccaggatccaaacagctgggagagaaggccgttgccaaatgcctcctgagtgatcagtttcaacccactgagcatcgtctcacttgcagctggtcgtcccatgatttcggaaacgtaatggtagatcagctatctggaatctgcccagaggtagaagagggtgttggaaaccaagtcttttcattagcctaaaccatatcacaaagaggcaatacggatgctcctagtcgaatggctgggcggctgactggtttagtaatagacagcttaagttaaatgatagcattcacaaagttccttccatccaactatgaaacaggcccctacctgggcccaatctcctctactctgtacttcagaggccagacgagattgggagcgttcacggtggtatggctgtagattgttcacgatgtttctggtagcttttgcccttttaatgcttgctctctttctgtcctctgtcaaacgttgtaaaacataaataaggtcaagtgcgccacagaagaccctacctaaggccccgagcagtacaagcttggtgtactttctggagttcaatgatcgcattcacgaagttccttccatccaatacgctcttctacctccaggaagattccagatacctgacctagcattacatttccgaaataatggaacgatttatccagagtactcccgaataaatagcgtgaatgttcccggtcctgcttacaagcataagctaccagtgagcttgtttcaggctgtgagaatggataaggacacccggaaggaatggtgttcttctcagctggaacccgatgtggtcactgtgcagcctgacactcgaaactcgttcatcttcctttctaaatcctttcacatggagtccaacccttgggcagaaccccagattttcttcagtacttcacatgttctctcgttggcctgttccagatccctcttcatgttgcagcacaccaaggctttggattcctccagcactattcgattacatgagacaagcttcttgatctgagccaccaatttcctgagtgaaggtccaggatccaaacagctgggagagaaagccgttgccaaatgcctcctgtgtgatcagtttcaacccactgagcatcgtctcgcttgcagctggtcgtcccatgatttcggaaacgtaatggtagatcagctatctggaatctgcccagaggtagaagagggtgttggaaaccaagtcttttcattagcctaaaccatatcacaaagaggcaatacggatgctcctagtcgaatggctgggccattgagtgcttcaacaatacacagcttaagcggaacaaagcattcagaaagttccttctatccaacaatgaaacaggcccgaacctgggcccaatcgcatctactctgtacttcagagaccagacaagattgggagcgttcacggtggtatgactgtagattgctcacgacgtttccagtagcttctgccgttttaatgcttgctctctctctgccctctgtcaaatgtcgtaaaaaataaataaggccaagtacaccacggaagaccctaccaatggcgccgagcagtccaagcttcctgtactttctggagtcagtactcccgaataaatagcgtgaatgttcctagtcctgcttggaagcataagctaccartgagcttgtctcaggctgtgagaatggataaggacaggtggaagcaatggtgttcttctcagccggaaccccatgtggtcagtgtgcagcctgacactcgaaactcgttcatcttcctttctaagtcctttcacatggag

SEQ ID NO: 722549 - DNA, 630 bp, Homo sapiens
gaatggataaggacagttggaagcaatggtgttcttctcagccggaaccccatgtggtcagtgtgcagcctgacactcgaaactcgttcatcttcctttctaagtcctttcacatggagtccaaccctcgggcagaaccccagattttcttcagtacttcacatgttctctcgttggcctgttccagatccctcttcatgttgcagcacaccaaggctttggattcctccagcaatattcgattacatgagacaagcttcttgatctgagccaccaatttcctgagtgaaggtccaggttccaaacagctgggagagaaggccgttgccaaatgccycctgtgtgatcagtttcaacccactgagcatcgtctcacttgcagctggtcgtcccatgatttcggaaacgtaatggtagatcagctatctggaatctgcccagaggtagaagagggtgttggaaaccaagtattttcattagcctaaaccatatcacaaagaggcaatacggatgctcctattcgaatggctgggccattgagtgcttcaacaatacgcagcttaagctgaacaatagcattcaggaagttccttctatccaacaatgaaacaggcccgaacctgggcccaa

SEQ ID NO: 722550 - DNA, 956 bp, Homo sapiens
aggacacatgcatgtgaatgttcactgcagcattattcacaatagcaaagacgtggaatcaatctaaatgtccatcagtaacaggttggataaagaaaatgtcrtacatgtacaccatggaatactatgcagccataaaaaaggaatgagatcatgtcttttgcaggaacgtggatggagctggaggccattatccttagcagactaatgcaggaacataaaaccaagtactgcatgttctcacttataagagggagctaaatgatgagaactcatgaacataaagaagggaccaacagacactggggtctacctgagggtggggggtgggaggagggagaggagcagaaaaaataactatcgggtactaggcttagtacttgggtgatgaaataatctgtacaataaactcccgtgacatgagtttacctatataaccaacctgcacatgtacccctaaacctaaaataatagttcaagaaaagccactaaatttcagaatgatttatcgtgcagcaactaataatgaatacacagcctttctttagtactggagatggcatgcagtactaaatagtagagcttgagcttgcactgcaatgggctgccctctaacccagtggagtcctgtactacactgctgcatgagtgaggatgaagaccgaggaggtggtaagaggaggtgaatgatgagtgctgggtagtccgtgcatggtagatctgaaatagataaggaatattgaaaggttatctccagcttaagaggctgaaagtttcaaacccaagtttagtgatatagtttggatgtgtgtccccgcccaaatctcacattggaatgtaatcctcaatgttggaggtggggcctggtgggaggtgattggatcatgggggcagatttctcatgaatggcttagctccatccctcttggtactgtcctcgcaataggagtgagttc

SEQ ID NO: 722551 - DNA, 1325 bp, Homo sapiens
tggggatcacttgtagatcctcagggaccaagtccatccttgtccttctacctgctactccacactaggaaaccagagggttcttaacatcaccctcaattcttgcagatgcatccccggagtgttggacttgaaaacctcctggtcccttccatttgcctagtggctttgatacaggcaccaccagggctggatcttttagagaggcccctcagtttggaatgaaagcctccagctaacagcaagtgctcacaggacaacagaagtgtagtacttcactgcaaagcattttgcatccttgagcacttaagaggtaaccttaatgagcacaaaatattcctctctaataagaacatgctgtcataatcaccctccatgtgataaatatcctggaagttttctctttgttaggttaatgcttttccacaagataatttaaccaattctctaaaaaataatcacacgttatcaggccccaatatagtaatatggtgttgtgtgtgtgttttttttaatgttttgaatcttgccttaaacaaattccatccaaataaatgttcccttttttaggtggcaccaaagcttgtgttgttcattgtaaccaagctcgcagttggctaactcctcatctaacagtatgtcttctgatttcatttgagcaaaatttatcatccacaagcaaagacaaaaaatgtgtgaatgtctaaagcttatgtaaattaaggggctatgcatgttattcctaaaaatagtagacaattataggcatttcttccccatacaataattataggcttcctgtcatcttttctattctgtataaggtcacagtagtattatacaaaatttacagtatgttamcagttaaaaacacaataattagcaactgtgcatcttcagcaccagtgatgaatgttcacagtaaaagtttttaaaaaaaatgcattatttgttttatgtggacagtacacacttaaatttaatcatcaactcctgctacccaataggcaatattctctcactattataatgctatttgccaagttcatagtataccctagggctgaattcatccttaacgaagagacaggaagccaaatctctcaccgtcatctcaaccaggtgcaccatattattttaaatttaataattctgttgaacatattgaatgataatgagcaagcttagagaaagtaccaaggattattttgaccattatgatcaacatctgattcaggggaaaaaaaaatcttctcactaaataatgtagggagttcacaggattgcttactatgagtgttattttttttcctcctgcttgttta

SEQ ID NO: 722552 - DNA, 1325 bp, Homo sapiens
tggggatcacttgtagatcctcagggaccaagtccatccttgtccttctacctgctactccacactaggaaaccagagggttcttaacatcaccctcaattcttgcagatgcatccccggagtgttggacttgaaaacctcctggtcccttccatttgcctagtggctttgatacaggcaccaccagggctggatcttttagagaggcccctcagtttggaatgaaagcctccagctaacagcaagtgctcacaggacaacagaagtgtagtacttcactgcaaagcattttgcatccttgagcacttaagaggtaaccttaatgagcacaaaatattcctctctaataagaacatgctgtcataatcaccctccatgtgataaatatcctggaagttttctctttgttaggttaatgcttttccacaagataatttaaccaattctctaaaaaataatcacacgttatcaggccccaatatagtaatatggtgttgtgtgtgtgttttttttaatgttttgaatcttgccttaaacaaattccatccaaataaatgttcccttttttaggtggcaccaaagcttgtgttgttcattgtaaccaagctcgcagttggctaactcctcatctaacagtatgtcttctgatttcatttgagcaaaatttatcatccacaagcaaagacaaaaaatgtgtgaatgtctaaagcttatgtaaattaaggggctatgcatgttattcctaaaaatagtagacaattataggcatttcttccccatacaataattataggcttcctgtcatcttttctattctgtataaggtcacagtagtattatacaaaatttacagtatgttaamagttaaaaacacaataattagcaactgtgcatcttcagcaccagtgatgaatgttcacagtaaaagtttttaaaaaaaatgcattatttgttttatgtggacagtacacacttaaatttaatcatcaactcctgctacccaataggcaatattctctcactattataatgctatttgccaagttcatagtataccctagggctgaattcatccttaacgaagagacaggaagccaaatctctcaccgtcatctcaaccaggtgcaccatattattttaaatttaataattctgttgaacatattgaatgataatgagcaagcttagagaaagtaccaaggattattttgaccattatgatcaacatctgattcaggggaaaaaaaaatcttctcactaaataatgtagggagttcacaggattgcttactatgagtgttattttttttcctcctgcttgttta

SEQ ID NO: 722553 - DNA, 1325 bp, Homo sapiens
tggggatcacttgtagatcctcagggaccaagtccatccttgtccttctacctgctactccacactaggaaaccagagggttcttaacatcaccctcaattcttgcagatgcatccccggagtgttggacttgaaaacctcctggtcccttccatttgcctagtggctttgatacaggcaccaccagggctggatcttttagagaggcccctcagtttggaatgaaagcctccagctaacagcaagtgctcacaggacaacagaagtgtagtacttcactgcaaagcattttgcatccttgagcacttaagaggtaaccttaatgagcacaaaatattcctctctaataagaacatgctgtcataatcaccctccatgtgataaatatcctggaagttttctctttgttaggttaatgcttttccacaagataatttaaccaattctctaaaaaataatcacacgttatcaggccccaatatagtaatatggtgttgtgtgtgtgttttttttaatgttttgaatcttgccttaaacaaattccatccaaataaatgttcccttttttaggtggcaccaaagcttgtgttgttcattgtaaccaagctcgcagttggctaactcctcatctaacagtatgtcttctgatttcatttgagcaaaatttatcatccacaagcaaagacaaaaaatgtgtgaatgtctaaagcttatgtaaattaaggggctatgcatgttattcctaaaaatagtagacaattataggcatttcttccccatacaataattataggcttcctgtcatcttttctattctgtataaggtcacagtagtattatacaaaatttacagtatgttaacagttaaaaacacaataattagcaactgtgcatcttcagcaccagtgatgaatgttcacagtaaaagttttwaaaaaaaatgcattatttgttttatgtggacagtacacacttaaatttaatcatcaactcctgctacccaataggcaatattctctcactattataatgctatttgccaagttcatagtataccctagggctgaattcatccttaacgaagagacaggaagccaaatctctcaccgtcatctcaaccaggtgcaccatattattttaaatttaataattctgttgaacatattgaatgataatgagcaagcttagagaaagtaccaaggattattttgaccattatgatcaacatctgattcaggggaaaaaaaaatcttctcactaaataatgtagggagttcacaggattgcttactatgagtgttattttttttcctcctgcttgttta

SEQ ID NO: 722554 - DNA, 2086 bp, Homo sapiens
attttaattcacacactaaaaatattttgtgtttagttaacatcgtgcaaatgttgaaagaggtagtagcatttatcattttgtaggtatttatcaaggtactcaaaaaagtccctataggaaggaggaggtttttgtcttatttccattctgacataaactgaggaacagagatgttatgtaaccaaatagtccaagtaagttagtgagagagctctatttatgtgaccaaacattttctaaaactggaataattggaaaaatcaagtccaaatttaagcagatgctttaggcttaatattatatgatagccagaagttgtatttacatggaccaaatactttgggaggctaatctgtgggaattaattttatagtgaactccatatggggcccaagatacagttttcttttcctccatccatccattcaataagtatttattcattatctattataggtcctccacttccctttgccattgaacatgatccctatggacctttaataagtaattgttgaaatgtaactaaaatatgtatattttctccttgctccaagaaactcaaggaacattattatgaaagagttaaaaactgtggcctttctttgatacaaatggaaaattgtgttgattacctttaagtagaaagtcaagggaaaaaaataaattaggaatcagaaagttttctccagattgtgccgtattcacagtaccacacagtaccatgtttttttttttttctcctttaaaactcattaagcaaagtttaaagggcatacatgattgaaggggatattcttttaattactttagaaagcaaaataatccttaaaaggtcttgctccttatttggtatactggacgggctggtttcatttgagttgaaagcactatatttctagttaaaatcaagaccacatacagtaccttttttccccccaatcttaagtcagaattgtctacaattaagtaaacaaaatgcatcccaagtagtcatacatacacctggttaaaattaattggtttaataaaaatataaaaacatactcaatatgtttatctcagttatagttttcatctttcttggataatgcttgaaatcattcaaaacaatatctagatcctaaatattaaaacattttgtgtgaaatctgcaagatgcacctaaaggatgtaccattttttgaagtacaatatgttaggaataattttgtccctaactctcagctggagggctgaaacggtataaccaaggtctaactaatgtctgcatgttaacaactacaccagaacttacacaaacattttagtgtgttctcatctatcaagtcatcttggaaggctgtcacttattgtgtaggtgcttccattgctgccattgctcaaaacgtttctggagctctttgttgggcactgctttcagaacccacagcacatctggtttaagagccttggaggtggcaagccatcttcctttagcatccttcagtgctctgaagaataaggtgggtggtcaagtcaggataatrtaatttggggtcaaaacaagctgaaagaaaattagatgacttccctcaatgactttttaactagttataaagtcatcatactaacatatggcagcaccactggaataagagtagctgctaaaggacagccttaagaaaagtgctacacattctctttgattgtcaatgaattactaacttaacaatcatatacatgtatagtgcattggtatgcatgataaagacattacttcaaaaagttatattgtcaagagtttggttggttgattctaaattttttgagtgcacaattttggtatgatttaaaaagctaagttctagaatatggaattgggtgggaaacattcaagatgtcgtggctaaaattagggttgccctatataattccacaggattggcattccacattccttgaaatattaaagaactcatactcatttgagaaatcaaacataacttgtattctatttggtgagcaaggctttgactattacactaaacttccccttctcctagcctatgggtgaggcctaacctgtgaggtcaaacacttg

SEQ ID NO: 722555 - DNA, 376 bp, Homo sapiens
gactgctcagcttctatagatttaagagttcgtgcaaatattttaaaatttgagtctaaatattaaattttgtgtatagtgtttgtagcttcaggagtggggagagggtagttctcagtatggtccaggtagttgtaatagaagcctggtgagtataatttgaagtccatctcttttaaagagagaggttcctgtctttagattccaaaattcacatgtggatccagagtacagaaaaggtagaggactgccatgagaattgagaagtggtagaaagagtcctggactgggagtgggaactaggtttatcatgtcccaattatgtttcttgaggcmaattttagttttcctcataggcaaaatgtatataattgta

SEQ ID NO: 722556 - DNA, 602 bp, Homo sapiens
caaatctcagagtctttttcctggggaaccctgacctacaacagacaggtaagacacagtgacaaactaatccatctccatgctgaccggtgggcactgaagcagtagatactcgcagacctctttgaccttggtgtcctcttagggtgtgttgggcacaaagtggcagcaggagcagggtacagatacttctccttcacaggcaggtagcatcacatgaccraggcatatgaaactgtttttgaaatcacagaccttggagttaagtgggtgagttcaaatattatcgtccatggctcttggctaagttgcgtatcatcattgaacctcggtttcctcatctggaaagtggagctgagggcacaggtaatgtttgtatggtgttcagcctagtgcccaatatgtaatatgctcaacagtttcgatagcttgttttttccccttctccatcttcatactagtttttcacatggacagtgtagctctggatactacaaataatcttcattcttagccagatcagtttcttcaagattgaggtttcaaataagcctggttcagggtctcaaagagatatgtatacacccatgttcccagcagta

SEQ ID NO: 722557 - DNA, 586 bp, Homo sapiens
cagaagagaaccggaaagaggtagtgatgagcgctggggkaatgtttattattaaaactgtggaaagtacatctactggcaataaaaggcctaagtcactatcatggaaataagtggctaaggtagaatggaggaagaggtcattggaggagaagagttgaaggaactccaaagccaaaggactaaaagcttaacctgcctgggtattaaaatcatccagaaatgtaacaggagtcattttggcctgagtgatggtacgccgggaataaaaatcttcaagtaatgagttatagtatccaagaagtcagtagtttctaaggttccagaaaagaggtttgagtgtttttgtgtgaaaagagaaattttgtgtgtgtctggggacagggttgggggtagggttcaacaagtgtgagagataagaggaaagaaaaggaaagaggatacaggtcaagtgctgtgtgatggaagggccaagagaacactcccacctgtgggttggccaacaagggtttcgaagaacataagtgtatgatttgcctgtggcttgctatccactgaattctgtgaccctgtctcttatgctcac

SEQ ID NO: 722558 - DNA, 586 bp, Homo sapiens
cagaagagaaccggaaagaggtagtgatgagcgctgggggaatgtttattattaaaactgtggaaagtacatctactggcaataaaaggcctaagtcactatcatggaaataagtggctaaggtagaatggaggaagaggtcattggaggagaagagttgaaggaactccaaagccaaaggactaaaagcttaacctgcctgggtattaaaatcatccagaaatgtaacaggagtcattttggcctgagtgatggtacgccgggaataaaaatcttcaagtaatgagttatagtatccaagaagtcagtagtttctaaggttccagaaaasaggtttgagtgtttttgtgtgaaaagagaaattttgtgtgtgtctggggacagggttgggggtagggttcaacaagtgtgagagataagaggaaagaaaaggaaagaggatacaggtcaagtgctgtgtgatggaagggccaagagaacactcccacctgtgggttggccaacaagggtttcgaagaacataagtgtatgatttgcctgtggcttgctatccactgaattctgtgaccctgtctcttatgctcac

SEQ ID NO: 722559 - DNA, 1067 bp, Homo sapiens
cacacatctttttactagctcaaatgatgtttttcataagctaaaacaatataaatgtttgtttttgcatcccacaatgaacaaccttcccaaattatataatttgatatgctggttcttctgtctcttcagcaacgttgtctgtgtaacttcctccacataaagtttactcacaaatctatttaagtttttatgatagtgttktctagatatcatttcagtcattttttttgaccagggcagaagaaatgtttctttaatgatatggtttcatcttttatttatttcatttttaaggtagaaattagaaaatatacttcaaaatattatttactttaggaaatttctgtaaagtgataagtgatggtttattatgctgtttaatattattagaaaagtggaagcaattggtctttactaataaaatttttagttttaaactgtcttgctcactgagaagcctgaaactattagaaaataaacacattacgtgttactaatatttagtatacaagttgatactggcagcctctctcagtctacttggtatatataatattttcagggaatattaggatttgatcaatgcaaacctcaaagtacaaaatgcatttatatagtaatagttgatgcaaatcataattcaaataatattctctaatttaattttttatcaatttctcattagctatggctagattgtcattgtcttctaccccataatatggcataaagagagtttttaccaggaaaaaatgaatcagctttgtcagtttcttgttcatttgagtttgcacactttgtccagccttcaattcatgttttctatatacttttcaagtcatatatttgtttgggaaaaattggcttgtgcactctagattatatactcctgccttctctttatcaatgtataggaaaactccaatacattaaactccagtatatgaaaaggttgagcatggctttgcattggttaatcttgacctgcctacagaatagtatatataccaaatgaactgagtgagatttccactatcaattgttgcactaaaaattaatactgc

SEQ ID NO: 722560 - DNA, 1067 bp, Homo sapiens
cacacatctttttactagctcaaatgatgtttttcataagctaaaacaatataaatgtttgtttttgcatcccacaatgaacaaccttcccaaattatataatttgatatgctggttcttctgtctcttcagcaacgttgtctgtgtaacttcctccacataaagtttactcacaaatctatttaagtttttatgatagtgttgtctagatatcatttcagtcattttttttgaccagggcagaagaaatgtttctttaatgatatggtttcatcttttatttatttcatttttaaggtagaaattagaaaatatacttcaaaatattatttactttaggaaatttctgtaaagtgataagtgatggtttattatgctgtttaatattattagaaaagtggaagcaattggtctttactaataaaatttttagttttaaactgtcttgctcactgagaagcctsaaactattagaaaataaacacattacgtgttactaatatttagtatacaagttgatactggcagcctctctcagtctacttggtatatataatattttcagggaatattaggatttgatcaatgcaaacctcaaagtacaaaatgcatttatatagtaatagttgatgcaaatcataattcaaataatattctctaatttaattttttatcaatttctcattagctatggctagattgtcattgtcttctaccccataatatggcataaagagagtttttaccaggaaaaaatgaatcagctttgtcagtttcttgttcatttgagtttgcacactttgtccagccttcaattcatgttttctatatacttttcaagtcatatatttgtttgggaaaaattggcttgtgcactctagattatatactcctgccttctctttatcaatgtataggaaaactccaatacattaaactccagtatatgaaaaggttgagcatggctttgcattggttaatcttgacctgcctacagaatagtatatataccaaatgaactgagtgagatttccactatcaattgttgcactaaaaattaatactgc

SEQ ID NO: 722561 - DNA, 1067 bp, Homo sapiens
cacacatctttttactagctcaaatgatgtttttcataagctaaaacaatataaatgtttgtttttgcatcccacaatgaacaaccttcccaaattatataatttgatatgctggttcttctgtctcttcagcaacgttgtctgtgtaacttcctccacataaagtttactcacaaatctatttaagtttttatgatagtgttgtctagatatcatttcagtcattttttttgaccagggcagaagaaatgtttctttaatgatatggtttcatcttttatttatttcatttttaaggtagaaattagaaaatatacttcaaaatattatttactttaggaaatttctgtaaagtgataagtgatggtttattatgctgtttaatattattagaaaagtggaagcaattggtctttactaataaaatttttagttttaaactgtcttgctcactgagaagcctgaaactattagaaaataaacacattacgtgttactaatatttagtatacaagttgatactggcagcctctctcagtctacttggtatatataatattttcagggaatattaggatttgatcaatgcaaacctcaaagtacaaaatgcatttatatagtaatagttgatgcaaatcataattcaaataatattctctaatttaattttttatcaatttctcattagctatggctagattgtcattgtcttctaccccataatatggcataaagaragtttttaccaggaaaaaatgaatcagctttgtcagtttcttgttcatttgagtttgcacactttgtccagccttcaattcatgttttctatatacttttcaagtcatatatttgtttgggaaaaattggcttgtgcactctagattatatactcctgccttctctttatcaatgtataggaaaactccaatacattaaactccagtatatgaaaaggttgagcatggctttgcattggttaatcttgacctgcctacagaatagtatatataccaaatgaactgagtgagatttccactatcaattgttgcactaaaaattaatactgc

SEQ ID NO: 722562 - DNA, 3044 bp, Homo sapiens
ataggtgcagcacaccaacatggcacatgtatacatatgtaacaaacctgcacattgtgcacatgtaccctaaaacttaacgtataataaaaaataaaaaaataaaaataaaaaataataaaaaaacctggtatcataaaaattgatacaagcacatgataatctacttattttaagtgaaaacaaataaatctgttatttcatcttttaatataatggtaaagctttctcttgaagtttattgccaccacccgatttggtacatcagtcagtatgtatctcaggagaaatgtagggtttgattttaatccaacaagtcaatgacatgaaggtcaaaaaagagatctccttctagactgtcattagcagaacagttttgcattgaaaacatttacatgcgggtatccaacatggtatgaaaatcctaaaaggccctgtagaatcattttgggtccttaaaaatcagggcatctctagtaggacataacataagaaccacgaaattgctatatggcatcagaagactgtcagtctagtctgtattaagtgtctaaccactggtctatatttgaagtgatgttattgggaagaacgtggtaagtgctaattaaaagttagcaatatgcgcaaagcccacttaatgttcaagtacattgctatgattcattacttggatccaaaactttttaaaaagtcaagactcctgtaattctttatgaacagctggaatatcacacagaataggcaaaaggggctttcttgataattttcctaagtgcctttcagacattgatttatcaccatagcatagaattggacagacctctatttactaacacaacttagagtattgtcctggagttaataagtatgtgttcacatcactttcctccactcagtccccatgtgacctggtgataatttgcctctaaaatgaaatgataatatttccaagaaggatatattaaaatgtactaagaaggatatattaaaatgaagtaactgaaaagaaaatctgaaaccagaatgcgtagtattagactacaaaaaagaggggaatattttttcttaattatcagatattcttcaaagaaacattgctatccattggccttatccaaaaattgatgggatacctaagaaaaacatgtaaatttgatgtctcaggtcaaggtgaatattctcagtggacgataaatttattttcaattgctatacatttcagttttaagacataagaaaacccagtactggtaaatgaggtttgatgttacattctaaggacctcaactatttattattgagctgccttgtaaagataacaaaagtcaataacgcattgctaagtatctcatctattagggccataaaataattgtatgtgttcgtaaatgttaatgagaaagaataggtaaacaaatgtcactgactataaattagagtttagaaagccaataataagtagtatagcattttaaattataagattccttaatctttatccactgaatgaaccttgatgtagtagcagatttcttcaataagggagaggagccagggctcttgatggcagtggtacacttctaacattgatggtaatatcattgaataattatattagaaagtagcagtttgtattgtaaacctcaatgaacagaaccataatgccacaaaagacagccattaattaagtatgaattactgtattttaaagcactggcagtggaaagggaaatgccacctttgaatgaatggcttcctctgtctgatctgacctcctcccatttagagatgtgaaggtgataaatcactgagtgcagcaacagcagggatccttattaatagcaacctcccagtctcttggcaatcactgcaagtgcaagtgacatgcacaaaggttttccttcttagctgaaaggacgtgaattttttatgagaatttcttagaaatggatatagcatttctgagtcatgcatctgagcacttcatcaattagacarcataaaggttcttggaacatgctatttcaccacatccagctgttatcataatgatttagattgaggattttacatctagtagctatattcttaaaacaacaaaaaatcactttattgtcaagttattgtcctctaattggaaagaaaattgaggcaataggcaaagggcgtattttttgttgttgttgtttgtttttactaattgaatacttgaaaggggaattaaattttaaatgactagacaaaacctgaatttaatgattttcctttctctcaccctaattgtcacaatcaaagactgttgaatatgatcatatatttttccatttatatctgttcttatactgcctctgaatatgacaacttccactgaaaatcacaaccagatgataagcaagaagtagtaagattcagctttgattttacaacacttctttagaattcctaaaatgaaaagttaaagactttgcttcaaggaataaaaggagtgtgaatttaggaagcctttgtttcagtcctaaattaagccttgtgtaaccttggacaagtcaattatccttgaggatcagtacccacatctatataataaaagtgaccatgtcagcactacctaatgtgaggatgttttgtgaggaccatatgaaacagtgtatatacatgagctttggaagcagttaaatggtatacaaacttaaggtagttttataaatactattgcctatgaaagagcaaaattatggatacaaatagtttgtggataatatgggaatttattaactatattctttgtttaggtcatcaacatagttattcaaaaattgacttatcttactttatacttttcccctcctaaagttttaaccttataatttaaaaatatttattacttctgatttctttcaaccaaggagtgctcacagttataaatctaatgaaaacaatgcttaagtttcacttgtctaatattccctgatatttcatctattataaaaataatgcaacattagagaatttgactaaaaaaccactcgtgagtttatttc

SEQ ID NO: 722563 - DNA, 3044 bp, Homo sapiens
ataggtgcagcacaccaacatggcacatgtatacatatgtaacaaacctgcacattgtgcacatgtaccctaaaacttaacgtataataaaaaataaaaaaataaaaataaaaaataataaaaaaacctggtatcataaaaattgatacaagcacatgataatctacttattttaagtgaaaacaaataaatctgttatttcatcttttaatataatggtaaagctttctcttgaagtttattgccaccacccgatttggtacatcagtcagtatgtatctcaggagaaatgtagggtttgattttaatccaacaagtcaatgacatgaaggtcaaaaaagagatctccttctagactgtcattagcagaacagttttgcattgaaaacatttacatgcgggtatccaacatggtatgaaaatcctaaaaggccctgtagaatcattttgggtccttaaaaatcagggcatctctagtaggacataacataagaaccacgaaattgctatatggcatcagaagactgtcagtctagtctgtattaagtgtctaaccactggtctatatttgaagtgatgttattgggaagaacgtggtaagtgctaattaaaagttagcaatatgcgcaaagcccacttaatgttcaagtacattgctatgattcattacttggatccaaaactttttaaaaagtcaagactcctgtaattctttatgaacagctggaatatcacacagaataggcaaaaggggctttcttgataattttcctaagtgcctttcagacattgatttatcaccatagcatagaattggacagacctctatttactaacacaacttagagtattgtcctggagttaataagtatgtgttcacatcactttcctccactcagtccccatgtgacctggtgataatttgcctctaaaatgaaatgataatatttccaagaaggatatattaaaatgtactaagaaggatatattaaaatgaagtaactgaaaagaaaatctgaaaccagaatgcgtagtattagactacaaaaaagaggggaatattttttcttaattatcagatattcttcaaagaaacattgctatccattggccttatccaaaaattgatgggatacctaagaaaaacatgtaaatttgatgtctcaggtcaaggtgaatattctcagtggacgataaatttattttcaattgctatacatttcagttttaagacataagaaaacccagtactggtaaatgaggtttgatgttacattctaaggacctcaactatttattattgagctgccttgtaaagataacaaaagtcaataacgcattgctaagtatctcatctattagggccataaaataattgtatgtgttcgtaaatgttaatgagaaagaataggtaaacaaatgtcactgactataaattagagtttagaaagccaataataagtagtatagcattttaaattataagattccttaatctttatccactgaatgaaccttgatgtagtagcagatttcttcaataagggagaggagccagggctcttgatggcagtggtacacttctaacattgatggtaatatcattgaataattatattagaaagtagcagtttgtattgtaaacctcaatgaacagaaccataatgccacaaaagacagccattaattaagtatgaattactgtattttaaagcactggcagtggaaagggaaatgccacctttgaatgaatggcttcctctgtctgatctgacctcctcccatttagagatgtgaaggtgataaatcactgagtgcagcaacagcagggatccttattaatagcaacctcccagtctcttggcaatcactgcaagtgcaagtgacatgcacaaaggttttccttcttagctgaaaggacgtgaattttttatgagaatttcttagaaatggatatagcatttctgagtcatgcatctgagcacttcatcaattagacagcataaaggttcttggaacatgctatttcaccacatccagctgttatcataatgatttagattgaggattttacatctagtagctatattcttaaaacaacaaaaaatcactttattgtcaagttattgtcctctaawtggaaagaaaattgaggcaataggcaaagggcgtattttttgttgttgttgtttgtttttactaattgaatacttgaaaggggaattaaattttaaatgactagacaaaacctgaatttaatgattttcctttctctcaccctaattgtcacaatcaaagactgttgaatatgatcatatatttttccatttatatctgttcttatactgcctctgaatatgacaacttccactgaaaatcacaaccagatgataagcaagaagtagtaagattcagctttgattttacaacacttctttagaattcctaaaatgaaaagttaaagactttgcttcaaggaataaaaggagtgtgaatttaggaagcctttgtttcagtcctaaattaagccttgtgtaaccttggacaagtcaattatccttgaggatcagtacccacatctatataataaaagtgaccatgtcagcactacctaatgtgaggatgttttgtgaggaccatatgaaacagtgtatatacatgagctttggaagcagttaaatggtatacaaacttaaggtagttttataaatactattgcctatgaaagagcaaaattatggatacaaatagtttgtggataatatgggaatttattaactatattctttgtttaggtcatcaacatagttattcaaaaattgacttatcttactttatacttttcccctcctaaagttttaaccttataatttaaaaatatttattacttctgatttctttcaaccaaggagtgctcacagttataaatctaatgaaaacaatgcttaagtttcacttgtctaatattccctgatatttcatctattataaaaataatgcaacattagagaatttgactaaaaaaccactcgtgagtttatttc

SEQ ID NO: 722564 - DNA, 1280 bp, Homo sapiens
aatgtaaagttatacgaatatgtacactcccagcagaatatgaggatgtcaacgtcactatcctggggtttgcactgaacattagccacccctagaatcttcttgatgtttttagaaaatcaatttagttaggagaggacccaaacaatatttctatgttcatttttttttgtattttctcattttgtcatttagtcattttcatatagagttgctgttttcattttcctttatgatttatgagacaatttaaatgttagggatatcatatttgaacactttatataaaagaaatatgctctggaacttcacacattttatttattttatgtcaaaaatcaactatttaaatgtttacatttctactcatctttatattacttttaatactttatacttttccattttgttattaatacacgcaattacaaaaaagtaattttttattatctcctgtgcaaaggtaaacctgttatagtgtatttttgaatattttgaaacatttctaaggatataataaactgtaaattagaagaatttcttacaggtacattgtgaggtgtttcaataattaaaatatattacacagtaattgtcaaatgcttctgtaaatacagtgccacattatccctttagtaagatacactcaattattaaatatgtcgcagtcaatttttaaaagtccccccaaaataacattaacaaatgctgagaaaagtatagggcattttaatataaggactgtcttacaaaatgggcattttctatcacaatgctaggggctttcagggccaaattacaatttctgaatctactttayacaagtttctattctctacttgaattaatttaaaaatgtattcctttcaacaaatgtttttgagtactcactgtgtccttacactgtgcatgttgatgcgtcctgcaccataattgattttaagatatcatggaaaaaaacacatgtgtcaaagatttacttttgcacatattatttatagaattattgtaaagcctgactaaatctacaataggacaaaacaattatgaactggagaaatatctcatgagttaagggacagttacaaaatagcctaatgtcattaactactaataacacagacaatcagaaaggagaaaggaggctgtatggctggagtccactacagatgtttagggaagaatgggaaagtaagtggagttactaagcactggagttactctatgaatgaaagggattattggtcatgagaatattaaaacacctatatttttaaaaa

SEQ ID NO: 722565 - DNA, 801 bp, Homo sapiens
tcactatggtcctccttttccatgctcagttagtataactataatgtgactaaagcaacaatgcttgaaaagagcatgataacaaagggtcagcctcctttggcaattaagatccgggttactccgccgagcaatcaatttargagaacggaaatgctcgtaaaggataagcaacattttgaatgagtcgtatggcagtgataagtatgttcttatacagcataagcaaatctgttcagtgcaaggaataaactacagaagacaattatgatctccttcccatatctatttgggctttaccaaattatacacactaacccatctcccaactggctcagtttccctgcaattagacccattatgtctacatgctgggaaggacaaaagtgctgaaaattaacatccagcccaggagtaaccctcagccaatgactaaagggaactggtgcacaaatatcccaggtccctcattctgtgggagaaaaaatagtgcagtacaatctttgctgactcccaaatttctccaatcttactttcttattttttacaggtgttccctgattttatctcctaatgaaacttattattgtttttaggttggctgctagtgtaacaaaaactacaaatatacacttaattattgaagggaatttgttacaggttaatgggaaagtggtcttgagacaacagttatattacagaaaaacttctttgtagttttgggtgagtttacatgtgattcctttggtagaagtcaggagcagaacccagtcttcttatttttgggggagtatagggctc

SEQ ID NO: 722566 - DNA, 1086 bp, Homo sapiens
tgttttccccagtgttcaggcagcagtatttataatgtttttcaataaatgttttctaacaccggcccacaccaagtagcagctttaccactgcgtgaagtccagattaggtgaaaaaacaaggcttttgagaatatatttgagggagtcaacaggcagatcaatttttcatgaatgaggtccattctgtttttctggcattggtattaagaatctgggcattattttcaagcctgctgcttctctgagaagaatggaaacagggtaagtgaaaaaccacaaatcgatattcttactgagatgagatattttgctagaattagcactccctagattgctaaaaaccttaggttagttttcagagttctaaaaagctttattttgacagttgttgccagttttctagtatattttataaagagataaaattttgaacatttttattccatttttgctgatgtcactacaccacaacctttttattaaactatttgtaccataaaatttattcattatactattattattacttattwgtcacaacaattcccaatattaaaaatgaaggacattaaaattctggcagttttagtcaagagcataatggattgaaccaagtaaaactgacatttttgaaactgaaaaaaattatagctacagtggcacattgtatttttcaaaaatgcgtttccaaaagttgtagttttctaaaaatatgtattccatctcacaagaactttttataatgtaacattgataatcctccactgagaggtgaagtctatgttccctctgcttgatctgaggcaaacctttgtaactgccttaactaataaatacagtgcagacgatgctttctgacttctcatgctacataataaaaggttatatgacttctgtttgtatctccctctccagaaccactagttgaaagactggaaatcttagccagagcaatcaggtaagagaaagaaataaaaggcatccaactagaaacagaggaagtcaaactatctctcttcagagatgatatgactctataatgagaaatttccatagtctctgcccaaaggccatagacctgat

SEQ ID NO: 722567 - DNA, 654 bp, Homo sapiens
tctcaattggtaaataagtccaaatggaattttcacatcttctatagtaacacattcctttatgacatttctgacaaaagctytgcaggattttgtgttatagattcctagttgaggagacaatagaggcacagaaagcaataataaacacacctccagcagaagataatgacttaaaaagtgtgctatattcttttgaatagagattatgtgtgcaaatactgcagttcagatggcagaatcagaaataactgcaattggggacaacagaagtaagatgattttgcaaacaaacagaaaacttaacaagaaatgattatttttatggaagatgggaatcacagtggataaaacctatcatgtaaacactgaaggtgctgattgaaataattccctgatattatttcttccaaatgtttccagggaattgcaaagtttatgggtcatgaaaattgttgaaaccaacacctcaattataaagcaatctcagcggtataggaaagtcaagagcctaaactcatatcagaaaaccaccaaaatgccttacaaatgttacaagtattatcgattcagcctgcaagtgctgattacaaccctactgtgtgactatcagtgtgctaggtgctgaaacagctgacaagtcaaagatgattt

SEQ ID NO: 722568 - DNA, 2690 bp, Homo sapiens
  misc_feature 771, 772, 773, 774, 775, 776, 777, 778, 779, 780, 781, 782,783, 784, 785, 786, 787, 788, 789, 790, 791, 792, 793, 794,795, 796, 797, 798, 799, 800, 801, 802, 803, 804, 805, 806,807, 808, 809, 810, 811, 812, 813, 814, 815, 816, 817: n = A,T,C or G
  misc_feature 818, 819, 820, 821, 822, 823, 824, 825, 826, 827, 828, 829,830, 831, 832, 833, 834, 835, 836, 837, 838, 839, 840, 841,842, 843, 844, 845, 846, 847, 848, 849, 850, 851, 852, 853,854, 855, 856, 857, 858, 859, 860, 861, 862, 863, 864: n = A,T,C or G
  misc_feature 865, 866, 867, 868, 869, 870, 1731, 1732, 1733, 1734, 1735,1736, 1737, 1738, 1739, 1740, 1741, 1742, 1743, 1744, 1745,1746, 1747, 1748, 1749, 1750, 1751, 1752, 1753, 1754, 1755,1756, 1757, 1758, 1759, 1760, 1761, 1762, 1763, 1764: n = A,T,C or G
  misc_feature 1765, 1766, 1767, 1768, 1769, 1770, 1771, 1772, 1773, 1774,1775, 1776, 1777, 1778, 1779, 1780, 1781, 1782, 1783, 1784,1785, 1786, 1787, 1788, 1789, 1790, 1791, 1792, 1793, 1794,1795, 1796, 1797, 1798, 1799, 1800, 1801, 1802, 1803: n = A,T,C or G
  misc_feature 1804, 1805, 1806, 1807, 1808, 1809, 1810, 1811, 1812, 1813,1814, 1815, 1816, 1817, 1818, 1819, 1820, 1821, 1822, 1823,1824, 1825, 1826, 1827, 1828, 1829, 1830: n = A,T,C or G
ttattagtcaaaaggcaagctatcctgagaaagttgctgtcaaaaaccatgaaaacatattgtaaaattttatttattacttataagtaatatttttagaggagtgggctggggaaaagagtaagtgaatctcaaactacattttaaaatttcttttctgctaatttaaatattttagtttcatttaaaggtttagtattataattgagagcagaaaaggaaattatgttcattcagattctttagcccatgcacacaattatctttctttatatagttatagagattttaaattgccaattgggggtataaaataaactcttcatattacctactaaatctcatgaattatagctacctgctttttacttttgcttaagtaatgcaaggccctttccctttttacttatattgttgactcctataatatataatctgctaacttttcctttatttccccttcatttctccatttcttaaaatatgtgatgtagccaattaccagttgaggacataccttttctaaatgtatagggttcatatttgaagacaattaaaaatcttggacaatgtttttctcttgttaaaaagagtattcctgggttttactccaaatcttttttaaaaaattcaaatctggcaccattgctatatttatctcctttattttacctgagcaatgtgtgattcaagaagactgacgatttttttaattagaaaattgatgttgacactattcctttctgtttggtagttttccttctaacagtnnnnnnnnnnnnnnnnnnnnnnnnnnnnnnnnnnnnnnnnnnnnnnnnnnnnnnnnnnnnnnnnnnnnnnnnnnnnnnnnnnnnnnnnnnnnnnnnnnnnttttttttttttttttttttttttttactttgtactgaagttatcagaataaaatatattttgctatttaggcctttggatggaaactatttttctcatcaatttctaaaagtaacatcagtgctaagaaaaaaaattcagggttattcaatttggaagttagatttctttcaattttaaacttctagacagacagagctgtgaaccaagatgttaggcaaaaagccacatargatttttaaaaatctagtggttttgttcttagaacatgtaataccaatgatgtcaagtcaccaagaaagttctatttcatccagcatctttggtttaagaatgcaataaaatatttaatatacctttaaaatgttttcattgttaatgataacaaactcttaacatttgtactgctatattcataataaaatctaccattctttaggtcctagtactagacacgtatttaacatatatgtctcattaaatacacccaccaaaatagatgatagttttctgatttcccaaatgaggaaataatggccctgagaagcataagtatttgcccctgcttatctgaaaagacagttgaaatctttgtataggtatcccaaaccccttggaaaaagactgcttaaagtctgaatatgctctgatagtttttccctttaaacttctagtattactaaatttctcttcataattctttagcagttagaccattttacataattgtcttcagatgaagaactttgtcctctgaatagaagtaaaaggcctcggccgggcatggtggctcacgcctgtaattccaccaatttgggaggccgaggtgggtggatcacctgaaggcaggagttcaacacnnnnnnnnnnnnnnnnnnnnnnnnnnnnnnnnnnnnnnnnnnnnnnnnnnnnnnnnnnnnnnnnnnnnnnnnnnnnnnnnnnnnnnnnnnnnnnnnnnnnatcacattagctcttgtcatgagtcatttttaacttctaaagcatgaagtcttttacttgttttcattgctgtgttttaatgcatttgcttagccgggcaggatatatttttgttttcctatcccacacccgtcttgccaaatatttggaaaatgttaggaattaatcgagtggctataggtttttcttttgtttttaacaaccttattgagatataattcatacacactacaattcatttagagtacacagttcagtggtttttactatattcacagatatgtgctaccatcaccacagtcaagtttggctagttttcatcacctcaaaaaacaaaacaaaattccaggcatacccagtggctcatgtctgtaatctcagctctttgggaggcagaaatagaaggagtttgagaccagcctgggtaacatagggagacccctgtgtctaccaaaacaaacaaacaaaaaaacactaaaaaagtagccaggaataatggataatttttttagtagtcctagctactttgcaggcttagacaagaggaccgcttgatcccaggaggtcaaggctgcagtgagccataattgtgccactgcattccagcctgggcaagtccatatcctttagctctcactctcctatttccgcatcccatcccttacccccatccctaagcaaacattaatctactttctgcctctatagattattctagacatttcacatgactagactcataaaatacgtggtcttttgtgactggcttctttcacttggcataatatttttaaggtttatctacattgtagcatgtattactattttgtttctcttaatggtgaaataatattccattg

SEQ ID NO: 722569 - DNA, 1715 bp, Homo sapiens
agctgttcttgactcttggacaactttctagtcattttgctatgatgtaatagtagaagtgctgactaccatagaggtagttaagttacagtggtgtttactgatgtatttatagatgcattctattcagttttgaaaccacagcagaattaaccaaacagaaagacagaggtcaccataaaacactttagttttctccaaagagaaaattaaatggctcttatcaattacctttatcaactaatttgtctaaatatctgcaagcagacctgaagtcattgatagggtctgtgatttgacggggaagtagggaaggtgatccattagctgtatcattagtattttccaagtgcacgtttctatagaagcacattctggtattgtccactcacagactcggaacaagcayaatacatcagagcaagactgcctttgaaacatttttcactttatttttcctacattacatcattacttttttcttacaaaggaaactaaaatactttttaaccttcctaaccagcttgacttcctcacttccaatgtatgttatcttgttgagtgcatcctctcagacctctttctgtgcattatatatgcacatacatgtccacgccaatattcttgccattatccaggtcacctaaagaatgaacagccttgggcaattcaaattttgcacccagtcacatatcttattttatctaagtttatttaagtgaagcataacacacagttcaatgagaaagaaaataagcgacagagaggtaccctgtagtttgcaatgtgaagagtgtggaaagagtgttacactttatccttccaatggtgagggttgttgaggtagaaatgatagaggttgacatccttcctcttccttttttttttttttttttttcagtttcttttctctatttttttaaaactctagtagggaacaacttcagaaagccaggctactgcatcaatttgaaacattctatggataaaaatgcttccaaaatagatggtagatggcagtgttttctgtccctcttgatacttggtattattattattattataaatagaaatactattctccacagatgacagctagcaatcctgtccaaatttattgtgagcacaacaacttttagtaaaatacttgaactcaaagttacattataaaacccccagtgactgcatatatgtccaaatacatagagcattcgctaatgagtgatcacatttatcctggagttgtagatgcacacttcaagtaataaaataggatgataccagaaatgacataagatttgagttgagattgtaacacctgccttcatctcatggacacagcagccccagagatgcatcgctcatgttcaagcttcagttagtgtcttccacacaggctatctgaagtgacagttgagatcctggtaaaatgcagcttctaatcactttggcttcttttgttcacattggcactgcaagattaaagctattttgtatttcatttagaaaaaacaaaagataaagacatttccagaaggctcaggtgctcaagggcaagggaaggtgcctgaatccacagagggcttggcatagctctcttctgctacaattggcctagaacaacacagatgggttgtgtgcgaggtgacaaaatgcttgggaaggtgaaaccactcctgaggagaggagccagcaatagcaaataaggcattaaa

SEQ ID NO: 722570 - DNA, 1715 bp, Homo sapiens
agctgttcttgactcttggacaactttctagtcattttgctatgatgtaatagtagaagtgctgactaccatagaggtagttaagttacagtggtgtttactgatgtatttatagatgcattctattcagttttgaaaccacagcagaattaaccaaacagaaagacagaggtcaccataaaacactttagttttctccaaagagaaaattaaatggctcttatcaattacctttatcaactaatttgtctaaatatctgcaagcagacctgaagtcattgatagggtctgtgatttgacggggaagtagggaaggtgatccattagctgtatcattagtattttccaagtgcacgtttctatagaagcacattctggtattgtccactcacagactcggaacaagcacaatacatcagagcaagactgcctttgaaacatttttcactttatttttcctacattacatcattacttttttcttacaaaggaaactaaaatactttttaaccttcctaaccagcttgacttcctcacttccaatgtatgytatcttgttgagtgcatcctctcagacctctttctgtgcattatatatgcacatacatgtccacgccaatattcttgccattatccaggtcacctaaagaatgaacagccttgggcaattcaaattttgcacccagtcacatatcttattttatctaagtttatttaagtgaagcataacacacagttcaatgagaaagaaaataagcgacagagaggtaccctgtagtttgcaatgtgaagagtgtggaaagagtgttacactttatccttccaatggtgagggttgttgaggtagaaatgatagaggttgacatccttcctcttccttttttttttttttttttttcagtttcttttctctatttttttaaaactctagtagggaacaacttcagaaagccaggctactgcatcaatttgaaacattctatggataaaaatgcttccaaaatagatggtagatggcagtgttttctgtccctcttgatacttggtattattattattattataaatagaaatactattctccacagatgacagctagcaatcctgtccaaatttattgtgagcacaacaacttttagtaaaatacttgaactcaaagttacattataaaacccccagtgactgcatatatgtccaaatacatagagcattcgctaatgagtgatcacatttatcctggagttgtagatgcacacttcaagtaataaaataggatgataccagaaatgacataagatttgagttgagattgtaacacctgccttcatctcatggacacagcagccccagagatgcatcgctcatgttcaagcttcagttagtgtcttccacacaggctatctgaagtgacagttgagatcctggtaaaatgcagcttctaatcactttggcttcttttgttcacattggcactgcaagattaaagctattttgtatttcatttagaaaaaacaaaagataaagacatttccagaaggctcaggtgctcaagggcaagggaaggtgcctgaatccacagagggcttggcatagctctcttctgctacaattggcctagaacaacacagatgggttgtgtgcgaggtgacaaaatgcttgggaaggtgaaaccactcctgaggagaggagccagcaatagcaaataaggcattaaa

SEQ ID NO: 722571 - DNA, 1715 bp, Homo sapiens
agctgttcttgactcttggacaactttctagtcattttgctatgatgtaatagtagaagtgctgactaccatagaggtagttaagttacagtggtgtttactgatgtatttatagatgcattctattcagttttgaaaccacagcagaattaaccaaacagaaagacagaggtcaccataaaacactttagttttctccaaagagaaaattaaatggctcttatcaattacctttatcaactaatttgtctaaatatctgcaagcagacctgaagtcattgatagggtctgtgatttgacggggaagtagggaaggtgatccattagctgtatcattagtattttccaagtgcacgtttctatagaagcacattctggtattgtccactcacagactcggaacaagcacaatacatcagagcaagactgcctttgaaacatttttcactttatttttcctacattacatcattacttttttcttacaaaggaaactaaaatactttttaaccttcctaaccagcttgacttcctcacttccaatgtatgttatcttgttgagtgcatcctctcagacctctttctgtgcattatatatgcacatacatgtccacgccaatattcttgccattatccaggtcacctaaagaatgaacagccttgggcaattcaaattttgcacccagtcacatatcttattttatctaagtttatttaagtgaagcataacacacagttcaatgagaaagaaaataagcgacagagaggtaccctgtagtttgcaatgtgaagagtgtggaaagagtgttacactttatccttccaatggtgagggttgttgaggtagaaatgatagaggttgacatccttcctcttccttttttttttttttttttttcagtttcttttctctatttttttaaaactctagtagggaacaacttcagaaagccaggctactgcatcaatttgaaacattctatggataaaaatgcttccaaaatagatggtagatggcagtgttttctgtccctcttgatacttggtattattattattattataaatagaaatactattctccacagatgacagctagcaatcctgtccaaatttattgtgagcacaacaacttttagtaaaatacttgaactcaaagttacattataaaacccccagtgactgcatatatgtccaaatacatagagcattcgctaatgagtgatcacatttatcctggagttgtagatgcacacttcaagtaataaaataggatgataccagaaatgacataagatttgagttgagattgtaacacctgccttcatctcatggacacagcagccccagagatgcatcgctcatgttcaagcttcagttagtgtcttccacacaggctatctgaagtgacagttgagatcctggtaaaatgcagcttctaatcactttggcttcttttgttcacattggcactgcaagattaaagctattttgtatttcatttagaaaaaacaaaagataaagacatttccagaaggctcaggtgctcaagggcaagggaaggtgcctgaatccacagagggcttggcatagctctcttctgctacarttggcctagaacaacacagatgggttgtgtgcgaggtgacaaaatgcttgggaaggtgaaaccactcctgaggagaggagccagcaatagcaaataaggcattaaa

SEQ ID NO: 722572 - DNA, 531 bp, Homo sapiens
cttcccctcacgccatccagtccagactaagtaatttttgaccacacagtgttccagacccctccctgattggcatcatccttttagtttactcaaaggaaactgaaactagaaaggcaggtttaaatttagactgagtggatttcttgaggttttgcacctgaagatggtggtgaaattcaacctccagctccaattcctggtctgaatactgcctctctcttcccatccttagctccatccaaatcaccagggcagcaacctggttcttttcyaaaaaaaaaaaaaaaaaaaaaaaaaattgtccaatcagggcctaaaagtgggctcgtgggctcagctgtgtttggggggaaaattctagagccaatatatccaaaacgcagtttaaatgtcaggtgctggaaggcaaagggatgagaggttggggtgaagtataatggatagagacaggggttttactcagcacatcctgttggccacacagactcctcaatcctaggaaaggaccacagctagaggagggccaga

SEQ ID NO: 722573 - DNA, 531 bp, Homo sapiens
cttcccctcacgccatccagtccagactaagtaatttttgaccacacagtgttccagacccctccctgattggcatcatccttttagtttactcaaaggaaactgaaactagaaaggcaggtttaaatttagactgagtggatttcttgaggttttgcacctgaagatggtggtgaaattcaacctccagctccaattcctggtctgaatactgcctctctcttcccatccttagctccatccaaatcaccagggcagcaacctggttcttttccaaaaaaaaaaaaaaaaaaaaaaaaaattgtccaatcagggcctaaaagtgggctcgtgggctcagctgtgtttggggggaraattctagagccaatatatccaaaacgcagtttaaatgtcaggtgctggaaggcaaagggatgagaggttggggtgaagtataatggatagagacaggggttttactcagcacatcctgttggccacacagactcctcaatcctaggaaaggaccacagctagaggagggccaga

SEQ ID NO: 722574 - DNA, 1426 bp, Homo sapiens
aagaaaaatttctaggccttaacaattatgtcttatatgaacatttattcaaaaactgtttaaattttgtgctcaaagtaaaaaagaaaatttgagataccacttcatcaacactgcaaattctcagatagtgagttcacctcaaatgtaatccacatagattgtatgtgaaccttgagtttcaaatacagactagattaccaagagtaaagagatattctacttttcagatgcattttagtatacttcctggtaaactgctactgtggagaaaaccgtatggaaacatcaactgttcatgatagctgactttaartaactgaaattctaacgtgtggatgaggtagacttgtccaatatgtctttgaagactaaatgttcctgacaggtaacagctcaatttaagaaaacatgtcattaccaggcagagcttctccaaaatagcttcaaatggaagccattctcaaagatatcagcacagatactctcaaagcagatggaaggttacattggatgacctccaagtagtcctcccaattatgaaacataaggactttctatcctcaaaaggtggaaatgaatattaaaataataacactgtcataattcaaaattgatttaataaactaaaatatgtccatgtccaccataactgccaagcctcaagaggacacacaccaccttaagaatagacgatgactaaagcaaccacaaggtaggtaatcttgagaagtcaactaactttgtcttcagtgtttcctggccctgggagtctctccccagcacccatgctactgtctgtgacagcactgcggggctctcctcctttgacctcaccatggtcaagactgctcatcaagatttagcatgtgcatttcccattccctcaagctctgctccttcctacataaaaaaatggtcaatgatatgttaaagagacaatctcaagtctagggaaagaagaaaatttaagagggtatctagtctaatggctacatttgtatttatgaaactaaaaaaatcctatcctctaacttacatgtaaaacttaccctcatatcatctgggacctgagaagatctctggttcagaactttcaggatctggtaactaccctgagggcctgaggcaaaagggagagaaaatataccccatttgcatcacagataagacgcaattgtctccaacagccctttcattcttgctccaccgccaatacccttagcaggctgtcctgactcagccttcccgtagcaacctatggcccagattttcccaatcctcagctgctcaaaacttccctgtcctgggtctgatccaataagctgaaaaaagtacagtaaacctgtcatcagcctttgatttctcacaaataattggatccacccagcaggctacctgtggtgatcataggcccttgataatg

SEQ ID NO: 722575 - DNA, 1142 bp, Homo sapiens
tgctgggatctcaggcgggagccactgcgcctggcccgaaaccaagctttcttatcccaagcgctgacctttttcaagttgacctaatcctttatcatctcctaagtgtccctcatgagtgatcacttcacattcctcccacatggagagctcacccactggggcctatttttcccattggaaaagtgtggttattggaagtttcctgtttttggaaagaacaggattggaggtgctctctggggtgtcctcctaccaagcagcctgttgaaggcctcgtggtgctcagggagcacgagcgacactcgccgtcgcttcagcttcatcttgaggccacacagcatctccgccacccagatctcctcaggctcaggggcgagcaccttccgtggctcctcctccaacgactcctcagattcgtcccaccactccatcttccttttccagcaaaaggacctatgcggggggctgggatctaccccaggggctgagtaaagaaacaaggccacggtgtaatgcttctgcagttgatcacactagagcccgacccaaaaccccaaaccactctccatcctccccagcctcgcagactgctggcttctccaagccatctttccttctgtctgtctcctctgctgagctscatgtgccgctccttctcctccccattctcccgtttttctgtcctcagaacacttcctcatatccttccctggtccctggctctctgagtccctttttttttttttttttttcgttgttgttgtcgttgttgttgttgagaaacagtcttgctttgtggcctaggctggagtgtagtggtgcgatcttggctcactgcaacctctgcctcccgggttccagtgattctcctgcctaagcctcccaagtagctgggattacaggtgcccaccagaacgcccagctcatttttgtgcttctagaagagacagggtttcaccatgttggccaggctggtctccaactcctggcctcaagtgatctgcctgcctggcctcccaaagtgctgggattacaggtgtgagccactgcaccctgcctcagtacctccattcttcccacacaccctcctcatgtgctccttcctgacttctgggcccttccttccttttttttttttt

SEQ ID NO: 722576 - DNA, 625 bp, Homo sapiens
ctcttctcatgactgtgttgctcagctgggtgctaagtttcattatctttgcccttttcacccattttctgcttctgtttgacacaccatgtggagagctgataagcgacatctataaagagcaggtaattctatttcaagcataatattatgtggcttggccttctgcgatcaaaagaaatcagataactggactagaggaattcaagcataagtgtaaaatctgttgggtcttttttttttttttttttcatttcttcttcatgtcacgggaatacccagccatggtcagaaattggagggctttgtggcagtcactatatgagatgctgaggttatagttgtgaattaaataaagtccctacttccaggagcttatattctagtgaagaaaatagatattacattaaaatgttgcacatgttatcattgcatgggtgcaaagtgctttgaaggagaggtacaggatgctgtgaaaatgtataatgggggctcactcatctagaaagaatgtggaacaatgacaaggtyggaatagctagagaaggggaaatgagttagaaatggcacaaaagagggctggagagagagacattaaatcccacagatcctattgcatcatgga

SEQ ID NO: 722577 - DNA, 625 bp, Homo sapiens
ctcttctcatgactgtgttgctcagctgggtgctaagtttcattatctttgcccttttcacccattttctgcttctgtttgacacaccatgtggagagctgataagcgacatctataaagagcaggtaattctatttcaagcataatattatgtggcttggccttctgcgatcaaaagaaatcagataactggactagaggaattcaagcataagtgtaaaatctgttgggtcttttttttttttttttttcatttcttcttcatgtcacgggaatacccagccatggtcagaaattggagggctttgtggcagtcactatatgagatgctgaggttatagttgtgaattaaataaagtccctacttccaggagcttatattctagtgaagaaaatagatattacattaaaatgttgcacatgttatcattgcatgggtgcaaagtgctttgaaggagaggtacaggatgctgtgaaaatgtataatgggggctcactcatctagaaagaatgtggaacaatgacaaggttggaatagctagagaaggggaaatgagttagaaatggcacaaaagagggctggagagagagacattaaatcccacagatcctattgcatcaygga

SEQ ID NO: 722578 - DNA, 610 bp, Homo sapiens
agctctctttacttttctatcaattgatcctagtcctactctctgaagctacctggaataatgtttaatccctcttctacatggttgctcttcagagcatatgatgagtcttagctcattctccaaagcctttatttctctaaaataaaagctgtacaatctttcaaattttttataagattctgaccctttattatcctggggatgcttatattgatccattctagtatgtcagtgtctttattttccaggtttaacttcttttatgatcccagaagtaatgaatgtttattacataaaataaaawattcggaccgtatataacttcaaaagaatgaaaggaaaggaagaaagaaaggaatgaaggaagggaggaatgaagaaaggaaaaaatcactcattattccattacccagataacatttttaaaattttggtccttattttctagtctttgtgtgtgtgagtgaataaatgtatgtttacacatctacttatctatatctccatctatagctgtatttttatatactggtgtagagatccaactacattaagcttcatatcttgattttgtattttcatagcatgcacactttctctcacagca

SEQ ID NO: 722579 - DNA, 2125 bp, Homo sapiens
tcccgattatacagtacttcccttactcttctagtctttcctttttataatttgttccccatcagtcttactattgtgacagatagatctggttactctcaaactttagcctcagtgactttcccgggcctagacagaattatctaatctatttatcagaacattccagacgcttcccagcctgttcccatttccaacttcatcctctgccatcaacccccagtctcactattcccagctctatcacactttataccacatcccaaacatgccaagccctttcaaccttctctctctctctctttctctctttttgctgggcttgccagccctcactgatatttttcaagatccrttttaaaacattttcttttaaagattttccagatacttgaactctccccatgctcctgagacttttaatcttgagcaggtgaagaaataatatgagaacaaaggcattgagtagtgtgtggccgagaccacatggtgcttttacctttccccccagatagcctttctaagttggggaacctcatttgaactacgggaactgaaaatgatttgagtgacaattttttcaactctgcctgagatggcacaaaactagtgccattttagatgcacaggagaagagttaagtcattatgtggaatgcatgctatagggtgatggagcgtaattttctcatgggactcaagttagaaagattgctacagggcatttttggatctgtcagctttctgtgcctgaccctccaagccctcactgatgccatgagcacctgatattcttaagacccttctctgacataatagcattagataacatatatatttgtggctatatgtgcttgttaaataattaatgggatgaataacctttgaaaatcctccattttcttttttccctatgccaagttagttactaggcccattaatcttttttaaaaatttatcttcatttatttatttactcattaagtagcatcaaacattcaagaatcatcttttcttcctgtgccagagaactggttaatcttagtttaagttttcccattactcaatatctttgctttttacttaatgctacgttaccatcgtcaaagctttcctgaggtatcttctcaaatctgaagttgcagaattagaagttgccaaagtcaactatggcacaaacttagaaggtaagagcatgtatatcgtatgatcttgggcaaacacttttgtcctgctccatgtcaacttcctcatctgcaaaatgggaagaggaaaatgcaggtaatatattcctttttttttcattattttaaaaaatctttaaaatttcaatagttttggggatacgggtggtttttggttccatggatatgttctttaggaatgatttctgaaaatttagttgtgcccattaatctttatttataatgttgcccgtagagtctatccttccttttcttctctgccgccaccattgtgtatatgtctgtcatctcagcccatattcctacactcatgtcctaatgttgccatttagctctttcactctctccccttcaaggatattgaactcacaccaattattcccccaaataaaaggacacattgccatttcaattccaaatatgataccaactggcttttagattaagttacaactcacaagactggcacgcaaggctcccatgctttggccccattttcatggtccagcgtgttccctcactccactcagacaaggactgtcactcttctgtgtctgctctttggtttgcgctggacagaccaccctccctccatgcaacttgtactactgacttctcttttacatttatttgccagacttatttatcacattttatcaaatcagataaacatcagattaatcaacatttatcaattgttcttcccaatatccaagttccaatcattttgcttcccgagcatattaaacagtatctgttgctcctttttttgcttgatacactctttccctgtttcccaccttatatttcatctgggcaaattcttttttatatttaaaatacctttaatgtaacatacatacaatggttaggaaaaagaagcaaagggtgagttatgtaatgttcaaaaaagtttttaaa

SEQ ID NO: 722580 - DNA, 2125 bp, Homo sapiens
tcccgattatacagtacttcccttactcttctagtctttcctttttataatttgttccccatcagtcttactattgtgacagatagatctggttactctcaaactttagcctcagtgactttcccgggcctagacagaattatctaatctatttatcagaacattccagacgcttcccagcctgttcccatttccaacttcatcctctgccatcaacccccagtctcactattcccagctctatcacactttataccacatcccaaacatgccaagccctttcaaccttctctctctctctctttctctctttttgctgggcttgccagccctcactgatatttttcaagatccgttttaaaacattttcttttaaagattttccagatacttgaactctccccatgctcctgagacttttaatcttgagcaggtgaagaaataatatgagaacaaaggcattgagtagtgtgtggccgagaccacatggtgcttttacctttccccccagatagcctttctaagttggggaacctcatttgaactacgggaactgaaaatgatttgagtgacaattttttcaactctgcctgagatggcacaaaactagtgccattttagatgcacargagaagagttaagtcattatgtggaatgcatgctatagggtgatggagcgtaattttctcatgggactcaagttagaaagattgctacagggcatttttggatctgtcagctttctgtgcctgaccctccaagccctcactgatgccatgagcacctgatattcttaagacccttctctgacataatagcattagataacatatatatttgtggctatatgtgcttgttaaataattaatgggatgaataacctttgaaaatcctccattttcttttttccctatgccaagttagttactaggcccattaatcttttttaaaaatttatcttcatttatttatttactcattaagtagcatcaaacattcaagaatcatcttttcttcctgtgccagagaactggttaatcttagtttaagttttcccattactcaatatctttgctttttacttaatgctacgttaccatcgtcaaagctttcctgaggtatcttctcaaatctgaagttgcagaattagaagttgccaaagtcaactatggcacaaacttagaaggtaagagcatgtatatcgtatgatcttgggcaaacacttttgtcctgctccatgtcaacttcctcatctgcaaaatgggaagaggaaaatgcaggtaatatattcctttttttttcattattttaaaaaatctttaaaatttcaatagttttggggatacgggtggtttttggttccatggatatgttctttaggaatgatttctgaaaatttagttgtgcccattaatctttatttataatgttgcccgtagagtctatccttccttttcttctctgccgccaccattgtgtatatgtctgtcatctcagcccatattcctacactcatgtcctaatgttgccatttagctctttcactctctccccttcaaggatattgaactcacaccaattattcccccaaataaaaggacacattgccatttcaattccaaatatgataccaactggcttttagattaagttacaactcacaagactggcacgcaaggctcccatgctttggccccattttcatggtccagcgtgttccctcactccactcagacaaggactgtcactcttctgtgtctgctctttggtttgcgctggacagaccaccctccctccatgcaacttgtactactgacttctcttttacatttatttgccagacttatttatcacattttatcaaatcagataaacatcagattaatcaacatttatcaattgttcttcccaatatccaagttccaatcattttgcttcccgagcatattaaacagtatctgttgctcctttttttgcttgatacactctttccctgtttcccaccttatatttcatctgggcaaattcttttttatatttaaaatacctttaatgtaacatacatacaatggttaggaaaaagaagcaaagggtgagttatgtaatgttcaaaaaagtttttaaa

SEQ ID NO: 722581 - DNA, 602 bp, Homo sapiens
ttaaaaaataaacattttgtttcttgtctaaaatttatttaaaatataaacatttgttattttgtacattttcttcaaaagtttattaactggaaagtggaaatagattgtttagtttggaaaagttaacccttcattatcagcaggacccagcaaaatctgacttcaytgactcattcaggaatattcatattggagaaaaaataaaagaaaaaattaagacattggaatttgaaaattttaaaaactgaatttcaaggctctctataacattacctaaaactaactttctaaagttatttcccactattttccaacatgttatagaggatccatggcagctgaactgccttctgtattttttaatgattataatttctcagaatttattgatgctgtcactacctcaaacaaaaatttccctaactcaactttaactatttctttttagccccagcctacttattatttgaagtctttctcaaaagtaacttcctccatggagcctttcttatttctccttgacaaaaataatcatttcttcctctgaacgtccatgatacattgcaagaaacattcactacacatgatttgagtttaat

SEQ ID NO: 722582 - DNA, 629 bp, Homo sapiens
tccacagttacccccacccccatcaacagggcaatagaccatcctgccccggtgcccacagccacaggactgaaccttccttatgaagagtgaatggaaggagacttgtggccatgaacgggtcaatgctgggatggctgcagtcccaggtgcagtagccaggcctgctccaccccaccccactcccactccactctcaggggtcctcagggccaggacatccctagggacctcatactcatggctcactgtgacctcactctgtcaggcagtgtttggggctgggtgctgaggctgggtactgaggctgtgtactgagactgggtgctcagggctgggtaccgaggctgggtgctcagggctgggtgctgagactgggtgctcagggctgggtgccgaggctgggtgctgaggctggggactgaggctgggtgctgacgctgggtgctgaggctgggtgctcagggctgggtgctgaggctgggtgctgaggctgggtgctcagggctgggtgctgaggctgggtgctgaggctgggtgcttgggcctgagctgtgcttacttctgcctcctcatcaccaccacagctccacaaggaaagggtcccacccatgtcacagyggggaaac

SEQ ID NO: 722583 - DNA, 557 bp, Homo sapiens
cgagtttaaaaaaagcaggaacttttactgaaacgtttgggtttcaggcttctcaygaacaaccagctggtgtggccctcctggccagctctgtacagctcagcggagcttcctttatgggcacttgagtctttgctgtggtttcccaatgcccaacctgcctggtcccccctgtgcagccacctggcccccgcgggcgtgtggttggcaactcctagactaaataaactctgctgcctcctggcaacaggtaaaaggtggagaggcctcactggcagatccagccgtggggcgtgggccacagcctgtgcacagtgggagtccccaaagctatctaaacacttagagaatgcaacatttatggcattaaaatcaagatggtttctctttctgctcctccaaatagtttccaggtgaaggcagagggtggatcgtgggctctcgtggacttgctgtcttctgttttagggctagggcttatcttggtggatgcgaagacagaaggggttttgagattggctcaccttgaaagcacagcatatgggttaggagcaggg

SEQ ID NO: 722584 - DNA, 557 bp, Homo sapiens
cgagtttaaaaaaagcaggaacttttactgaaacgtttgggtttcaggcttctcatgaacraccagctggtgtggccctcctggccagctctgtacagctcagcggagcttcctttatgggcacttgagtctttgctgtggtttcccaatgcccaacctgcctggtcccccctgtgcagccacctggcccccgcgggcgtgtggttggcaactcctagactaaataaactctgctgcctcctggcaacaggtaaaaggtggagaggcctcactggcagatccagccgtggggcgtgggccacagcctgtgcacagtgggagtccccaaagctatctaaacacttagagaatgcaacatttatggcattaaaatcaagatggtttctctttctgctcctccaaatagtttccaggtgaaggcagagggtggatcgtgggctctcgtggacttgctgtcttctgttttagggctagggcttatcttggtggatgcgaagacagaaggggttttgagattggctcaccttgaaagcacagcatatgggttaggagcaggg

SEQ ID NO: 722585 - DNA, 557 bp, Homo sapiens
cgagtttaaaaaaagcaggaacttttactgaaacgtttgggtttcaggcttctcatgaacaaccagctggtgtggccctcctggccagctctgtacagctcagcggagcttcctttatgggcacttgagtctttgctgtggtttcccaatgcccaacctgcctggtcccccctgtgcagccacctggcccccgcgggcgtgtggttggcaactcctagactaaataaactctgctgcctcctggcaacaggtaaaaggtggagaggcctcactggcagatccagccgtggggcgtgggccacagcctgtgcacagtgggagtccccaaagctatctaaacacttagagaatgcaacatttatggcattaaaatcaagatggtttctctttctgctcctccaaatagtttccaggtgaaggcagagggtggatcgtgggctctcgtggacttgctgtcttctgtttyagggctagggcttatcttggtggatgcgaagacagaaggggttttgagattggctcaccttgaaagcacagcatatgggttaggagcaggg

SEQ ID NO: 722586 - DNA, 620 bp, Homo sapiens
acttaagtttttttttcttatactttaagttctggggtacatgtgcagaatgtgtagttttgtcacataggtatacacttggcatggtgttttgctgcacccatcaacctgtcacctacattaggtatttctcctaatgttatccctcccctagccccccacccccgacaggccccggtgtgtggtgttcccctccttatgtccatgtgttctcattgttcaactcccacttacgagtgagaacatgtggtgcttggttttctgttcttgtgatagtttgctgagaatgatggtttccagcttcatccatctccctgcaaaggacatgaactcatccttttttatggctgcatagtattctatggtgtatatgtgccacattttctttatccagtctattattgacggacatttgggttggttccaagtcttctctattgtgaatagtgtcacaataaacataygtgtgcatgtgtctttacagtagaatgagttataaaccctttgggtatgtacccagtaatgggattgctaggtcagatggtatttctagttcagtgatttcattctttttgtgctggtctgatattatagagtgatctcaacagtatcatgaaaag

SEQ ID NO: 722587 - DNA, 617 bp, Homo sapiens
ctgggagtgtatatgtatccaattgctcctttttattaggacatagccacattggattagggcccatcctgatcacctcatcttaacttgatcatctgcaaagaccctaaatccaaataagatcacgttcacaggtactaagttaagacttcaacatctttttgagggacacaattcaacttgtaacagttggaactgtttgctttgattaagcaaagacccaatagtgatttttcggtctcctaaaatactaagattacttccaggatctcaagcaagaatcaagacctataaagaaagtgkatatatagcctctacctgccagacattgtattggaagtttagccatggcgatactgctaagtagatgttaataggctcattttatggatgaagagactgagtctcaggatagtcagagaccatacccaaagtcaagttcagctggagagggatggacccaggattctaatccatgtatgtctgattcccaaaactgttacggcatgtggtgcattttttgtctcagaaaaatatcatcttcatacctttgtggctcaaatcagctgtacaaattacaatggctgaacatgaaaaaatgaggactctgggacaaa

SEQ ID NO: 722588 - DNA, 1505 bp, Homo sapiens
ttctgcttccctgcctgagtcatgttttacacagatatgatattgtgtgggaaatctgggcaacactgacactgttaatgttcataaaatgactccaggggccaggtgtggtggctcacgcctgtaaccccagcactttgggaggctgaggcgagtggatcacttgaggccgggagtttgagaccagattggccagtatggtgaaaccacgtctctacagaaaatacaaaaattagccaggagtgggggcacgtgcctgtaatcccagctactggggaggctgaggcagaagattcacttgaacccaggaggcagaagttgcagtgagccgagatcacgccactgcactccagcctgggcgacagtgagactctgtctctaaaacaaacaaacaaaaaaatatgacagcagaaaagtgatgatttcactacagaatcattgagaactcactctaaacaaccagcacgtcatcttaaggagatgactcattaaatttcctcttggtatgtaactgcagctggttggtacccatgaagtcaggtgttggcagctaccttttggctttgatttacggaaagaaaatgtgattgctttcttggggtcttttacaaacaaatacagagaaaagctgctccatgtgcagggaaaccagcctcttgattctgtgtgaagtgcgtaatcctgaaaaggaaaatgaatgagccttggagatgctcttcaagagacatgagggaaaatagagaactaaagggagatgtgaaactactaatttaggaaataagagaacttcaaataccttgtaggttagtgaaggtgagacaatcttacagtcacgcaatcaaatgctattattttatagtcaaaagtgctacgagaagggtttaagtggattcagcactcctgtagcagtactacagtaaaaatctaggcgttatgatatccattccaatggcatgtctactaaactgcattgcttctagtaatttgtttgctatttggtgtccatggtatcagtgttttggaaggtgaggtgaggaatctgatctttaaggcccaatactgtagaatgggctrtaattcaaatagagaaacttggagtcagcgcattttaatcgtctttaactcagacacttgcattgctgaagttaagtgcccttgatatcaggaatattgatgtttttatagaatcagagagctgtgaactaagggaggcagaaatgaagttatgtagaatttgaactaaggctgcagaatgcaaaatgcctcctaacactaaaattgccttttggacctatgcttcaaaatttttggctcatcctcctggaattcctacccctcacttcccaaagatgctctcttctttccttgctacctgcatgtatcctcatgtttttctatcatacacagtcatgtgttgcttagcaatagtgagaggttctgagaaatgtgtccttagatgattttgtcatcatgtgaacatcacagagtggacttacacaaactta

SEQ ID NO: 722589 - DNA, 1505 bp, Homo sapiens
ttctgcttccctgcctgagtcatgttttacacagatatgatattgtgtgggaaatctgggcaacactgacactgttaatgttcataaaatgactccaggggccaggtgtggtggctcacgcctgtaaccccagcactttgggaggctgaggcgagtggatcacttgaggccgggagtttgagaccagattggccagtatggtgaaaccacgtctctacagaaaatacaaaaattagccaggagtgggggcacgtgcctgtaatcccagctactggggaggctgaggcagaagattcacttgaacccaggaggcagaagttgcagtgagccgagatcacgccactgcactccagcctgggcgacagtgagactctgtctctaaaacaaacaaacaaaaaaatatgacagcagaaaagtgatgatttcactacagaatcattgagaactcactctaaacaaccagcacgtcatcttaaggagatgactcattaaatttcctcttggtatgtaactgcagctggttggtacccatgaagtcaggtgttggcagctaccttttggctttgatttacggaaagaaaatgtgattgctttcttggggtcttttacaaacaaatacagagaaaagctgctccatgtgcagggaaaccagcctcttgattctgtgtgaagtgcgtaatcctgaaaaggaaaatgaatgagccttggagatgctcttcaagagacatgagggaaaatagagaactaaagggagatgtgaaactactaatttaggaaataagagaacttcaaataccttgtaggttagtgaaggtgagacaatcttacagtcacgcaatcaaatgctattattttatagtcaaaagtgctacgagaagggtttaagtggattcagcactcctgtagcagtactacagtaaaaatctaggcgttatgatatccattccaatggcatgtctactaaactgcattgcttctagtaatttgtttgctatttggtgtccatggtatcagtgttttggaaggtgaggtgaggaatctgatctttaaggcccaatactgtagaatgggctataattcaaatagagaaacttggagtcagcgcattttaatcstctttaactcagacacttgcattgctgaagttaagtgcccttgatatcaggaatattgatgtttttatagaatcagagagctgtgaactaagggaggcagaaatgaagttatgtagaatttgaactaaggctgcagaatgcaaaatgcctcctaacactaaaattgccttttggacctatgcttcaaaatttttggctcatcctcctggaattcctacccctcacttcccaaagatgctctcttctttccttgctacctgcatgtatcctcatgtttttctatcatacacagtcatgtgttgcttagcaatagtgagaggttctgagaaatgtgtccttagatgattttgtcatcatgtgaacatcacagagtggacttacacaaactta

SEQ ID NO: 722590 - DNA, 1505 bp, Homo sapiens
ttctgcttccctgcctgagtcatgttttacacagatatgatattgtgtgggaaatctgggcaacactgacactgttaatgttcataaaatgactccaggggccaggtgtggtggctcacgcctgtaaccccagcactttgggaggctgaggcgagtggatcacttgaggccgggagtttgagaccagattggccagtatggtgaaaccacgtctctacagaaaatacaaaaattagccaggagtgggggcacgtgcctgtaatcccagctactggggaggctgaggcagaagattcacttgaacccaggaggcagaagttgcagtgagccgagatcacgccactgcactccagcctgggcgacagtgagactctgtctctaaaacaaacaaacaaaaaaatatgacagcagaaaagtgatgatttcactacagaatcattgagaactcactctaaacaaccagcacgtcatcttaaggagatgactcattaaatttcctcttggtatgtaactgcagctggttggtacccatgaagtcaggtgttggcagctaccttttggctttgatttacggaaagaaaatgtgattgctttcttggggtcttttacaaacaaatacagagaaaagctgctccatgtgcagggaaaccagcctcttgattctgtgtgaagtgcgtaatcctgaaaaggaaaatgaatgagccttggagatgctcttcaagagacatgagggaaaatagagaactaaagggagatgtgaaactactaatttaggaaataagagaacttcaaataccttgtaggttagtgaaggtgagacaatcttacagtcacgcaatcaaatgctattattttatagtcaaaagtgctacgagaagggtttaagtggattcagcactcctgtagcagtactacagtaaaaatctaggcgttatgatatccattccaatggcatgtctactaaactgcattgcttctagtaatttgtttgctatttggtgtccatggtatcagtgttttggaaggtgaggtgaggaatctgatctttaaggcccaatactgtagaatgggctataattcaaatagagaaacttggagtcagcgcattttaatcgtctttaactcagacacttgcattgctgaagttaagtgcccttgatatcaggaatattgatgtttttatagaatcagagagctgtgaactaagggaggcagaaatgaagttatgtagaatttgaactaaggctgcagaatgcaaaatgcctcctaacactaaaattgccttttggacctatgcttcaaaatttttggctcatcctcctggaattcctacccctcacttcccaaagatgctctcttctttccttrctacctgcatgtatcctcatgtttttctatcatacacagtcatgtgttgcttagcaatagtgagaggttctgagaaatgtgtccttagatgattttgtcatcatgtgaacatcacagagtggacttacacaaactta

SEQ ID NO: 722591 - DNA, 635 bp, Homo sapiens
atccaatattgcaggctgaagcactgtactgcaaaagcaagaacagttcagtgcataaacgaacagtgcagtctgtagttgtaccttgctttctattacttcataacaattagtatagttatgtgtaagttgcagactacctgcattcatataaattaaacagtattttcttttcttttttttttttttttttttgagacagagtctcactcttgcccaggctggagttcagggcrtaatctcagctcactgcaaccgtgcctcccgggttgaagtgattctcctgcctcagcctccagaatagctgggattacaggtgtgcccaaccatgcctgtctaaattatgtatttatagtagggatggtgtgttatcatgttcaccagcttaatcttgaatccttgacctcaggtgatccacccgctcagctctaaagtgtgggatacagggtgagcataaacagtattttctacaatagtatgagtacaaagctgcactacttacttgaattaatcacttaaatggttattttaatatcattatttacacttctgaaatataaaatgttttaactgaagtatagttttaatttttaaaactataattttaaactatacacatactatatacatactat

SEQ ID NO: 722592 - DNA, 588 bp, Homo sapiens
tgacattaggctctcttaagataaatgatattctacagagagatgcaatcaggagaaaagagaactgacagccccaagccaaaaattgtgtccaagttccagggctccgttaggagaactctcactctgggcaccaaatcctgtttctggagccatcaatgtttttaattaaatacaagcagtctatatccaccaaggttggaaaatgttcatcctttacatgttaatttattaagatggaacttcacaaagatttaataaagtgacaaggaaattattttgcatcaaaagattcctgtattctgactcagccgggtcccagactgtttttcgaccattagaaaaagtggatgtgacatgatacatcttgttgcaagagaatatgctttccacttagtgtctacaataaacatggacacaaaattagtcctgttcccacatagagagcaaagggktctttattgcctcagaaaactcaagggacacatgagccctgtttactttgtggtgtacctctctgagtatgaaagtgggaatggatgggaaaatgctttgtcctttttacttctgttccatcagtgtttcttt

SEQ ID NO: 722593 - DNA, 623 bp, Homo sapiens
tagaaaagtgtggaaatgtactcaatagacataaccacatctagagaaggataaagggggataaagggcactttggttttatctgtaatagctaatattatagaacaatacatttgtgtatcacacatgtaattmaaatgatttgtaaagttctagtttaaggtaatttttacaaaaaacaaaacaaacaattctatggagtgcagaattccacattcagaagcagatgaactgatttctgggctatccattggacacgcaatacataggaaaattttgtttgtagtacctacttatccacctccaataatccttccccatgtttatttccattcactattcttttatatatccagggtggttaaattgcagtttggctctttaggatacatgtgctttgtgaattctccttataagtaattgcatgcacagatatcttacttcaaaattacctggcccatgacttctttcattagttcttttggcatataactaaatagacaattgaatatcagtttagacaagagataaaagtgttaattgcattacctcacccacatagcaattgtaacttttgatgcccccttcaattgcaaatggttagaaatgagggaatttcagaa

SEQ ID NO: 722594 - DNA, 598 bp, Homo sapiens
acattgatgtgtccacacccctctctggacaaggcaccaccctcaggaattttaccacagcatttttgatcctagtggtttttttggccaaaaacctacaaaagtgtctacaagtctcctggcatatccctattttcagacacggaatctgcagtagcatcctgttttctccaccagcctaggattcataatcttatctggctgcatggacccagaaatgaatcagagtacagccccacctgggccactatctatagcacaaaccagtccttccacctgcattgcactctctccaatcgagggatttttttcttttaacttttatttttgggtggttcaggggtacatgtgcagstttgttatacagctaaaattgtgtcatgggagtttggtgtggagattattttgtcactgcagtactaatcatagcaccaaaaatgtactttttctgacccttttagtcctcccaccctcaactaggcctcagtgtcttttttcccctctgtgttcatgtgttcttatttatctcttacttataaataataacatgcatttggttttctgtttctgtatcagttttctaagaatagtgatctcc

SEQ ID NO: 722595 - DNA, 598 bp, Homo sapiens
acattgatgtgtccacacccctctctggacaaggcaccaccctcaggaattttaccacagcatttttgatcctagtggtttttttggccaaaaacctacaaaagtgtctacaagtctcctggcatatccctattttcagacacggaatctgcagtagcatcctgttttctccaccagcctaggattcataatcttatctggctgcatggacccagaaatgaatcagagtacagccccacctgggccactatctatagcacaaaccagtccttccacctgcattgcactctctccaatcgagggatttttttcttttaacttttatttttgggtggttcaggggtacatgtgcagctttgttatacagctaaaattgtgtcatgggagtttggtgtggagattattttgtcactgcagtactaatcatagcaccaaaaatgtactttttctgacccttttagtcctcccaccctcaactaggcctcagtgtcttttttcccctctgtgttcatgtgttcttatttatctcttacttayaaataataacatgcatttggttttctgtttctgtatcagttttctaagaatagtgatctcc

SEQ ID NO: 722596 - DNA, 574 bp, Homo sapiens
tcgaggactgtaagtagaaatgacatggtatgtgttttcgtgggattactctgattgctgcattgggaatagacaatagcagggaagaagtrgaagcagggagacgagatagaaccctgttgcagtagctaaggcctaagatggcaatggcctggacagaggtggctgcagggattaggttcaggacctattttgaaagcagaactggcaatactcactaataaataggatatggaggtagaagaaagagaaatcaaagatgacttctgtttttgttgtagcttgcttgtttttcgagggaactggctgaaaacccagtagattttggtggctgttcttgactaagaagagtgtggaacaaagtcacagagccacggccccagacaagacctggatgaagcgctacagcctggtagtgccaagactgggagggaaacagaagagcactatgagacagaatccagaagcaaggagaggaaggaaaggccttggaccccctaaggagaaggaggttgggaggacctattagggaacacttcacagctatgctccctagattacttttgtgatcatt

SEQ ID NO: 722597 - DNA, 574 bp, Homo sapiens
tcgaggactgtaagtagaaatgacatggtatgtgttttcgtgggattactctgattgctgcattgggaatagacaatagcagggaagaagtagaagcagggagacgagatagaaccctgttgcagtagctaaggcctaagatggcaatggcctrgacagaggtggctgcagggattaggttcaggacctattttgaaagcagaactggcaatactcactaataaataggatatggaggtagaagaaagagaaatcaaagatgacttctgtttttgttgtagcttgcttgtttttcgagggaactggctgaaaacccagtagattttggtggctgttcttgactaagaagagtgtggaacaaagtcacagagccacggccccagacaagacctggatgaagcgctacagcctggtagtgccaagactgggagggaaacagaagagcactatgagacagaatccagaagcaaggagaggaaggaaaggccttggaccccctaaggagaaggaggttgggaggacctattagggaacacttcacagctatgctccctagattacttttgtgatcatt

SEQ ID NO: 722598 - DNA, 2317 bp, Homo sapiens
ttgcacaccatgtctagtgatagtcatttagattcccctagagtcaggcaaactagctgtgaatctgacaacaagatggataaattattatcctgacaactacaaatctggcaagagctggagaaattattctggcagtaatgacagaaacaggtcaggcttggattgagccagagctaagtaacaaatatttctagtattttatgcaaaaccccattcaaccattcttctttcagttcagtgaagcttagaaacaataagaaacaatatttatgtgacttcggaagaattcaggaaactggtaaggatgcctgaaatcaggagaatcaatgggtgaagatggatttatgctagtattcttttaagtgctgctgtaatcttagacttcagattttgccttcagagtgacataaacctaataatctttcccagccttggaaatatttcttctcctccaatctccaaggtgacttcttcttattccatctcctaaactactctgtttactcctaatacaatactatatacttccttgctccatagatatagcagacaccatctaggttgcacccaacatacaatttatcctttcttttggtaaataaacccccaaatttgtttggcaagtcatctttttccacctggccctgggcttcactggacaagtcatggaaattctattcctctagccagtcccttgcataggaataagcttgtgataccattccatgcactacgatatgaagagaaacttattgagaggtttctagggaaggtttcctagttttgaaaaagaaatacatggggaaaaaatcatcattttgctgctgaatgctatcatgtgcttggaactaatccaggaaaagtcaattgagtaacaacggcagagtagaaagactgaaagaatgaacatccttgatgtcattagggccactgaatcaacaaagctaggactttccattttaggacttaaaaaagttctcattgtttaagcaattttgaattgagttttctattacttgcagctgaaaatatgataactgataaaatacatatttgtaggcttttactccttatttcatagtaaacgtatttgtgattacctacagtacctgccatataccaggtgtcaaggaatgatggtttcctaaagagacaaatgcatggatggatagatagatgtgctacatctgcacatctgcagctgcattgcttcgctcagtgaattgcatcactctccacccaggtgtgtaagccacatatctcttctacatacttttctatttctccctccttatagccaatctatttccaagttctggtcattttgccctctagagtcattccaaatccacttcttttatctctatcaccattctatttcaagctatcatctcgtaattgctttagtactgtaaccttctaactagctttgtgggctttcttaaatctgttctccatacagcagtcaaagggaatcttttcaaaatgctaaatttcccatctctcccacctccattttttattaaatgatgaagaggtaattccaaaattcataagatgcccacaaggcctgaatggtctgggtcttctacctctgtaggatacctcttgcctgtgataacctagcaagacaggccttctgttattccttgaatgtggcttgctttgcgcctgctgttctctatggctgtcagggtctccccactggcactcctacacaatcacatacyccatgtgttccatcctccatttttcagctcagtcttgcctcttccaaagaagcatttcttcttctctctgagcaggcaacgctcccttttttacgcttttctaataccatggacctctcagtcatagccaagatgaccatccaactgggatacgttttagagtgaatgaggatgctattaataattacagtgagacaataggtataaacagagattgttctgggataacagaagatttggtcattctattatttttatgttcattagtatattcatttaaggtctgcctcccctgacatttctacatggggggggaccatgtccttctttttgctggccatcatattccccatgccaggttcaataatagataatcaataaatatttgttggagcaatatgggaacaaataaatatgataattcaattaccattttccttttctactaatttttattgttctccttagacttgtgttaatgtaatgttatgctatattcttgcttcttgttttttaatatctggtcatttggcacagctctgctttattgctgactcattcagtcagcaagtgtctactgaaca

SEQ ID NO: 722599 - DNA, 2317 bp, Homo sapiens
ttgcacaccatgtctagtgatagtcatttagattcccctagagtcaggcaaactagctgtgaatctgacaacaagatggataaattattatcctgacaactacaaatctggcaagagctggagaaattattctggcagtaatgacagaaacaggtcaggcttggattgagccagagctaagtaacaaatatttctagtattttatgcaaaaccccattcaaccattcttctttcagttcagtgaagcttagaaacaataagaaacaatatttatgtgacttcggaagaattcaggaaactggtaaggatgcctgaaatcaggagaatcaatgggtgaagatggatttatgctagtattcttttaagtgctgctgtaatcttagacttcagattttgccttcagagtgacataaacctaataatctttcccagccttggaaatatttcttctcctccaatctccaaggtgacttcttcttattccatctcctaaactactctgtttactcctaatacaatactatatacttccttgctccatagatatagcagacaccatctaggttgcacccaacatacaatttatcctttcttttggtaaataaacccccaaatttgtttggcaagtcatctttttccacctggccctgggcttcactggacaagtcatggaaattctattcctctagccagtcccttgcataggaataagcttgtgataccattccatgcactacgatatgaagagaaacttattgagaggtttctagggaaggtttcctagttttgaaaaagaaatacatggggaaaaaatcatcattttgctgctgaatgctatcatgtgcttggaactaatccaggaaaagtcaattgagtaacaacggcagagtagaaagactgaaagaatgaacatccttgatgtcattagggccactgaatcaacaaagctaggactttccattttaggacttaaaaaagttctcattgtttaagcaattttgaattgagttttctattacttgcagctgaaaatatgataactgataaaatacatatttgtaggcttttactccttatttcatagtaaacgtatttgtgattacctacagtacctgccatataccaggtgtcaaggaatgatggtttcctaaagagacaaatgcatggatggatagatagatgtgctacatctgcacatctgcagctgcattgcttcgctcagtgaattgcatcactctccacccaggtgtgtaagccacatatctcttctacatacttttctatttctccctccttatagccaatctatttccaagttctggtcattttgccctctagagtcattccaaatccacttcttttatctctatcaccattctatttcaagctatcatctcgtaattgctttagtactgtaaccttctaactagctttgtgggctttcttaaatctgttctccatacagcagtcaaagggaatcttttcaaaatgctaaatttcccatctctcccacctccattttttattaaatgatgaagaggtaattccaaaattcataagatgcccacaaggcctgaatggtctgggtcttctacctctgtaggatacctcttgcctgtgataacctagcaagacaggccttctgttattccttgaatgtggcttgctttgcgcctgctgttctctatggctgtcagggtctccccactggcactcctacacaatcacatactccatgtgttccatcctccatttttcagctcagtcttgcctcttccaaagaagcatttcttcttctctctgagcaggcaacgctcccttttttacgcttttctaataccatgkacctctcagtcatagccaagatgaccatccaactgggatacgttttagagtgaatgaggatgctattaataattacagtgagacaataggtataaacagagattgttctgggataacagaagatttggtcattctattatttttatgttcattagtatattcatttaaggtctgcctcccctgacatttctacatggggggggaccatgtccttctttttgctggccatcatattccccatgccaggttcaataatagataatcaataaatatttgttggagcaatatgggaacaaataaatatgataattcaattaccattttccttttctactaatttttattgttctccttagacttgtgttaatgtaatgttatgctatattcttgcttcttgttttttaatatctggtcatttggcacagctctgctttattgctgactcattcagtcagcaagtgtctactgaaca

SEQ ID NO: 722600 - DNA, 2317 bp, Homo sapiens
ttgcacaccatgtctagtgatagtcatttagattcccctagagtcaggcaaactagctgtgaatctgacaacaagatggataaattattatcctgacaactacaaatctggcaagagctggagaaattattctggcagtaatgacagaaacaggtcaggcttggattgagccagagctaagtaacaaatatttctagtattttatgcaaaaccccattcaaccattcttctttcagttcagtgaagcttagaaacaataagaaacaatatttatgtgacttcggaagaattcaggaaactggtaaggatgcctgaaatcaggagaatcaatgggtgaagatggatttatgctagtattcttttaagtgctgctgtaatcttagacttcagattttgccttcagagtgacataaacctaataatctttcccagccttggaaatatttcttctcctccaatctccaaggtgacttcttcttattccatctcctaaactactctgtttactcctaatacaatactatatacttccttgctccatagatatagcagacaccatctaggttgcacccaacatacaatttatcctttcttttggtaaataaacccccaaatttgtttggcaagtcatctttttccacctggccctgggcttcactggacaagtcatggaaattctattcctctagccagtcccttgcataggaataagcttgtgataccattccatgcactacgatatgaagagaaacttattgagaggtttctagggaaggtttcctagttttgaaaaagaaatacatggggaaaaaatcatcattttgctgctgaatgctatcatgtgcttggaactaatccaggaaaagtcaattgagtaacaacggcagagtagaaagactgaaagaatgaacatccttgatgtcattagggccactgaatcaacaaagctaggactttccattttaggacttaaaaaagttctcattgtttaagcaattttgaattgagttttctattacttgcagctgaaaatatgataactgataaaatacatatttgtaggcttttactccttatttcatagtaaacgtatttgtgattacctacagtacctgccatataccaggtgtcaaggaatgatggtttcctaaagagacaaatgcatggatggatagatagatgtgctacatctgcacatctgcagctgcattgcttcgctcagtgaattgcatcactctccacccaggtgtgtaagccacatatctcttctacatacttttctatttctccctccttatagccaatctatttccaagttctggtcattttgccctctagagtcattccaaatccacttcttttatctctatcaccattctatttcaagctatcatctcgtaattgctttagtactgtaaccttctaactagctttgtgggctttcttaaatctgttctccatacagcagtcaaagggaatcttttcaaaatgctaaatttcccatctctcccacctccattttttattaaatgatgaagaggtaattccaaaattcataagatgcccacaaggcctgaatggtctgggtcttctacctctgtaggatacctcttgcctgtgataacctagcaagacaggccttctgttattccttgaatgtggcttgctttgcgcctgctgttctctatggctgtcagggtctccccactggcactcctacacaatcacatactccatgtgttccatcctccatttttcagctcagtcttgcctcttccaaagaagcatttcttcttctctctgagcaggcaacgctcccttttttacgcttttctaataccatggacctctcagtcatagccaagatgaccatccaactgggatacgttttagagtgaatgaggatgctattaataattacagtgagacaataggtataaacagagattgttctgggataacagaagatttggtcattctattatttttatgttcattagtatattcatttaaggtctgcctcccctgacatttctacatggggggggaccatgtccttctttttgctggccatcatattccccatgccaggttcaataatagataatcaataaatatttgttggagcaatawgggaacaaataaatatgataattcaattaccattttccttttctactaatttttattgttctccttagacttgtgttaatgtaatgttatgctatattcttgcttcttgttttttaatatctggtcatttggcacagctctgctttattgctgactcattcagtcagcaagtgtctactgaaca

SEQ ID NO: 722601 - DNA, 579 bp, Homo sapiens
tttgccctcctttctcttattactgccttctcttggccaaacccaaacagaagccagagggcaagggagcccctgggtactttctacaaagggagagcaggcgaggaaggtgccgggggatgtagagaggggtgtggacatagccagcactcagcccagcatgtatttgttaatggggtgtctagccatcggctggcaggaagggactcttgggccctgcctggattgggtttctaaggtctgctgtctgggagttaccgtggcaggctatagacgtgccctgcctgctgtgcccacatacttggtccatggggacagtgattcctcagcatacacccagcttcagttcctgcccagcactttggctgccgtgcctgtggcttctgggttccaagaaatgatatgagatgtctccctggcagtgagtgccttgagccagacctgggattagaggagaggaggtgctttggataggagctggggggcacagtgggtgagtggaggagtctcccacaggctcagaacctggtcgcaagccttcccartggcttgcaaggaggctgtagacaggccctcgtc

SEQ ID NO: 722602 - DNA, 941 bp, Homo sapiens
tttatattgaaaattgtgagtcacattgataactccaattccaaaccaatacaacaaagttcattctagttttctccctttccatattagatgtaggggagggattattttgcctgctacatttatgaactcatttaacccctacaacatcctcatgatttaaattaagaaaaaattattgtacccccaaacactatagtgtgtatttcaaatggttcaggaggaaaaaaagttctttgtattctactgcaatatataagtttgggattattttaaaattttaataagtttatgtctacaaaaaccttttttggatcaatagactataagatacaatagtgttcatagtattycttgtcatctgaatgagataaaggcattaaccattttccaaattgtggggaaggagagagaaggagaaagaaagggagagacaagattttaatctcagaatagtaggagctgagaaaggtgatttatgttggcttatctttaaggatctggtctcatgattcagagctgcaatcttcagcttgccattttgttcatcatcttcatgtggtcacttgacagccatccaggcctgaggtccactcaaaaactagaggatcctgattagctaatcagccatcttggttggaagacagttcatcaacatggcagaacctattactctaaaactaacaattgaatgaacttcttgaggcttctgaagacagtcccctcagtgagagaaaaacagaagagaactgtgataactcacttggatttcagagatctctggtccaagtttcttactttacagacaaagaaaccgaagcataaagtggtgaaggatttggacaaggcttcacagtggttaagtttcaggacttggaaaacactcacattcccacgtacatcttcaacggcatgccagaattaacttgggtgctcatgac

SEQ ID NO: 722603 - DNA, 941 bp, Homo sapiens
tttatattgaaaattgtgagtcacattgataactccaattccaaaccaatacaacaaagttcattctagttttctccctttccatattagatgtaggggagggattattttgcctgctacatttatgaactcatttaacccctacaacatcctcatgatttaaattaagaaaaaattattgtacccccaaacactatagtgtgtatttcaaatggttcaggaggaaaaaaagttctttgtattctactgcaatatataagtttgggattattttaaaattttaataagtttatgtctacaaaaaccttttttggatcaatagactataagatacaatagtgttcatagtattccttgtcatctgaatgagataaaggcattaaccattttccaaattgtggggaaggagagagaaggagaaagaaagggagagacaagattttaatctcagaatagtaggagctgagaaaggtgatttatgttggcttatctttaargatctggtctcatgattcagagctgcaatcttcagcttgccattttgttcatcatcttcatgtggtcacttgacagccatccaggcctgaggtccactcaaaaactagaggatcctgattagctaatcagccatcttggttggaagacagttcatcaacatggcagaacctattactctaaaactaacaattgaatgaacttcttgaggcttctgaagacagtcccctcagtgagagaaaaacagaagagaactgtgataactcacttggatttcagagatctctggtccaagtttcttactttacagacaaagaaaccgaagcataaagtggtgaaggatttggacaaggcttcacagtggttaagtttcaggacttggaaaacactcacattcccacgtacatcttcaacggcatgccagaattaacttgggtgctcatgac

SEQ ID NO: 722604 - DNA, 779 bp, Homo sapiens
caccttatacacatagcctaaaggtaattttatttttcccttggcaatgctgaataaactgtatgttgtgcacttgtgttttgactgtgagccatcccatgaggtcagatgtgaaattttcctcttgtgacatcacrttggcattcaaaaactttcagattttggagcattttggatttcagatttttggattagggatgctcaacctgtatatcaatcacgtgtgcaataactttgtgtttttaagaccagcgttacagcagaactggtcgtggctgtaaggagttcaaatcctgtgttggttccaggttgcctagaccctgagggtggccaggaagacagtgttgctatagcactgacaatgcttcaaggccacccacatagccatgagggaactcagcatctgttgggtatcattctatatttccatagactgaggtttattataactattagatactgtatagaaagaaaaccagcataggattaagcctcagagaaccacattttatttttagctttgtaagctgtgtgacctaaggcgagtccctttatctctattggattcagttcctgatctgtaaaataaactggacttcatttcatcttgctgagatcccttctagctccaatatcttgtgacgctgaggccttccacgctgattaaatgcagagcaaacgaaccattttcaatctcttcaaaactctccacgttgctcagcaacatttgttcccaggttgtcttccttggttgtttcccaaagtaaaaattccaaatt

SEQ ID NO: 722605 - DNA, 543 bp, Homo sapiens
gtttttagaatttttttaccccaaaatgcaggcagtattttcacagaagttaatgtagactgattagaagtatttwaaaaaagaaggtaatgcatgctttttctatacaaaatatatgaaaacaaaattttcttcttttgagacagagttttgctcttgttgcccaggctggagtgcagtggcgtgatctcagctcactgcaacctccacttcttgggttcaagtgattctctcttgcctcagcctcctgagtaggtgggattataggcacgtgccaccatgctcagccaattttttgtactttaagtagagatggagttttatcatgttggccaggctggtcttgaactcctgacctcaggtgatccacccacctcagcctcccaaagtgcagggattataggcgtgagccaccgtgtcctgccaaaaccaaaattttaaaaaagaagataaaggccaagtgcagtggctcaggcctgtaattccagcactttgggaggctgaggcgggtggatcacttgaggccaggagttcgagaccagc

SEQ ID NO: 722606 - DNA, 543 bp, Homo sapiens
gtttttagaatttttttaccccaaaatgcaggcagtattttcacagaagttaatgtagactgattagaagtattttaaaaaagaaggtaatgcatgctttttctatacaaaatatrtgaaaacaaaattttcttcttttgagacagagttttgctcttgttgcccaggctggagtgcagtggcgtgatctcagctcactgcaacctccacttcttgggttcaagtgattctctcttgcctcagcctcctgagtaggtgggattataggcacgtgccaccatgctcagccaattttttgtactttaagtagagatggagttttatcatgttggccaggctggtcttgaactcctgacctcaggtgatccacccacctcagcctcccaaagtgcagggattataggcgtgagccaccgtgtcctgccaaaaccaaaattttaaaaaagaagataaaggccaagtgcagtggctcaggcctgtaattccagcactttgggaggctgaggcgggtggatcacttgaggccaggagttcgagaccagc

SEQ ID NO: 722607 - DNA, 543 bp, Homo sapiens
gtttttagaatttttttaccccaaaatgcaggcagtattttcacagaagttaatgtagactgattagaagtattttaaaaaagaaggtaatgcatgctttttctatacaaaatatatgaaaacaaaattttcttyttttgagacagagttttgctcttgttgcccaggctggagtgcagtggcgtgatctcagctcactgcaacctccacttcttgggttcaagtgattctctcttgcctcagcctcctgagtaggtgggattataggcacgtgccaccatgctcagccaattttttgtactttaagtagagatggagttttatcatgttggccaggctggtcttgaactcctgacctcaggtgatccacccacctcagcctcccaaagtgcagggattataggcgtgagccaccgtgtcctgccaaaaccaaaattttaaaaaagaagataaaggccaagtgcagtggctcaggcctgtaattccagcactttgggaggctgaggcgggtggatcacttgaggccaggagttcgagaccagc

SEQ ID NO: 722608 - DNA, 1232 bp, Homo sapiens
ataggtgcccaccaccatgctcagctaatttttgtgtttttagtagaaatggggtttcaccatgttggccaggctggtctcaaactcctgacctcaggtgatctgcctgcctcggcctccaaaagtgctgggattacaggtgtgagccactgcccagccagagaaggacctttaaaagcaataagcataactgctgttccttagtgggttttgtacagacatgtatttttgtttttcagctaaggagacaccagagggtgatggttgacagtagttggtacctcacagctgggcactgatcaggtagggggtgtcaatatygtttaggataatgtataacttttcttattagggggagattagtcacggggaactcttgtatataccaaacaggcaagagacttattgcagtttatcagtgccattttactaaaaactcccggtgagacagaaatactcaagtttttcggacaggtcttcctctcacaggtctgcctcccctgtctattgtcttcttacatactttatacttcacccatttattatttgtttcccatttatttgtctccccactataaaatatgcttcacaagtcttggatttttttttgtctttttagttaatcgatgtatctcaagtgcctagactagtgtctggcatttgcaggtgttcagtatatatttattgaattaataaatatggaaaagcctaatgataaagcaagaaaatatcagaaaggggattggagagcgcaggattagaaaaaagggtgttagatattcccagtgaaaagtattattaaattttgttggcttgatatgctccatttcagtataggaagatactgaatggactgttcatacattcattcatttttttcagccattcagcacactatttactcttgcagtgttttttgtagatatttctgtctttactctgataaaatttgtattccatattgttgttcttggacctctgtctcttaccttttctgtcttctgtctgagaaatcataatttctgttactgtttagttgatcatacatttactgaacatccttcacactgtgctaggtaatggcatttatagatgagtaaaacatcattctttcctttaaacagttcatgatttggagatgagatagaagtaaacaaggaagtaagtacagcaatagaagtgtgtactatgcagaacagtagcatggaggaaggagcgctttactgtctaca

SEQ ID NO: 722609 - DNA, 589 bp, Homo sapiens
tagaacaaccttaaactgattctcttgaaggttacctttaggagaggggcattatgaagctgtattattgacaataacaagttgggaaaacgcagagaaccagtgtagaaggtagaacaagaagctatggacaagttgaggacaatgtttgatccagtgagtactcagaacacaggatcgaaacagggcagtgttgaagacaaatgatgtagtacaattgaaagaacattaaacaaagaacaaagggcaagttctsaacctggccctgccactaattaattgtgaccttagacaaggaggagcactgaagtcaaataaaacattcctttcagtaaagcacagagcttgaggaagtgcttgaggaagactgaaattctctgtccaggagggtaaactatattattagtaaataccacaaatttatcagtccatacaatttctaattagtgtttctgttctttagggaggcatgggtagaacaaatatattaacttattttttagactacagacatgctttaattaaaaaaatcataaagtaattatttaatcctaaaatgacatttacaaacaaaaaccactacatgatg

SEQ ID NO: 722610 - DNA, 2358 bp, Homo sapiens
tctgccctgttgctttcagttggatttcatcttcccacccttttcattttctcagcttgattcacatagatcatacataagagctaaagaaaatgtgtttagtgcctgagggaattcattttctgcctgggataactagacaaaatgtgatgcaattcctcccctgaatttaaaatgttttgttatcttgaaggcaattttcctcatccaataaaaacagagaaggaaaacgggtgacctttaaaaacatatttttgaaatcgaagattctcacacacagaaatgcctctgataattttgggtgtagacagatgctctcttcctctttgtactccccacacattctgtcaatggcctattgttaaagtgtggactttctcctagaccacatcctgtctgtcttacagaggagaagcatactgttgaagtgaaaagaaagtcttgatatctgtgtgtagtctctgaaggtatagaaaaaacaaattcactgcagtacctcaagatatcattatattcaactcagggcccgtaagatttaggttggaaatttcctgatgatgaactcatggaactaagacatgtttgttttattgacaaatcaaagcttttttcataaaaggaaagtgtattattttcattgccaacactggttaaaaatggtaggaaaaagggatgaagagcaaatgtatatatttgaacctcattgaaaaaaaatcattctcctttgaataaaacctctgaagaagctacttctaatttgaaaaattcctgttaaagaaaggacatttcccattaaatctgaaatagataattgacagcatctaacaacgaatccttaatttaacaaggcaataatatatttaaaaattgataaatatgagatctccaactactataaaattagaactaataattagactattatagaaaactagaatgaaatcaaggagaaaatcaaggaaattggactcataactcgagtaaccaaycatcccagtttgcctgggactgaagaatctccaaaacaagacactgcgcactaaaatcagcacagtctgaagataaccagtacagttggtcagcctatgtgataactcatttattcttccaacattttcgtatttatccttcaagagatttttctattagaattatcttcctgcatatattatcctcactatttctaaatacattgcattcattcattatgcaaacacaaaatgaattaacttttagagaataaactcctgacagtggattctcagatagttcatacctaaagcaataaacacaaaatctgaatctctattaatagattttaatggaggaggatctgaaattacagacactttgtcatttagtattggatgtgtttttggttttggtgcttatcaactcttgagtgaattcatttctcagctacataagcctatccctttcctctccaatcttcgttcatccggaattggagatatgactcagagatcagtaatctttatgtgctttttggagtgcactgcattgtaaagctagtattttggtacacttaatgtttaaagaattaaactaatcagccaggcccagtggctcaagcctgtaatcccagcactttgggaggttgaggtgggcagatcacctgatgtcaggggttcgagaccagcctgagcaacatggagacaccccgtctctactaaaactacaaaattagctgggcatggtggcatgtgcctgtaatccccgctacttgggaggctgaggcaggagaatcacttgaacccaggaggcggatgttgcagggagccaagatcgtgacattgcactccagtctgggcaacaagagtgaaactccatctcaaaaaaaaaaaaaaaaaaagtattagcctaatcaaacttaatgaaaatatgaaaaaatagaaaacctctaaaagatatcactaatatccaaaacttcaatagatgagaaaatttctgtctattccacattggttttttaattgacttaaacataggaggaaaaaacattcaacaatggtgaagtaaagcgtgatgatttgtagatatgcttctttctgcaataaaataaataaagtacttgggttcttttaagtgttgtagcaaaaatctgaaataaagtcattcaatattaggatgttataggttcttagtcaaagtccaagagcacatggtcctctcttctaaaggcagtgccagactgcactgagccccaatctaagcacaaacccatctgagctctatcccataaatcactactaagattgtttttcttcaaaacaagactgcctgaatttgggaagtgtatttgtattccacaagattccttttattaaaatagatgga

SEQ ID NO: 722611 - DNA, 990 bp, Homo sapiens
tttcttattcaagagaaacttttcacacatcagttttttcctcttagttcaaagtaaaataaaataagataaaatagaataacatacgttattatattaacaatattaatatatattaagtaacatttaaggcactcatacaattatttaaccaagtttcatggaagggtttttgttgttgttgttgttgttgttttaggagggcccatttttatatacaggaacatatgccctgattatttctcttcacacttgaagcctagtaagctgctcctgtattctcaacttcttcctaattttaatagctgaagttagaacaaacagcaaggtttgactggaagaaaatgattcaaacttggctaagatcacttccactttggtttataatagaaccaccaaatctacaattcagaccatgtgcctgagatgtgggacagtatctggtgtaagtccacttccctttctaatcctccctagtgatttactcagatttgtccatacttgaggggcccttgcccagcaatctactaggtcagtgcagtccagaactgcaggtttcttactttgtacacggtttggagcctgaggcatagggtcacattattactttctggtccactctaacacaatgaaagtaattttttgctatactactgtattagtctgttctcatgctgctgataaagacatacctgaggccaggtgcggtggttcacgcctgtaatcccagcactttgggaggccgaggcwggtggatgacaaggtcaggagatcgagaccatcctggctaacacagtgaaaccccgtctctagtaaaaatgcaaaaaaattagccgggcgtggtggcgggcgcttgtagtcccagctacttgggaggctgaggcaggagaatggcatgaacctgggaggcggagctggcagtgagctgagatcgcgccactgcactccagcctgtgtgacagagcgagactccgtctcaaaaacaaacaa

SEQ ID NO: 722612 - DNA, 990 bp, Homo sapiens
tttcttattcaagagaaacttttcacacatcagttttttcctcttagttcaaagtaaaataaaataagataaaatagaataacatacgttattatattaacaatattaatatatattaagtaacatttaaggcactcatacaattatttaaccaagtttcatggaagggtttttgttgttgttgttgttgttgttttaggagggcccatttttatatacaggaacatatgccctgattatttctcttcacacttgaagcctagtaagctgctcctgtattctcaacttcttcctaattttaatagctgaagttagaacaaacagcaaggtttgactggaagaaaatgattcaaacttggctaagatcacttccactttggtttataatagaaccaccaaatctacaattcagaccatgtgcctgagatgtgggacagtatctggtgtaagtccacttccctttctaatcctccctagtgatttactcagatttgtccatacttgaggggcccttgcccagcaatctactaggtcagtgcagtccagaactgcaggtttcttactttgtacacggtttggagcctgaggcatagggtcacattattactttctggtccactctaacacaatgaaagtaattttttgctatactactgtattagtctgttctcatgctgctgataaagacatacctgaggccaggtgcggtggttcacgcctgtaatcccagcactttgggaggccgaggctggtggatgacaaggtcaggagatcgagaccatcctggctaacacagtgaaaccccgtctctagtaaaaatgcaaaaaaattagccgggcgtggtggcgggcgcttgtagtcccagctacttgggaggctgaggcaggagaatggcrtgaacctgggaggcggagctggcagtgagctgagatcgcgccactgcactccagcctgtgtgacagagcgagactccgtctcaaaaacaaacaa

SEQ ID NO: 722613 - DNA, 990 bp, Homo sapiens
tttcttattcaagagaaacttttcacacatcagttttttcctcttagttcaaagtaaaataaaataagataaaatagaataacatacgttattatattaacaatattaatatatattaagtaacatttaaggcactcatacaattatttaaccaagtttcatggaagggtttttgttgttgttgttgttgttgttttaggagggcccatttttatatacaggaacatatgccctgattatttctcttcacacttgaagcctagtaagctgctcctgtattctcaacttcttcctaattttaatagctgaagttagaacaaacagcaaggtttgactggaagaaaatgattcaaacttggctaagatcacttccactttggtttataatagaaccaccaaatctacaattcagaccatgtgcctgagatgtgggacagtatctggtgtaagtccacttccctttctaatcctccctagtgatttactcagatttgtccatacttgaggggcccttgcccagcaatctactaggtcagtgcagtccagaactgcaggtttcttactttgtacacggtttggagcctgaggcatagggtcacattattactttctggtccactctaacacaatgaaagtaattttttgctatactactgtattagtctgttctcatgctgctgataaagacatacctgaggccaggtgcggtggttcacgcctgtaatcccagcactttgggaggccgaggctggtggatgacaaggtcaggagatcgagaccatcctggctaacacagtgaaaccccgtctctagtaaaaatgcaaaaaaattagccgggcgtggtggcgggcgcttgtagtcccagctacttgggaggctgaggcaggagaatggcatgaacctgggaggcggagctggcagtgagctgagatcgcgccactgcactccagcctgtgtgacagagcragactccgtctcaaaaacaaacaa

SEQ ID NO: 722614 - DNA, 1545 bp, Homo sapiens
tctaacaaccaacgtttgtctctcacccgtgctatgtgtctgctgtgtgttggcaatgggctctgtgccatgtcttctcactctgggatgcagagggggcctctgccatgtggagcatcatcgggcttgaggcaggctgtgcactgcttcttagagcttcttcttagatgcaacttacatcacttctgctgacatctcattggcccaggcaagccacacggccatgcctgacttctggtgggggacgggcatagagatgagaaatcctgcctgtgactgttagcaggaaagctggagaattattatttattagagagagcagttctgctgagccatcgtagagtcagggtttttttttttttttccttgtccctcctggggctgctaatcatctgagccgaatccattctgtttttcgctgccagattaatcattttccttgtgcctctgccacatcactccatctgctgtgaacttgagtgcctgctgcagggcattgaagctggtcagcctggcactcaaagaacccctgggctggcacctctcaagatagtcaaagctgagtcagagagggcagagactaggtatttctcactccccacttcgtctccagcttccagaactggcatacagtaggtgctcagtaattatttggtgcctggcatacagtaggtgctcagtaattatttggtgcctggcatacagtaggtgctcggtaattatttgtggcaactatgaaatgacttgcccaagcccacatgccaggttgtaagccagacagggctcacggcaaagtgctcactattgacaaggctcagtgcagccgccccgcggccacggtgttttctggcagtcggcgctcgctgtgccccaggcctcaggagccggctgtcttgtatgcatcagtccctgggggtccttcaaaccaccccccaaggaaggcactgtggtaagcaggttctttactgagatagtcatctgtgtttattcaccctgtgatttccctccctcaattccaaggcaacatccagccctttcctcgatatttgtttttctgggcagagatgagaagcctctggaagatagtccatctatactggccttttgtgaaaactcgatgtattagtcagggtatagattcagctgctgtaacaaagaaactccaggctgggcacggtggctcatgtctgtaatctcagtgctttgggaggttgaggtaggaggatcactagaggccaggagtttgaaaccagcctgggcaacatagtgagaccctgtctctacaaaaaatacaaaaaaawtttagctggacgtgggcatggtggcacacaccagcagtcccagctacttgggaggctgaggcaggaggtcaaggtggcagtgagctatgatagagccattgaactccagcctgggcgacagagcaagaccttgtctcaaaaacaaacaaaacaaaacaaaaagagagagagaaagaagagaaactccaatgcaacattggctaaagcaagagagaagcttgtttctctctactgtaagagggct

SEQ ID NO: 722615 - DNA, 2238 bp, Homo sapiens
tataatgtgtattatttgcataaaagggactgagcgcagtaatgctttgggagaccaaggcggggggatcgcttgagcaaaagagttcaagaccaacctgggcaacataatgagaccctgtctctaaaaaaaaaaaaaaaaaaaaaattagttgggcatggtggcacatgtctgtagtcccagctaccagggaggcagaggtgggagggtcacttgagcccaggaagtcgaagctgcaatgagccatgactatgcctttgcactccatcctgggcaacaggatggctctaacaggggctagaaaaaaaaaaataaaaaaaccctaaaaggtcgtttagcaattaacttctctaagttttcagaaatcctcctacacttggaatatcataaaaagtagtaattttgtgaaactgtagggagactctgctattcatgcttttaaaatgtgcttttaatttctctgactactaaaggctataataatgtcacttggaaaacagaaagctgagtgagcatctgagggtaaaaaggaatgttttcacagactcagttggtaaataccactggccctagctgaacactgtgattccttaactggaagccaatcacgatcttaattttaaaagtctccttgttacatagggcaaagggcagccatattatctcaattactccttcacagaaaactcaaggattgaactaatactttgaagcatcataaacatgttttcctttttaccatatttctgagtctatatgaagaggtcagatttaattgaaatagtcaacaggctcagatgttagtctagtttgggtattacaaagggcagctttttctttatgttaaggacatttatgatatattatatataatataccataggtcactagatacaaaaacatatatgtcaaggatatatataacatacaatacatgtatgttaggatatttattatagcattgtcatattatataagttggagagtctaaatacccatcaataaggaaatagagctagtctcagtggctcatgcttgtaatcccagcaccttgagaggcccacgcagaaggattgcttgaagccaggagtacaagaccagcccggtgcaacatagcaaaacactgtctctataaaaaatttttaaaaatatagccaggcatagtggtgtgcacttgtagtcccaactgcttgggaggctgaggtgggaggatggtttgagcccaggatttgaggctgcagtgagctatgattgcgccaagggactccagcctggtgacagggtgagacctagtatcaaataaataaataaggaaatagttaaatcagcagtcctcaacctttctgacaacagggactggtttcatgaaagacaattttttcacggactgggctgtagcagggggtaggttttgggatgaaactgttccacctcagatcatcagtcattagttaagattctcataaagagcatgcaacctagatccctcacatgcacagttcacaatagggtttgtgctcctaagaaaatctaatgccactgctgatctgataggaggtggcgctcaggccgtaatgtttgccagccactcacctcctgctgtatagcctggtagggtctgcagcccagggtttgagaacccctgagttaaatttscatatccataagataatgtagtgtgcaaccatttaaaacaatgaggttagatctataatgtattggctacttcacaattaaagtatatttaaagcatttcattttatgacacattttaagcaaattttgttagaattcttgcaatatctgctgagctgcaaaggaaggctacacgctacattgacactgtaccttgttatcaacaaaactgctagttattaaatttttggttttttattcccaatgggtgcatgctcaaatattggaccttcagactcatctgtatattgccaaaggactgtacatgaggattcatattccatataaacatctcagtatattgggcaaaacttactaaaatacatcaaaggatctttgatctactaaaccaggagttggcaaatgttttctctgtaaaaacagatagtaaatattataggctttgtggaccataggtctctgttgttgtagaccaaaatctatcggtcacagacaatatatgaacaggtgtggctgtgttccagtaaaactttccttactcaagttcaacagagcttaaaggttattaaaaaaaaaaaaaaa

SEQ ID NO: 722616 - DNA, 672 bp, Homo sapiens
cgcaccttccctgtaagagagcttgccagcagagagtgctctgagcactgaaactcagaggagagaatctgtctcccaggtctgctgatagacggtaacagaatcaccagaagaacaatctctaaacagagtcaactataactactaactccagagattaccagatggcgaaaggtaaacggaggaatcttactaacaggaaccaagaccactcaccatcaccagaacccagcacacccacttcgcccagtccagggraccccaacacacctgagaacctagacctagatttaaaagcatatctcatgatgatggtagaggacatcaagaaggactttaataaatcacttaaagaaatacaggagaacactgctaaagagttacaagtccttaaagaaaaacaggaaaacacaatcaaacaggtagaagtccttacagaaaaagaggaaaaaacatacaaacaggtgatggaaatgaacaaaaccatactagacctaaaaagggaagtagacacaataaagaaaactcaaagcgaggcaacactagagatagaaaccctaggaaagaaatctggaaccatagatttgagcatcagcaacagaatacaagagatggaagagagaatctcaggtgcagaagattccatagagaacatcggcacaacaatcaaag

SEQ ID NO: 722617 - DNA, 1994 bp, Homo sapiens
tcacttttccatatctgcacctgtaaatggaagggggattgaactagatgatttctgaagtcccttcagttctgacattctaccctatacccaaaggcattgtaagatcattaatgcccctccctcccctaaccttacttaccctgagacttctggcaagggtgggagaggagggagcggaataaggagtggctctctgtgactcctgacaaggttcaggcttgccagtttcccaaggtttatgctttctcctttaatcaagagactctgcctcttcccttcctatatttttgcaactccatctttcttccacaccaaaataaaggaggaataagaaagccgcactcttaaaagaagccgatcctttacactctgtggaatgccagctgctaatgttgtgccctgttcaaacaacagtgcactggcagtagagaggtggggtatggcggggctacccctttactcctcagctaggtgcatccttggcttactgtggcccatccaaggagggggctgtcccacatggtcgctgcaatgaggcagtcatctcattggttctctgcttcttccctaagcctttcggcctattctccatatagcatctagggtggttttaaaaccaaactcaggtcatatgagtcctttgttcaaaacccactcgtggcttcatagctccttttcagtaaaacccaaggcccaaaccatggcttacaaggtcctacaagacctacactcccctacttctctcatgagatctactactctctctttgcttactccactccaattccccaacactttcctttcctgcctcaaagctttttttttttttttttaaagaggcgaggtcttaccgtgttgcccaggctggtcccaaactcctgggttcaagcaatcctcctgccttagcctcccagggcactgggattacaagcatgagccaccatgcctggcccaaagctttcatatttgctatcacctctgcctggaatgcttctcttccagataaccatcatagattactccttcacctccttcagttagttgtctgtttcaatgtcacctaccaaagaggcctcccacaaccacatgtataacacacacacacagacacacaccactccctaccccatttatcccactttacttttcttcacaacatttatcaccatctgatacattatatatttattkcttgctgattgttttattctgcctaagatatcagctccttatgtgttttgttcactgctctgtctccagtaccaagaatagtgcctagcacacagtacttcaaaaactgaactaatccccagggtctctactgactttactgaaagctcactcagactggatgctatgcctggcatatggtaggcacataacaaatacctgctgaggccgagcgcagtggctcacgcctgtaatcccagcactttgggaggcccaggcgggtggatcacctgaggtcaggagtttgagaacagcctagccaacatggtaaaaccccatctctactaaaaatacaaaaactagccgggcatggtggcacactcctgtagtcccagctactcggaacgttgaggcaggagaatcacttgaacctggaaggtggaggttgcagtgagccgagatcacgccactgcgctccagcctgggtgacagggcgagaatccatctcaaaataataataataatagtaataacaacaacaaatacctgctgaaaggatgaacaggaccaaaagaatcattatgaaggtataaaatgtctatctgctcaccccagccattgccccaacagacagaatcagattcattcattcattccctttcttcttccctctcttctctatggcacaggatagccacagaaatgcatctttgaaacaataataaaatgaggattcagaatcacccatacaaaccagttctctgtgactgcaggaggcatgtgtcagcgggcagcttattcagcaatcaccatatgccagc

SEQ ID NO: 722618 - DNA, 570 bp, Homo sapiens
cccaggctggagtgcagtggcgcaatccccggtcactgcaagctccgcctcccgggttcacgccattctcctgcctcagcctcccgagtagctgggactacaggcgcccatcaccatgcccggctaattttttgtatttttagtagaggtggggtttcaccgtgttagccaggatggtcttgatctcctgacctcgtgatctgcccacctcagcctcccaaagtgctgggattacaggtctgagccactgcacccggcccatcagttctcagttttagcttgcccattttctgccctctgtaactatagagtttttggaatatcaagattttagactgcctgggtcagttttcccttccactgctgaagggtttctaaacaactgactaaatttttgttgttgtttttttttgtttttttgagacggggtcttgctctgtcatccaggctggagtgcagtggcacratctcagctcactgctacctccgcctcctgggttcaagcgattctcctgcctcagcctcccaagtaggtgagattacaggcgcctgccaccacgcctggctaat

SEQ ID NO: 722619 - DNA, 603 bp, Homo sapiens
ggggaagataggaggagctcagagttgctgaggagatagtgggggcaaaagaatactgggcgtggtggtgcacgcctgtagtcccagctactcaggaagctgaggcaggggaatcacttgaacccaggaggcggaagctgcagtgagccgaggttgtaccactgcactccagcctggccacagagcgagattccttctaaaaaaaataaaaaaattttagctttatgtctartgttgtaatttttatttatttttattattactttttaaattgagacagagtttctgtcacccaggttggagtgcagtggcgcaattatggctccctgtagcctccaactcccatgctcaaacaatcctcccacctcagcttcctgagtggctgggactacaggtgtacacaccacatttggctaattttttattttttgtagagacggggtcttgctgtgctgcccaggctggtctcaaactcctggccttaggtgattctcccaccttggcttcccaaagtgctgggatcataaacatgagctaccacatctggcctaatgttgtaatttttaaaaaggaatagtcagtgtattatttaatattaataaa

SEQ ID NO: 722620 - DNA, 1134 bp, Homo sapiens
  misc_feature 599: n = A,T,C or G
aaaatggaaataacaaagacatacttaaaagcagaactatatagtgtagttattttttggtgctactgataataagtctattatggaaccatattttatatgtgtatgtcttcttgtaccagatagtgatgtttatcttatacccgactgttaaaatattgcatttttcaagcatatgaatagagaatgttcagctgcctgaaaagaccagattgacgtaatatgaactctttgtttacttgctgaatggacacagcttctgccctgtcagctgctttgtccacagtcttaaccttgttgtggaagaaccacctgtgtgagtgactggatagttaattctatactcctgtttacccttggggtcttctgttaagagtaaatcacatatagaagcagagtgtagaatagtggtcgccaggggctgggagtgggagtggttgagtggggagatgtttgagaaggggtacaaagcttcagttagacaggatggataacttctgaagagccattgtatggcatggtgactacagttaataataatatattgtatacttgaaaattgctaatagattagatcttaaatgttgtcaccacaaaanaatgttaagtatgtgaggtgatggatatgttaattagcttgatttaatcattttacaatgtatacatatatcaaaacatcacattgtacaccataaatatatgcaatttttatttgtcaattattccttaacaaagctggaggaggaaattaaatcagataatgcctttgagtgtgaacaatatacctgaattaggtttagaccactgaggccaggtggatatgaactctaaaacactgcatttagaaggagtatcatttattgagagyttcttatatgaagaaactgtttagtagagagatgtgttaatgcttcactcaggacatctgaaggtctatgctgttgagcattaaatctgggaatattagtatttagagtgttcgatctctgaagaattctcctgtcttactcatttcatttcagatagcaaattggtataagataatagtgtggaggccagattatatccttttttctggggggaaaagaaacgtgattcataaaagatatttgtccagagaaatggctatattaa

SEQ ID NO: 722621 - DNA, 642 bp, Homo sapiens
tgcttggactctgccgcgaggcctgctcaaagcttgatcctaccagagaggagtgaccagatggttccagcatttgttcgccccggctcctgcacctgctcacctgtgtgcttccgcttcttgaggggttcagagctytgggctgagtaaatgagctaccccttcacaagtcctgtgaagaggtcaagggaaatatcccgtcttaaaggtatcaaaaaattcccttgagtatccactgttacttttatgttatactaaaattccattttactctttcagttcattgttaataaagtagtttataaagagaagaaataagatttgaaataatgaggagggggtggaagggaaagaagggtgattcccagagattattttgtttactttgagcatgtttttgattcatagaaaaaacaaatttgattacagactttagaaaaaacctaaaattagttttgtatgtgtatttttaatagcattaaatacatctgtaattatctcagataacaagaatattttggtgtacatccttctaatctttcttcctagatttttattttattttatttctgagatggagtcttactctgttgcccagactggagtacagtggtgcaatctcaactcactgcaacctttgcc

SEQ ID NO: 722622 - DNA, 1676 bp, Homo sapiens
tgataatcaggatacattctgtagcatcaaaattctgcttagcaagggataaatcaagattgcaaacaccacctgagtcagagtgtcttcaatcacacagtccagttaaaccctgaaagcagctaacttcaggccaagatcccatagatgatcctcaatcaggcagttcggcttcttgcatgtcaatcaaaaaggtgattagcctgagacatagtaaccaagtgtaacaagtttgcttaaaataaaatagacagccaagaaccacagcaacccattcttaaagagaaaacaatatcttgataagtgattcttttctaaatatatgcctattactgtatatttgagctgctccagcaaatgcatcttaattttatattgtcccaaggagtatccttgttgcatttaattggtaatttgactcatttaagtgaataattcttgggagtttgccacatgcaaggcaaaaattaaacaaagttagtagaagtgacagtctggatcctccagtataaagggtaggacaagtgcacacaacaaaaggaagatactgaaaagaaagaaaagggcatgggcagagtggaaacatcaggaaatagcaatgagcattttatttgaagtggcagcagcagctaggggttgacagggcagtggggacaagaattataagtacaatcttagtgttggattagcttttaaaccttagggaaaccacttaatgtaactgaaaacaaacaaacaaacaaacaaacaaaaaacagaagcaggatggtagaaataacccaaaaagcaaaattcttaaaatatgtggagaaaaccatttcagtaattccttcctgactttgagcttcaatgttatttctaaaatagttataaattgcacagcaaagcaaactacttagcttctaaagcttytaaaacatgaaaaggcaggaatacaaagtcttggaaaatggccttccttactttatgcaaaatgaagcaattctattgttctgacatttttaaaaattatcctagaaaatgtccaccttatctcaagattctaactcaaaaaatgatcaattctaagtttgaaagaacaaaggtaaatatattttacaaaactttatcatttgaaaacctgaaattcctttgaacactgtgtaataaagtctcaaaatattgcataatgctgtgctttgcttctttgctccctgcttttagctattatctcacctttattgcagagaataaaaatttatatcctgggcaattttgtccttctctgcaagtgtagttcttcccatgtgcagaaaatgaataattttttaattaaataaatgtcaaatagttcagtttatgcataggaatggccttaataagcctatattatgtacgcaaatgttgaagaacatggtgaggaagcaaataatattttcactccttcagctgtttattagaaccaaggataggaaaaaataaattatttgacagctagatttttaaggatttctgcaagtataatatttgctttcttattaatttacattataaacacatcttcttattaaatttaccttagtcaggagaagaggaagaagcctcatttacacaggacattatgaactgactgaaagtgcatttcacaggatattttttaggtagaatcaacttctttacttctttgagagttttca

SEQ ID NO: 722623 - DNA, 1676 bp, Homo sapiens
tgataatcaggatacattctgtagcatcaaaattctgcttagcaagggataaatcaagattgcaaacaccacctgagtcagagtgtcttcaatcacacagtccagttaaaccctgaaagcagctaacttcaggccaagatcccatagatgatcctcaatcaggcagttcggcttcttgcatgtcaatcaaaaaggtgattagcctgagacatagtaaccaagtgtaacaagtttgcttaaaataaaatagacagccaagaaccacagcaacccattcttaaagagaaaacaatatcttgataagtgattcttttctaaatatatgcctattactgtatatttgagctgctccagcaaatgcatcttaattttatattgtcccaaggagtatccttgttgcatttaattggtaatttgactcatttaagtgaataattcttgggagtttgccacatgcaaggcaaaaattaaacaaagttagtagaagtgacagtctggatcctccagtataaagggtaggacaagtgcacacaacaaaaggaagatactgaaaagaaagaaaagggcatgggcagagtggaaacatcaggaaatagcaatgagcattttatttgaagtggcagcagcagctaggggttgacagggcagtggggacaagaattataagtacaatcttagtgttggattagcttttaaaccttagggaaaccacttaatgtaactgaaaacaaacaaacaaacaaacaaacaaaaaacagaagcaggatggtagaaataacccaaaaagcaaaattcttaaaatatgtggagaaaaccatttcagtaattccttcctgactttgagcttcaatgttatttctaaaatagttataaattgcacagcaaagcaaactacttagcttctaaagcttctaaaacatgaaaaggcaggaatacaaagtcttggaaaatggccttccttactttatgcaaaatgaagcaattctattgttctgacatttttwaaaattatcctagaaaatgtccaccttatctcaagattctaactcaaaaaatgatcaattctaagtttgaaagaacaaaggtaaatatattttacaaaactttatcatttgaaaacctgaaattcctttgaacactgtgtaataaagtctcaaaatattgcataatgctgtgctttgcttctttgctccctgcttttagctattatctcacctttattgcagagaataaaaatttatatcctgggcaattttgtccttctctgcaagtgtagttcttcccatgtgcagaaaatgaataattttttaattaaataaatgtcaaatagttcagtttatgcataggaatggccttaataagcctatattatgtacgcaaatgttgaagaacatggtgaggaagcaaataatattttcactccttcagctgtttattagaaccaaggataggaaaaaataaattatttgacagctagatttttaaggatttctgcaagtataatatttgctttcttattaatttacattataaacacatcttcttattaaatttaccttagtcaggagaagaggaagaagcctcatttacacaggacattatgaactgactgaaagtgcatttcacaggatattttttaggtagaatcaacttctttacttctttgagagttttca

SEQ ID NO: 722624 - DNA, 913 bp, Homo sapiens
  misc_feature 581: n = A,T,C or G
taggaaaatattaatcaaatgaaaagagatcctgccactaaacctcgaaaaccatggaaaccatttaccatgaaacggcctttttcagtactctacaaacaacatacttaaacaggtatctaaaaactaatatccttggagaaggaggtaaattagatacagtctaaaaactggagaggttgagggtagggttcacataacccttcaaggtgcacattgtcttctgaaatgttaagtttatggtcggctcgctgaaaggccatataaatgatacgtttagcgtctgttagctgaaaggccatataaagtccattcaaaactataggtttcattatttctaactatttttttgtacccattaaccaaccccccaactacccttcccaggctctggtaaccatctataaaatctctatctccatagttcaattgttttgattttcagctcccacacataaatgagaacatgcaaagtttgcctttctgtgtctggcttagttcacttagcataatgaccttcacttctgtccatgttgttgcaaatgactggacacaaatgataaatacttgaggggacgtcnccccgtttgccctgatgtcgttattacacattgaaagcctgtatcttatgtaacccatatcttatgtaacccatcttatgtaacccatatatagataaacctactatgtgcccacaaaaatcgacaataaaaaataaataaaacaaaactatatgtttcatctgaggcattttcattcccatcaagtctttcaatacaytttttattatcaagagcactgacagtcttacagccccatgtaatgtcaaagagatatgactaattattctttttagtaacaaatttattatgtgtgcccctgtctcactaccctttgaactctctgctttcca

SEQ ID NO: 722625 - DNA, 1407 bp, Homo sapiens
tgcataacacaaaacctaactatccatttctttattactgtaagctatttagaatgtcatactttattcaagtcttctcttataaatacattatataacttcatttagtatttcactgtcaaaaatattcttattaatggagaaaccaaaatctgattttgacattctcaagatagaatttttaaaaatttttacttattttttaaacaataaaacggcatacatcaaagccataatactcaacttagttccttaaaataagtaggtaataaatgaaaaattttttatttcacattacttgaatgtattctttatttttgtatatttattttttcttcagaaatactattttaaaatgtatttattttaatccatgcccatttccccataagaaattgtatttcaatatgcaatgagtgtttattggaaaagccactctgataaaacaactacaatggtgaagttaataggatcccacaaatgactctttccaaagattggtgacaggagagtcaattggttaattcaatttagatcatatgtaaaccctagggatctggatgtctagttctcagcaattaattaattaaacccaactttatctgttgaagtaagctgcataagcaggattatttattgattatatataatcaagacaaaagtaagcagcatgaagacagaatcattacgaacccttcattaaacttatagtgcataactaaaagcaggttattcgataattacctttttataaactatattggcctttgagattaaagagtggctagaggtacacactaaatttgcacaggttctgcatgcttggaattacttatgcaataatattttaaaatgtaatcttaaatattttgatatttaatagtgttttatattttaatcatattttaactttaaatkaagttaataaatattatatcactgcattgaaataatactcctatatgtaaaattagaaaatatcctttctctaccattttggatcaaagacataaggaggtgagaaatatcataataaatatccatgacaaataaataagttcacttaaagagtttataggttacaggcttggactttgccaccagacaaatactggtgccactatttgctaaatttgtgtgaaactcagcaagttaagcacattgggcttcagaatagtctttcataaaattagaaagatatcactacatatggagtgaggttttatgatttaatttatggtaaacactaatgtacaaagaaaatcaatgctttattaaaataaaaggtgtttatcacaaaaattacatttaataattacatgccaagagtttttaaagtcaattatgcacacatgcatacatacacatacatatgcacatataagtagacacatagataatagataa

SEQ ID NO: 722626 - DNA, 662 bp, Homo sapiens
tgaaataaacacaatatttaaactgaccagctttaatgagcagaaatggaaatgccgatatccttctctgggaaacacagttaggataaagggagtttgcaaagccagctactgagatggcaattaagccaagttcataaattggattttcagggtaaaaatggaaaaggggaaaatttaatcaaggaggatcaatactgcttatgtggagtgaaagtggcccatgtcatggggatctgggtttctggggaagggtgagagtgccctgctgcccrcccccaccgctcctcaccttgcagaaatggggtactggggcgcataaggggctcgctggccacttgtgcaaatgtttcctgtgcaagttacacctgccgtggcagctcagccttcctcgtctgtctcttgaagtgactgctgctcaccattccttagcgggctctcgcgtgtcctccaaacactgctgcatgccatgacacagctaatcacatgcatctgttgtctgcagcttgggtgtgaatttccctcttgaaacctgagggtaagggaaggggactgcacggctgctttgcaggggccccgactgctccttcctgggatgtgccgccacctccccagggcctttccctaccggcctcccctggtgttcccagccagcttcctgc

SEQ ID NO: 722627 - DNA, 1510 bp, Homo sapiens
cagagattctattttaattggtctgagcatttgcatcttaaaagcacttcaggtggttctaaagtacactgttagggagacgtctccctatatgacttattttcctcctctttcctgactttcttctgcttttcctcaacacactcccttctctacccttgagccctttctatgcaaaaaggaatgcagtaggcctaaaagaaacctaatgagcttcctccatccttccaggtactattttgatgaggattcctaggacgtgtgtgtatcttaaactaayatgcagacagaagcactattcacaaggtgcatgagtaggaatcagttaaaaggggtgggctggggagcagaatggctgtattcctggctcatggagcactaccattgtagtttatgtcctgttctgagtgtgccccggatgacactgaagtaattccatcattattcataagttacttacgctgaagagtattacacaggtatgccttgctcagtaggagagtttacaatcagaaatatcctgctttaccgtgcctgtgctgctgagggagagatggcccagttgctgggtaaggggtcccatcatggaggcaggctggagagaaatgggatggtccatccctggtgtcagaactgaaccctagaggcagcaacaaaggacagggttagctgcagcatcctgtgaggctgcctaaagcagtgatcggtggctgtcaggaccactggagacagacatttaagaatcctgggaaatggtaagtgagcagcaacccaactatgcaacaagaataggaactctgcctgtcagtgtggaaggaccctcgtctaagaataacaagcttaggtcttactgctgggttgcacaagggtctgagccagaactcacacccacatctcctggcatcaaaggccttttttttttttttgagacggagtttcactcttattgcccagactggagtgcaatggcacgatctcagctcactgcaacctctgcctcccgaatttaagcaattctcctgtatcagcctcctgagtagctgggattacaggcacccgccactacacctggctaatttttggcatttttagtagagacagggttttgtcatgttggccaggctggtctcgaactcctgacctcaggtgatttgcctgccttggcctcccaaagtgctgggattacaggcgtgagccacagtgcccagccagttttttctttacatcaaattgcctctttggcttctgcccacttctgaatactcactgaaggctgcatgaggtatgaatggtggtgcatccaggatgggttaggtacttgtagaggagatgtctgagtcactctctaaaacaagcaaaaacaaaaatgttaattgcctggaaactattattcagcccacagatctaataatgttcaacaaagctcagaaaagtttgaatgccccactcaaaatagaaacattaagaaaaactgtttttaaaatattagcaattcttaaaactcaataaa

SEQ ID NO: 722628 - DNA, 1687 bp, Homo sapiens
gcatccagggaggattgaatgatgaagtcatttgccttaagaatttataaaaactaagtaatctacaaaatttcaatgttacattcttttattgtaagctcatattttattgtaaaaatttaaaattaagtttcagtgtaagtacttgcatattaaaattaaagaaaattccacataattgaaaatataataaaactatattttaagtgatctaccttttaaaattggcacattgtaccaaagctatgctatcattaataacactcaaaatatataataggcctctacatattccaattaaaaatagaagtccttaaaatatttgagtatttatagtctataaagattttcagggacatttttattaatttgacacagatatgccttcatttctaatgttacaaacctgtatcattttaaatgcaattaaaagtggttatgaaagagtgtggacttccttgtgaagtaggaaatcactcttgtgattaacatgcaaacgagctcatgctggcagaatagattggggttttaaaaccccaattacttttgtatgattatctatttaccagtacacagtctattttcatttttcatctaatacaaaatcggcttgcttacatttttagcacagcaattaatatttacaataattatgacatcaggmactgctgagaactccaagtaaaccatttaccccagtctttattctttatatatgattaatatccttttataacttaatactgtatgtgaggttatatttatgcaaaaataaaaataagaaccactctcctctttgttttaaatttagttataatacatattatttttagaatattagtaagatgactattacagcataaaaatccaaaattttaagtcttattagaatatgtaaaaatagttgaatcgctcatagtaagaaaaataaatatatattgagaacaataaaacgtgtcccatgaatcttttcttttaaaaagtaataacagacaattctaaactttcactgacacactttgattcatacctgctacgtactgcacacatacacatttttccagacttctaaagaaaattataatgcattaatgacaggaaccatggtaatggaaaaaaggtcaccctctcttgaacaccttctgttttaaaccattatatataaagacattcgagaaagcaaagaattaaaagccagcctttgtgcaacccattactgaaatattatagaataatctatatcaaatgtagaggagcagcagattcttttggatctaaattaactgcagccatagaaacgcttttatgcttattatgtatctgcatgttgattcaattattaaaagaacacctgacagcatcagacttatttaattgaattattaaactggatgaataatcactgaattccttttgtgtgaaatttgtcctgaaaagtaacactggcatttggaaattgcaagtgatttgcatggtgaaatacagtgaacatggaaatttcctatttcagtattctgggtttttttctcccctcttctaagacaaatgaacagattattgtagtgtatattttctcttctacagtacagatttatgaatactttttgttactataccattaggcaatgtttcaacaatttcctcaatatcattatttaaatttttctcttatgtgaaaagtattatg

SEQ ID NO: 722629 - DNA, 2141 bp, Homo sapiens
taatgctgactttttttatggtcagcatttccatagaatttgtagttgaaaaataagacattgccagttatgagaaataactgtcaattttagtaatacacaggtggatatttagctagtccacttacaccatttattcatagaaagaagtatgatttgtatatgcaacaaatyttaagattttaagtctaattggaaaaatgaaattggattgcttctaaagcactagtgtcaaagttttagcaaattaaaaatcaagtgttcacatatgtagggattactttccccatgttccactaaaaataagtttagttttctgtgctagaaaaaaacatattttgctccagctgttttgaatgtatatcagttaattttccagtatactaattttgtttatagtcttgagaataagttacagttattttaacattagctcaactcaaagtacaggtttttacaagtttcgtatttgttgtgtgatgtttgtacaggtgtggcatgatggaattatttaaatgtgatgattttattattctgatttgaatccttatcatatgcattttagctttattttcagatatccattatacatgacttattaaaacaccatgcactgtaaaaatagttgttacaaagtgaggaaactgctatttcattatgtataactttctcacttacataatgcagtttccattctgaaaaagaattgagtcacaactaaattgaggaaaaagttaaaaaagaaagtgtttttgaatatccaaaacttgctttctagagagaggaagagtaaaagccataatgtctccttcgaggcataaaagcactctttatatatttattctttatccctttctttctccctcagttcccgctttacctcctccctctctccctagcctaagtctctgtctttatcgctacagtacagtatattttcctatggtaatttagactaacattgccattaaaatacaaaattagaagtaaagttggaagcgtttaagaattatttttgagaagtttatgtctgcttgttttagtaacttgaacagagagaagaagggaaggagagaaccagacaggaggaaaatgagagaaatagtaagaaaagggaataagagaggaaaagacagagctgaaggcttgggaagaggaaataaatcagattacattatatgcaaattttgagtaccaaaggaagataaagtgtgaaaactgtctaaacgtgtgaaaagttgacatttgtattctcgaaatcattttaacagtctgcaaaagaaattcataaataaatagtaaataaaatattcctggaaggtttagtgatgtctaaaagataaatagttggaattacaatttagattgcttcactaatataacaatcaaacatcagaccaccaagaaggtgttttaatagcatagaaaatagcaacgcatttcctatactgaaatgtagcaagtggtttttgtgtgtctgaaagattctactaatttcatagcataaacaacaaacctggtgctaacagtagtctgcactgtggactttttaagttgtttacctgaaacactgctggaaatggttgtcagaaaagggacaagaaaaatgctttatgtagtgagaggcactagattacaaatattaaatcagccttttgaacaatatgaataaccatgttaatacttttccttcagcagagaacaagaaaaaaaaggattacatttatgagcaaacagtgcttttctaaagcatatattcttatctattttatttctatgcaaatatttgaacagtttaggttttccttgacctttgtatttatttatagcgttttgcaaaaagtatgggtgcatgcttaggaattaataacttcaggacatgattgttaaggtctggtaaagctgtaaaagccccaagaaccagcattctagcatcattcagtaaaaacatgttttttattctcttatatattagtccatgtttcatcaaggacagctttctcaaatgttatttcagcttaattaaaaatctgcttaaaaggatatacaaaatattttaattatcaagtgtaatgatattttctttgtttcactctataaaatgtaaagctgaatttttgattaacattttatttgtaaaa

SEQ ID NO: 722630 - DNA, 2141 bp, Homo sapiens
taatgctgactttttttatggtcagcatttccatagaatttgtagttgaaaaataagacattgccagttatgagaaataactgtcaattttagtaatacacaggtggatatttagctagtccacttacaccatttattcatagaaagaagtatgatttgtatatgcaacaaattwtaagattttaagtctaattggaaaaatgaaattggattgcttctaaagcactagtgtcaaagttttagcaaattaaaaatcaagtgttcacatatgtagggattactttccccatgttccactaaaaataagtttagttttctgtgctagaaaaaaacatattttgctccagctgttttgaatgtatatcagttaattttccagtatactaattttgtttatagtcttgagaataagttacagttattttaacattagctcaactcaaagtacaggtttttacaagtttcgtatttgttgtgtgatgtttgtacaggtgtggcatgatggaattatttaaatgtgatgattttattattctgatttgaatccttatcatatgcattttagctttattttcagatatccattatacatgacttattaaaacaccatgcactgtaaaaatagttgttacaaagtgaggaaactgctatttcattatgtataactttctcacttacataatgcagtttccattctgaaaaagaattgagtcacaactaaattgaggaaaaagttaaaaaagaaagtgtttttgaatatccaaaacttgctttctagagagaggaagagtaaaagccataatgtctccttcgaggcataaaagcactctttatatatttattctttatccctttctttctccctcagttcccgctttacctcctccctctctccctagcctaagtctctgtctttatcgctacagtacagtatattttcctatggtaatttagactaacattgccattaaaatacaaaattagaagtaaagttggaagcgtttaagaattatttttgagaagtttatgtctgcttgttttagtaacttgaacagagagaagaagggaaggagagaaccagacaggaggaaaatgagagaaatagtaagaaaagggaataagagaggaaaagacagagctgaaggcttgggaagaggaaataaatcagattacattatatgcaaattttgagtaccaaaggaagataaagtgtgaaaactgtctaaacgtgtgaaaagttgacatttgtattctcgaaatcattttaacagtctgcaaaagaaattcataaataaatagtaaataaaatattcctggaaggtttagtgatgtctaaaagataaatagttggaattacaatttagattgcttcactaatataacaatcaaacatcagaccaccaagaaggtgttttaatagcatagaaaatagcaacgcatttcctatactgaaatgtagcaagtggtttttgtgtgtctgaaagattctactaatttcatagcataaacaacaaacctggtgctaacagtagtctgcactgtggactttttaagttgtttacctgaaacactgctggaaatggttgtcagaaaagggacaagaaaaatgctttatgtagtgagaggcactagattacaaatattaaatcagccttttgaacaatatgaataaccatgttaatacttttccttcagcagagaacaagaaaaaaaaggattacatttatgagcaaacagtgcttttctaaagcatatattcttatctattttatttctatgcaaatatttgaacagtttaggttttccttgacctttgtatttatttatagcgttttgcaaaaagtatgggtgcatgcttaggaattaataacttcaggacatgattgttaaggtctggtaaagctgtaaaagccccaagaaccagcattctagcatcattcagtaaaaacatgttttttattctcttatatattagtccatgtttcatcaaggacagctttctcaaatgttatttcagcttaattaaaaatctgcttaaaaggatatacaaaatattttaattatcaagtgtaatgatattttctttgtttcactctataaaatgtaaagctgaatttttgattaacattttatttgtaaaa

SEQ ID NO: 722631 - DNA, 2141 bp, Homo sapiens
taatgctgactttttttatggtcagcatttccatagaatttgtagttgaaaaataagacattgccagttatgagaaataactgtcaattttagtaatacacaggtggatatttagctagtccacttacaccatttattcatagaaagaagtatgatttgtatatgcaacaaatttwaagattttaagtctaattggaaaaatgaaattggattgcttctaaagcactagtgtcaaagttttagcaaattaaaaatcaagtgttcacatatgtagggattactttccccatgttccactaaaaataagtttagttttctgtgctagaaaaaaacatattttgctccagctgttttgaatgtatatcagttaattttccagtatactaattttgtttatagtcttgagaataagttacagttattttaacattagctcaactcaaagtacaggtttttacaagtttcgtatttgttgtgtgatgtttgtacaggtgtggcatgatggaattatttaaatgtgatgattttattattctgatttgaatccttatcatatgcattttagctttattttcagatatccattatacatgacttattaaaacaccatgcactgtaaaaatagttgttacaaagtgaggaaactgctatttcattatgtataactttctcacttacataatgcagtttccattctgaaaaagaattgagtcacaactaaattgaggaaaaagttaaaaaagaaagtgtttttgaatatccaaaacttgctttctagagagaggaagagtaaaagccataatgtctccttcgaggcataaaagcactctttatatatttattctttatccctttctttctccctcagttcccgctttacctcctccctctctccctagcctaagtctctgtctttatcgctacagtacagtatattttcctatggtaatttagactaacattgccattaaaatacaaaattagaagtaaagttggaagcgtttaagaattatttttgagaagtttatgtctgcttgttttagtaacttgaacagagagaagaagggaaggagagaaccagacaggaggaaaatgagagaaatagtaagaaaagggaataagagaggaaaagacagagctgaaggcttgggaagaggaaataaatcagattacattatatgcaaattttgagtaccaaaggaagataaagtgtgaaaactgtctaaacgtgtgaaaagttgacatttgtattctcgaaatcattttaacagtctgcaaaagaaattcataaataaatagtaaataaaatattcctggaaggtttagtgatgtctaaaagataaatagttggaattacaatttagattgcttcactaatataacaatcaaacatcagaccaccaagaaggtgttttaatagcatagaaaatagcaacgcatttcctatactgaaatgtagcaagtggtttttgtgtgtctgaaagattctactaatttcatagcataaacaacaaacctggtgctaacagtagtctgcactgtggactttttaagttgtttacctgaaacactgctggaaatggttgtcagaaaagggacaagaaaaatgctttatgtagtgagaggcactagattacaaatattaaatcagccttttgaacaatatgaataaccatgttaatacttttccttcagcagagaacaagaaaaaaaaggattacatttatgagcaaacagtgcttttctaaagcatatattcttatctattttatttctatgcaaatatttgaacagtttaggttttccttgacctttgtatttatttatagcgttttgcaaaaagtatgggtgcatgcttaggaattaataacttcaggacatgattgttaaggtctggtaaagctgtaaaagccccaagaaccagcattctagcatcattcagtaaaaacatgttttttattctcttatatattagtccatgtttcatcaaggacagctttctcaaatgttatttcagcttaattaaaaatctgcttaaaaggatatacaaaatattttaattatcaagtgtaatgatattttctttgtttcactctataaaatgtaaagctgaatttttgattaacattttatttgtaaaa

SEQ ID NO: 722632 - DNA, 2141 bp, Homo sapiens
taatgctgactttttttatggtcagcatttccatagaatttgtagttgaaaaataagacattgccagttatgagaaataactgtcaattttagtaatacacaggtggatatttagctagtccacttacaccatttattcatagaaagaagtatgatttgtatatgcaacaaattttmagattttaagtctaattggaaaaatgaaattggattgcttctaaagcactagtgtcaaagttttagcaaattaaaaatcaagtgttcacatatgtagggattactttccccatgttccactaaaaataagtttagttttctgtgctagaaaaaaacatattttgctccagctgttttgaatgtatatcagttaattttccagtatactaattttgtttatagtcttgagaataagttacagttattttaacattagctcaactcaaagtacaggtttttacaagtttcgtatttgttgtgtgatgtttgtacaggtgtggcatgatggaattatttaaatgtgatgattttattattctgatttgaatccttatcatatgcattttagctttattttcagatatccattatacatgacttattaaaacaccatgcactgtaaaaatagttgttacaaagtgaggaaactgctatttcattatgtataactttctcacttacataatgcagtttccattctgaaaaagaattgagtcacaactaaattgaggaaaaagttaaaaaagaaagtgtttttgaatatccaaaacttgctttctagagagaggaagagtaaaagccataatgtctccttcgaggcataaaagcactctttatatatttattctttatccctttctttctccctcagttcccgctttacctcctccctctctccctagcctaagtctctgtctttatcgctacagtacagtatattttcctatggtaatttagactaacattgccattaaaatacaaaattagaagtaaagttggaagcgtttaagaattatttttgagaagtttatgtctgcttgttttagtaacttgaacagagagaagaagggaaggagagaaccagacaggaggaaaatgagagaaatagtaagaaaagggaataagagaggaaaagacagagctgaaggcttgggaagaggaaataaatcagattacattatatgcaaattttgagtaccaaaggaagataaagtgtgaaaactgtctaaacgtgtgaaaagttgacatttgtattctcgaaatcattttaacagtctgcaaaagaaattcataaataaatagtaaataaaatattcctggaaggtttagtgatgtctaaaagataaatagttggaattacaatttagattgcttcactaatataacaatcaaacatcagaccaccaagaaggtgttttaatagcatagaaaatagcaacgcatttcctatactgaaatgtagcaagtggtttttgtgtgtctgaaagattctactaatttcatagcataaacaacaaacctggtgctaacagtagtctgcactgtggactttttaagttgtttacctgaaacactgctggaaatggttgtcagaaaagggacaagaaaaatgctttatgtagtgagaggcactagattacaaatattaaatcagccttttgaacaatatgaataaccatgttaatacttttccttcagcagagaacaagaaaaaaaaggattacatttatgagcaaacagtgcttttctaaagcatatattcttatctattttatttctatgcaaatatttgaacagtttaggttttccttgacctttgtatttatttatagcgttttgcaaaaagtatgggtgcatgcttaggaattaataacttcaggacatgattgttaaggtctggtaaagctgtaaaagccccaagaaccagcattctagcatcattcagtaaaaacatgttttttattctcttatatattagtccatgtttcatcaaggacagctttctcaaatgttatttcagcttaattaaaaatctgcttaaaaggatatacaaaatattttaattatcaagtgtaatgatattttctttgtttcactctataaaatgtaaagctgaatttttgattaacattttatttgtaaaa

SEQ ID NO: 722633 - DNA, 2141 bp, Homo sapiens
taatgctgactttttttatggtcagcatttccatagaatttgtagttgaaaaataagacattgccagttatgagaaataactgtcaattttagtaatacacaggtggatatttagctagtccacttacaccatttattcatagaaagaagtatgatttgtatatgcaacaaattttaagattttaagtctaattggaaaaatgaaattggattgcttctaaagcactagtgtcaaagttttagcaaattaaaaatcaagtgttcacatatgtagggattactttccccatgttccactaaaaataagtttagttttctgtgctagaaaaaaacatattttgctccagctgttttgaatgtatatcagttaattttccagtatastaattttgtttatagtcttgagaataagttacagttattttaacattagctcaactcaaagtacaggtttttacaagtttcgtatttgttgtgtgatgtttgtacaggtgtggcatgatggaattatttaaatgtgatgattttattattctgatttgaatccttatcatatgcattttagctttattttcagatatccattatacatgacttattaaaacaccatgcactgtaaaaatagttgttacaaagtgaggaaactgctatttcattatgtataactttctcacttacataatgcagtttccattctgaaaaagaattgagtcacaactaaattgaggaaaaagttaaaaaagaaagtgtttttgaatatccaaaacttgctttctagagagaggaagagtaaaagccataatgtctccttcgaggcataaaagcactctttatatatttattctttatccctttctttctccctcagttcccgctttacctcctccctctctccctagcctaagtctctgtctttatcgctacagtacagtatattttcctatggtaatttagactaacattgccattaaaatacaaaattagaagtaaagttggaagcgtttaagaattatttttgagaagtttatgtctgcttgttttagtaacttgaacagagagaagaagggaaggagagaaccagacaggaggaaaatgagagaaatagtaagaaaagggaataagagaggaaaagacagagctgaaggcttgggaagaggaaataaatcagattacattatatgcaaattttgagtaccaaaggaagataaagtgtgaaaactgtctaaacgtgtgaaaagttgacatttgtattctcgaaatcattttaacagtctgcaaaagaaattcataaataaatagtaaataaaatattcctggaaggtttagtgatgtctaaaagataaatagttggaattacaatttagattgcttcactaatataacaatcaaacatcagaccaccaagaaggtgttttaatagcatagaaaatagcaacgcatttcctatactgaaatgtagcaagtggtttttgtgtgtctgaaagattctactaatttcatagcataaacaacaaacctggtgctaacagtagtctgcactgtggactttttaagttgtttacctgaaacactgctggaaatggttgtcagaaaagggacaagaaaaatgctttatgtagtgagaggcactagattacaaatattaaatcagccttttgaacaatatgaataaccatgttaatacttttccttcagcagagaacaagaaaaaaaaggattacatttatgagcaaacagtgcttttctaaagcatatattcttatctattttatttctatgcaaatatttgaacagtttaggttttccttgacctttgtatttatttatagcgttttgcaaaaagtatgggtgcatgcttaggaattaataacttcaggacatgattgttaaggtctggtaaagctgtaaaagccccaagaaccagcattctagcatcattcagtaaaaacatgttttttattctcttatatattagtccatgtttcatcaaggacagctttctcaaatgttatttcagcttaattaaaaatctgcttaaaaggatatacaaaatattttaattatcaagtgtaatgatattttctttgtttcactctataaaatgtaaagctgaatttttgattaacattttatttgtaaaa

SEQ ID NO: 722634 - DNA, 568 bp, Homo sapiens
tatgaattatctaaatcctcaaaatagttgtctgatattggaaaaaatatggtgatgacagtgtattgttaatactattcctttaatgtatttgagtaactgcactgtttattgtgaatcattgtgtttaaattcatttattagaaatgtacctgaaacagtaatttttaaaaaggattattttaaatatatgtacattagtgtgaggattttgttttgttcactactacgtctgtattctagaataaagaaggtcagataatagaaaatgaatattcttaaataatctgaatttaaaataaaaatcatactctccaaaaaaaaaaaaaaacaaagagagacatcatgctaagtagaaaacatactgtagmgaagaagtacaaagaattcttctgaatatctaaattggaacttgaagaatgggtaggatttaaatgggtctagatccaggagaagcatttccagaggagaaaataaaacaaaaacaaaaccctaactaaagcctctgcatcactccgcaaacagtccacatttcagtgagcaaagaaaattattaaaattagaacag

SEQ ID NO: 722635 - DNA, 547 bp, Homo sapiens
aagtgggtgaggaagacctaactcgtatggtggctttatagtagggacctgaaggagacaaaggagtgagccctgtagatatgagagaagagcattcccaagagaggaaactgcaaatgcaaaagcctaggagagtttcatgtttaaagcgttgctcagagagggctaggattttaggagatgaggtcagaaagttagaaagtattatagagtctttaggacataagcccatgatacccaaaatctcttttataaaaaactttctaattttttttttaaattctttctcctctaaagacatgaattrccttgtgaatgatataaacacgattttgttattaacaagtgattgaggtacttaatccctacttcagggcaacttctgggtccatacaaaaacttacccagaatcacctgctccagtttaagtttcaatattaggacaaggacttgcagtgtctgctgaaactttggtttaacttttcctggggaagtgaaagtaggattttcagctatttgtttctgattacttctaaataaaatttta

SEQ ID NO: 722636 - DNA, 547 bp, Homo sapiens
aagtgggtgaggaagacctaactcgtatggtggctttatagtagggacctgaaggagacaaaggagtgagccctgtagatatgagagaagagcattcccaagagaggaaactgcaaatgcaaaagcctaggagagtttcatgtttaaagcgttgctcagagagggctaggattttaggagatgaggtcagaaagttagaaagtattatagagtctttaggacataagcccatgatacccaaaatctcttttataaaaaactttctaattttttttttaaattctttctcctctaaagacatgaattgccttgtgaatgatataaacacgattttgttattaacaagtgattgaggtacttaatccctacttcagggcaacttctgggtccatacaaaaacttacccagaatcacctgctccagtttaagtttcaatattaggacaaggacttgcagtgtctgctgaaastttggtttaacttttcctggggaagtgaaagtaggattttcagctatttgtttctgattacttctaaataaaatttta

SEQ ID NO: 722637 - DNA, 963 bp, Homo sapiens
atggctctttttcctgccatcattgtcagttcttacagagaagttgggaaaatactgtcatagtcacaaacttacagaaaagttgtaagtatagtacagataatttttttccttaactgttaaagaccaacctaactcccacttgcctcccaatatttcagtgtacatttcttagaaacaagaattttttcctgcatcaccatggtactatcaaaatctggaaactgaaaatgatacattattcacacgatctaatgctcagcctcctttcaagtttagtcacttgtcctaataatgtcctctctagcraagggatccagttcagaatcacacattgtatttagttttcatgtctctttagtcagctccagtctcgaacagttccttcagtctttctttgattttcatgaccttgacacattagaagatcacaggccagttattttgtagatgtcccttaattttggttgtctgtgtttcctcatgattagtttcaggttatgcatctttgccaggcataatacaaaggtgatgctcgtttttctcattatattctatcaagtgggacatgatttcagggtatctcttataatgttcactttgatcacttgattaaagtgatatctgccaggcttctccactgcagttactttttttctcttttgtaattagtaaacattttgttgggagttattttgaaactatataagtatccgattcctcactgaacttttcaatttctatatctgtgtgtaggggtgtttgcttgtgtgtgtgtgtgtgtgtgtgtgtgtatagattcatatttctccctttattcaacggtttataattatttactttataatgaatttaccttgtaattatttgttatttactttcaagctccaaatgtctccaatttaatcagtgggagcctcttcaagttggtttctatgttcttttagcatattcccatcattc

SEQ ID NO: 722638 - DNA, 645 bp, Homo sapiens
tccatctccagatgaaggtggaggttttcaaggcaaagaggaggatggagccacaagattcactcactacatagaaagctacacattgaccaggaacactcatgtattagagttcttcagaaaaaccgagccaatagggcacacktgcacacacacacacacatacacacacacacaatgttagctcacaaggttgtggaggctgagaagtcccatgatctgccttctacaagctggagacccaggaaagtctctcttgtagatagaaatatactgttaaaatgtgcctctagttaatgcatccaaattattactgtaaaagcatggggcctacctctttaagccagtgcaactcagttgttctgagcgctgagattctggatttccatggcatccttgggaagcctacttccttatacagtaaataagggctttgagagtagacaatgagttttgcttcataacaccatgtgcaaatgagggttgcttgtctaaaaaaaaagcaaagtcctgaaatacctgcagcaaaggtatctccataaaagattccaaataacagaggtcttctgggctgcctagagtctaaaaaaaggtgttaagcaccttaggtgtctgtgtgcccatagtatggcaaaatctcctcac

SEQ ID NO: 722639 - DNA, 625 bp, Homo sapiens
  misc_feature 172: n = A,T,C or G
agtgatggagtggttaggaagttggggggcagcgttgactagaattctcataaggaagagagcagtggctacttgatcactgtctgcactgatggtcattccaagcccttctgtgtcttacgtccctaggaacatcccctgatacctcacatcttgtcagcacagtgcatcntaaagaggttaaataatttttatatcgaaaacagtgcttctcagccctcttttcactttaaaatcaccctggcataattttgaaaaaattaagattttagggccacaacctctgaagcaatcagtctagggtaggatccatgccttgatgattttgtaaagggccccaggtggtataaccatacaggctggtttgaacactactgctcctatctgcatgaagattgtggacaaaaacatttaaactaaacaatgtatagaatatgacatttagactgtttgagggggtagctctggcatagggaagtgagacagaaagcaaggaacgcatggaagaaartaaaaggctggtcagtaattggtgagaatgaagatctcgaggatggctgttgaaaaaagcattagaaaggagatgggagacagtgttttatgaaaattactagtgccactgcaa

SEQ ID NO: 722640 - DNA, 678 bp, Homo sapiens
tgctggattacagacattttgaaaagttgtattttcatttttattctagaattatttttaaattaaaatttccatttgtttgctgctataatatagaagcacaatttacttttgcttattgacctcataccctgcaatctagctctatttctgactttgttcgtgtgtgtgtgtgtttattccttagctttctctatgtaaataatcatgttatctccttaycgagacagttttactttctttttgatctttatgcctttatttatatattttttgccttttatttagattggaactccttataagagcttcagtagtggccttttcatatttgatgaggtcgataacaagagctgttgtgtggtgatggattttttgtaagagaaaactcagtgggatccagaaaaaaaagccttgaggaactttaggataggaactgagatttggtttagtctggataaggactctgacaaaagctacctgaaccttgaggagtgtctaaaatttggaaaaggactctactcagatcaatctggtttctgaaaaggaatctatcttggaaaactgccacatttaagcatttttcttaggataatatgaatactgttgctctaattgtggcagattgcttgcaagggattccacctccagcaccccttgcctgagctccttccttaa

SEQ ID NO: 722641 - DNA, 2040 bp, Homo sapiens
tctgctgctctctggtaaaagttattaaataaagcccatggccacttttaaaagaaaaaaatttccaagtcaaaaggagtaaatatgctacttaacaatagaaccaactcagttttttatgaagtaccacatttgcttgtatatgtcatccttatgaacactgcttgcctgccttcttgttttcaagaagaaaatagttctatcctccactctaaattacttcttggccagaatgcttcaaaaactgtgaatggtcctgttagctaattaaaacaagtttaccaccatgaaatatttgctgttctcccaaaagtcaggtattctaccagtgaataaaaaagagaaacattttcaaacccaaagtaacatatcaagtaacagaattctgactagtaaatttataaacagtatcaaaatttaaaattagttccaacaattaaagagcacgtgatttactctgtacaagaatttggaaatggttcttttcccagattggtggaaagggtgggataaagaaaaaaatctaaagctatgctatggggcaataaaagtgttccaacacatctaaaaattacctggccttccagaagtaatatttaaattccaacattttgtcacagagataatagagagtcactggattttagaaattgctgcttagactctacccagtgtaatcattatgactctaattatgattgagtttcttcacctcaataacaggttctccaactactcaagtacttccattttatgaatttcaaatatgcactgaattacatttgttctgcctggcatggaatttagcaaatgtaaatctgcttcagaacacattcactcccagaattttttttttttttttttttttttttgtgatggagtctcactctgtcacccaagctggagtgcagtggtgcaatctcggctcactgcaacctccacctcctgggttcaagcgattctcctacctcagccttcagagtagctgggactacaggtgcctgccaccacacccagctaatttttgtatttttagtagagacggggtttcaccatgttggccaggatgttctcaatttcttgacctcatgatctgcccgcctcggcctcccaaagtgctgggattacgggcgtgagccaacgcgcccagccatataaaaaatattttaagatttcactggacttggtatgttaaaacatacaaacaaacaaaaaaactaccttaatctcaaggcagaggacaaaatctcattctttccttttgacgtgtccagtagctagcacagtgcttgacaccaggtatatactcaataaatggttgaggaattgaatgcataataaaagagtagatgaatgcatgaattaatgaaaacagattcgcattatgtagagcacctttatcaaaccccttttcccctgaagaggtaaggtaggcattctttctgcatctgaggccttggattggcttcaagaaagatgaaagttccttcctgcaagtgctgttcatccacctttctttctcatgggacagaggcaagcactccaagatcagaaagcagtatgactcagagggtagctagcctttaaactgaatctttgttaagccaggagagacagttcctttctcctaggaacagatccatttggccccaggcttctgagaaaagggataattatatgactaacataaggaattgttaagcttaaaagattcctttttgttttaagttcccactttgggaagcacataactacttcagtgcactaactacatgcctcattactacttaagggtatattagattaatttttattttaacttgaaataattttattctcaaagcaggaaatatcttttaactygaaatgtgttgaagtaaatggtgaacgagtatcaaattcatcagaaaatatctacaataatatgaatacgaataacaaaggcagcagctaatattcattgagctcttatcatgtgctgtgtattgtttttatcctcacaaccaccctacaaggtagacagggacccttacatgcatt

SEQ ID NO: 722642 - DNA, 600 bp, Homo sapiens
gagctagaggaaaaagctgttacagttaaaatggacttagaatatggaatcccagccaaagaagttgggactttaacagggaggtcaaagaagtaattttgctatatgtgtttaatgttacatcataagagtaacaaaagtaaggtaatatgtttaaaaaaattcatgtggaggtaacatgatatagagggatactttatgttttatttgtagaccttagacactcttacttttagaggcctgccacacactatatcaaaggtgcaataaagagaatttacattacatgccatataaaatatactgacacatatataatttttgaattgatttgatttacatttgactgcttgccataatttagtatttgtaaacctttgctttttttttwttatttaactgttttctttttctatttgagagcgaatattttataggtcactgaagaccctgaaggcctgaagcactttctccatgaagcgcaatggatgaaataggttggcagaaagagaggcttagaggaccaagcactacacaaatgtaaacactttcataaatttattaataaaagtgatgtgaacaagtaatataccatttaaa

SEQ ID NO: 722643 - DNA, 2856 bp, Homo sapiens
ctcctaagctcaaggtaaattaaaacgtgtattgggtaggcaactaacaaactctgctagggataccacagttctggcagaataaatgaccatgtccttaaacagggcaggaattataaagctagagccctttaaactccattgttttctagtctgagaagaactcagctgttatgaacccactgaatcagctatttaagtccttgcctctgcctaagtcttttcttattatttcacccttggtcgtgttgccaaacttcagccttgtatgtaggtaaccttgaaccctgttcactcttttccagggtgactctgcctcttacttgccttctgaccaatcttgacctccatagacctatgtcatatgaacatgtctgagaccacagcagcacttgagtctgttaaggaaaacatttattagctaatgagatattcctgaagataaacaggcaattcctatctagaaatgcacttttcattcataattctaaccagcaggctgacctattcaaactcacatgccagcattacacatatggtaggtggttactaacttgggctctggagtcagagacctgggaccaaaccctggctctgtggccccaggcaaattatgtagcctttctgagcctgattttctcctctctaaaacgggttgataatgcacatacctggtagttttgagaatttaatgagataaactatatgaagcacaaatataccacagtgtcttacacagttacatgtgtaacctacataaataattattattaattttccaacttctgcaaataacacaaaaaagatatgtttttaaggctggtatctttaatgtgaatgcttaaaaacagccaaggaagtctgggcttccttctgtgttcaccattatagsttgattatttgtttttcaaagcaagttttaaaaactgctggaagccttctatggtagttaatacattatcttaagcaatttaatacaaattaatttttacacaaccttgagtttcaaaagccattgaactggggagggaaggagtgaggtttaggaggagtctgtttgctgcctcccatctggactccacagccagctccatctgctctcacatatagtaactaacattttagctctctcctgccaaacgcaccatgtggagtctagctttttttttttttttgactcagtaaaacgtgaaaatgcatataaagatgtgtacttcaggatttctagaaaacttagtgggattattttggcatttcaaagttctgtttttgtaccataacccaagttttccatcagtctttatggttttgtttctgttttgttttgtttctggatttcattctctcttactaccacaatactcttttctgatagggtcttataggccacattgagggatttggacttgcgatgatgagcatattcatatcaaataggagccactgaaagtctcagagaagtgaatggcaagctcaggtttctgtttctgattgactgctccatggtggcttccatatggagtaccgattggacagtggcagaggaaggctgggagactggttaggaggctgcagcagatttaaaacagtcagggggatgatggtagcctaaaccagggttgtggaaatggcaacagaatcatgttcaaagaaactttggaagtgggattgacaggacttttgtgacagattggatgtaaggggaagaggaagatgtcatggatgacccatggatttctgggtaggacagctagatagatgataatgcccagttccctgacagagtaaacgtaagaggaaggcttgagggaaggtgaggaattcagttgtaaacagtccgtccactgagtttctggcctctacaacccataaaaaagtagaaggctggaaagccaaagtgatttccagccaactgcagcactgaggtgtggcatgtaaaatctgggagtatctcagattaaatcatgaataatcttaacctttggacctaagagggattagcagttcaacaattcactaatttataacttaggtctgctcccacaattggctacctgtctctgaagtcatacaccttgaacaggaagctgtttcttgaagatgctctttgcatctgtaactgctggacaggcacacgaattcatgagaatttcagggcctgccaccatttgcatgttctcttgtccctcctgctgaagaatctgagcagagatgataacagttggtcatatcatcagtggttttccatttcaaaataccaacttccaatgatttttttgatattttcctccagaaagggaataatcatggtagtaaagtgatcatgacctcataacaggaatacgctgcctcaaacagatacgtaagataagttccaagtctaactttatagttttaaaaatcaacattaaaaaatactctaagttctttctcctctatggtatattgtgtcacttagtttctgattctcttgggtaaggtgggggtgagagaaggcaaaaaatactaagtgatgtcactagcaactctggaaatagatttcaacaatagggggccaaaaccatcttctctctttgtccttttttttcttaataaatgtctttttttcttaataaatgaatagtcagacaatttcctcaaagttttaaaaaatatattaatgacaccgttggacattttcaggttcaaacactaatctggttttaatttgatggggttcctctatgcccctttccaacaacagagtataggagtactcacattttctaagagcatgacttctctctgctcctcccttgtcccacatctgccctatctatccagcagctgggttccaagaggtaactgtggtcaact

SEQ ID NO: 722644 - DNA, 682 bp, Homo sapiens
ttcccggggtgctattccagtggccagaggaacctcccatcacttcagacttttgttttatttgttgttgtcgttatttttggtcttctatcattgactcatagctctctcacacattttaatgtattcgctgcatcagacccagaaaaacatttgcctggtgtgtgaaagagcctctgattacagaatgaactttgtctctccataatttgaagaagttaaggaaggtccccacccaaatgttatgtcctattttgatgctcaaaatcttagtaaaatcacagtgcaaaggaaagagcactgactttggcatcacacagatgaaacttggctctgctattctcttgtattattgtgggtatggcatctctgacatgaggataataatcattcttcataaggctgtcttaatgagtaaagataacacatataaagtccttggcacagtgcctgacacaccgtagataacattataataataacaataattattattacctttattgctaagcattgctgtttcccttggttctctcttaaaatgccactgttggccgggtgcggtggctcacacctgtaatcccagcactttgggaggcmgaggctggcggatcacgaggtcaggagatcgagaccatcctggctaacacggtgaaaccccgtctctactaaaattacaaaa

SEQ ID NO: 722645 - DNA, 620 bp, Homo sapiens
gttaggagaaataawtaagaagcataaacaaaggaaagggaataccatgaaatctatgaataaatttgggttacttcttatggtttttgttatttgaaatgaagattttatttatatagttgatcaaaacaaagtagtgtagaagttgtttgccgtactctagtggaaattttctaagaggaatggcatcaactgagaaggaacaaggcagaggaaaacctggggctgaagaaagagactggattgtggggagtggtaggggttcattagccaggatccaagtatgtcaaaaattggtatattaccaaatatccagagagttgcgattttctgggaaaagtagttcatcagaagtagagatggtgagcagtattcataatcaggtgaggcagctacatcaggcttctagttgggtcttaaatggcagagttgcatttatttctaggtagaggaattactggaaagaattagaatagctctgtgtaagggtcttaattttactgatgccataggagacctgcattcttgaatttaattgtgctatgggtgaaaaattcagggcaacggtttaccgtttcagtgtgggacaacacagaagtgttatggaatacttggtgtgt

SEQ ID NO: 722646 - DNA, 630 bp, Homo sapiens
tgtgatttgtttacttaattagtatatgctatggtctgattgtttttgtcctcccaaaattaatatgcttaaattctcacccaggaggtagtggtattaagaaatgggactttggggactttggcagagccctcatgaatagaattgttgttcttataaaagagaccacagatgactagttagccccttccaccacatgaagaaatagtgaggaagtaccatctatgaacaagtaatgaacccttagtggacattggatctgtcagcaccatgatcttagactttccagttttcagaacagtrtgaaataaacttctgttgtttataagccagcctatggtaccttgttatggtagcccaaatggactatgacagtataagacatggaaataataggaattttaagcaattataaatcatgtatttattctttatatattctgaatccattcaatcaatataaaataaatgtggcagctaagtgctatgtaatgcattttgcagaagataaggtgtctaaatttatattttcatgaagagactttgttttctaaactgtctttggtttacaaaaataattgagcagaaagtacaaagttcctatatgccccctcattttatttttttctc

SEQ ID NO: 722647 - DNA, 1333 bp, Homo sapiens
  misc_feature 588, 589, 590, 591, 592, 593, 594, 595, 596, 597, 598, 599,600, 601, 602, 603, 604, 605, 606, 607, 608, 609, 610, 611,612, 613, 614, 615, 616, 617, 618, 619, 620, 621, 622, 623,624, 625, 626, 627, 628, 629, 630, 631, 632, 633, 634: n = A,T,C or G
  misc_feature 635, 636, 637, 638, 639, 640, 641, 642, 643, 644, 645, 646,647, 648, 649, 650, 651, 652, 653, 654, 655, 656, 657, 658,659, 660, 661, 662, 663, 664, 665, 666, 667, 668, 669, 670,671, 672, 673, 674, 675, 676, 677, 678, 679, 680, 681: n = A,T,C or G
  misc_feature 682, 683, 684, 685, 686, 687: n = A,T,C or G
caagcccttcataaattggaaattctggaggtgccaaagctctccagaattcaaggatagttttatctcttttgaataaagtaaaagaaagaaacaagctggtacattgaagcaacagtgggatgccaagaacttgaaaaaaaaaaattaacaaaattactcctatagtttgaatgtgtcccccaaaagcgtgtgttggaaacttaatccccaattcaacagtgctgggagatggggcctaacgggagttggttaggcatgagggcacagtgaatggattaatactgttattgcaggagtgggttcattataaaagggagagtttgagtcctttttgctttctctctctctctctctctttctctctcagcccttctgccttttaccatgggatgataccgcaagaaggtcctcacaagatgctgcgcacttgatcttggactttccagcctccagaattgtcaccaatacaattctgcctattatcaatcccccagtcccacctcttctgttctcaccgccccccgccgctctccccaattccctctccccccctcccttcattccctccgtccgccccatccgctnnnnnnnnnnnnnnnnnnnnnnnnnnnnnnnnnnnnnnnnnnnnnnnnnnnnnnnnnnnnnnnnnnnnnnnnnnnnnnnnnnnnnnnnnnnnnnnnnnnntctagaggatccccctgagacagggtcttactctgtcacccaggctggagtgcagtgggcaatctcgcctcactgcaacctccacctcctggactctagtaattctcgtgcctcagcctcccaagtagctgggattacaggcatgcacaaccaagccctgctagtgatttaagggtttttaagtaaaattttgtctctgcaaaattttcatctagttttgacttttaaacatgcccagctgaaaaaggtcatctctactataatacatttttctggagagaaaattatagcatttgaaatactctctaaggagcctataaccaccaaagataagaacaactcctcttcccataacaaatctcatctgtctcatgtcttactctctcaggaatatcctattcctctgctaaactactgcagctcaaccartgaattaatcggagttaaatttttcatgtttcctatacttaaacagcacctatactttacataagaccttagtgcctaaaccaagggataaggaactgcgggaaattccaagcactttggcagaatccggaagggaaatacttgagttaggaagtcaaacgcgttttttaaaacctctttaaccatgccttgtaggtaagggcctcctcatcctcca

SEQ ID NO: 722648 - DNA, 1288 bp, Homo sapiens
ctatttgaatatgccctactatatactggaaggcaccaggctgcagaagaagggtcccaggagattttgttgcagtatgtaactctcctcatagagggtgtgatttgacagaactaaatggcctccccacccccaaatcacctccttcatcaggctaccatgtgcctgaaattcttcgctcccttttttaaagtgcaattagagggaaaggggtgattacraatttagtcattagcttctactcaaacactgatcaggacatttcttcagattaactaccaggggatcttgaatatagtgaacatattttacaaatctaaaactgggtcaagtggttggacaagtaaaaatgtaactatgaacttttaaaatttttgaatttataacagtaccagaagaactgacatattaatttctcataggcatggaaaagtgttattctaatggagaggagagggaggaaaggcaatggatccaggtggaatggaatagttcagggccattattgcaagagaacatcatggaattcacagaggaatgggaagataggaaaggacagggaaacagctgcttctgaaaaacaaaatgtcacagggctgccctaggtgaccctaatgtttccatttagccctgaatatttttactgcattcttcacgggggaaaaaaaaaagtaaaggaaaagtaaacaaagataaaatatcctacgcccttgaacataaaataaggagaaagtggatgttcaatccaacacttcctgagtttatactctgtgtcaacccctaagccaggtgctatcccttcactgggccaaggaccaggctattgggcatgtgttaccatagtgacacgctactgagaacaacctcatgccccacttatactgagtcttctaaatattcccaaggttcctctcaagcagaaatagatttttcttcacacttctaagaaaggactgtatttatttgtttatgtattaccataaagtttagcaatatgatgcaaaaactaagtgctaggaaagaaaatatactttcatcgggcatgccaggtgtttttgtctgaaagactagcatcttacctgacatctgagcagaatatgaagagctcttaatcaagttttcaatttcatttgccaagataagcttgcataatgtctttaggacacaaatttcccagccttcactcctcaaaacatcatgaaagagctaaataaagtgaaagtggcaagtgatacaggaactgaggtatgtcaattcctttaatgggctgggaagctcctgatttcga

SEQ ID NO: 722649 - DNA, 981 bp, Homo sapiens
tggtccatttttttttctttttgtaatttaatttttaaaaattgcaggttccaaaaaaaagaaagaaaaaaaaattacagggtcttgctatgttgcccaggcttgtgttgaactcctgggctcaagccatcctcctgcctcagcctcccaaagggctgggattactgtgtttggtgccctggcctgtgctttatacaaagcactggccaccgagtgagttgcctgcctcctttaacccttactgtgactctgtcagggaggccctctactagctgcatttcacagatgaggacattgagsctcccagaggtgcatacaaagtcataagccttgggtggcagtgcttaaattgccagccctgccaatccctggtgttgtgatcaccatgcccagccccgcagcccacctggtagctctctctccccatcccagttcaccattagctgggaaccgtctcctggctcaaccccaggcctgggctcagccatcctcggggagcaggagaggaggaggatgtgggcggccaggcaaggagtcctggtacttagtgtgtgacatttgcatagtgctttgggatgaaattcactatatgcctgaatgtaaatttctttcctctttttctgaatgagatttaaaaaaaatttgtcccaaattctaatttaaacttttagagatacagatgaataatcaactccctacttataatatttagttaaatatttaaaatttagactttaaaaatcccatattttatttaatttttatttatttatttttttgagatggagtcttgctcttgtcacccaggctggagtccaatggcacaatctcggctcactgcaacctctgcctcccggattcaagcgattctcctgcctcagcctcctgagtagttgggattacaggcatgcgccaccacgccaggctaattttgtattttttttagtagagacagggtttctccatgttggtcaggctggt

SEQ ID NO: 722650 - DNA, 981 bp, Homo sapiens
tggtccatttttttttctttttgtaatttaatttttaaaaattgcaggttccaaaaaaaagaaagaaaaaaaaattacagggtcttgctatgttgcccaggcttgtgttgaactcctgggctcaagccatcctcctgcctcagcctcccaaagggctgggattactgtgtttggtgccctggcctgtgctttatacaaagcactggccaccgagtgagttgcctgcctcctttaacccttactgtgactctgtcagggaggccctctactagctgcatttcacagatgaggacattgaggctcccagaggtgcatacaaagtcataagccttgggtggcagtgcttaaattgccagccctgccaatccctggtgttgtgatcaccatgcccagccccgcagcccacctggtagctctctctccccatcccagttcaccattagctgggaaccgtctcctggctcaaccccaggcctgggctcagccatcctcggggagcaggagaggaggaggatgtgggcggccaggcaaggagtcctggtacttagtgtgtgacatttgcatagtgctttgggatgaaattcactatatgyctgaatgtaaatttctttcctctttttctgaatgagatttaaaaaaaatttgtcccaaattctaatttaaacttttagagatacagatgaataatcaactccctacttataatatttagttaaatatttaaaatttagactttaaaaatcccatattttatttaatttttatttatttatttttttgagatggagtcttgctcttgtcacccaggctggagtccaatggcacaatctcggctcactgcaacctctgcctcccggattcaagcgattctcctgcctcagcctcctgagtagttgggattacaggcatgcgccaccacgccaggctaattttgtattttttttagtagagacagggtttctccatgttggtcaggctggt

SEQ ID NO: 722651 - DNA, 1312 bp, Homo sapiens
gccatctgggggtagagggcctgaaggattttaagtaggggaatgacatggtcagactcaggattgcactgcgactaatggcttggaaaggggcatagctaggttgggagtgtagggagggagcctggggaccagaaaccctctccaggctgttacagaaagagggtggtgtcctggctgaagttgcggcggtgcgagtggagaatagaggtcgatgcatccagacataaagagaaggttgacagtttagggactggttattttattttatttttttttgagactgagtcttgctccgtcgcccaggctggagtgcagtggcgttatcttggctcactgcaatctctgcctcctggtttcaagcgattctcctgcctcagcctcccaagtagctggaattataggcatgtgtcaccacgcccagctaatttttgtatttttagtagagacagggtttcactatgttggtcaggctggtctcgaactcccgacctcaggtgatccacccgcgtcggcctcccaaagtgctgggattacagggtgagccaccgcgcctggcaccacctttttttttttttttttaaattttggagacagagtctcgctctgtcgcccaagctggagttcaatggcgtgatcacggcttactgcagcctcgacctcctgggctcaaacaatcctcccacctcagcctcctgagtagctgggactacaggcatgcaccaacacatctggctaatttttgcattttttatagagacagggtgttgctttgttgcccgggctggtcttgaactcctggcctcaagtgatcctcccatctctgcttcccaaagtgccaggattgcaagcgtgagccactgcacctggccaataccccttcttttatagttatgagctagaggcagcaagtgacttggtcaaggtcccacagtgggcacctgacacccatgctcttgctctctcctggctctgcrgagcattcttgtctcagcatgggtgacctttcgggcaatcctggtatgggagggggaaggaaggtactatctgttcttccaggccagccacagaccttgagggagccacaataaacgctgtgtttgtttgataaagcagttggcttttggtctggcaggaggaagagctggaacaggtgtggcaagagcgggcagcctgcagcacctctgtgggagatgggtgagacagccccagggcctggcagggggctccagggctgtgagttttgaagaaacctagggactttctcagccatctctctcatgtggcaccaccccagggcctggcagggggc

SEQ ID NO: 722652 - DNA, 683 bp, Homo sapiens
ttatagactcactagatggagttatagaaaatgcaatttcttgggaaacattccgagatattctacagtcagggtagtacctaagaatcagcatttttcatgcacatgggcaaaggccacagtttgagaagcattacaatcctggctgtgaggccttagctctgtacccataccacctaacccaaggcctggcacatatgaacttaccaatccacaaccagtctttagtattaatttttcagacatrcctggagcatgaagtatgtgttcatttggattccgtacccatgtgttggcaaaccacccaaaccctcacacagaggcaaaccttgctgctaccttcctctaccagtggacagggaggcagcctgaaaatgaaatacaattcttccaagactcttttgttcaatggaacttcctcttcttggatcccttacaatccactctttcaactgtattaagatcttggagtttgaacttagatccgtgtgattttgatcaaattgctcaatctcccaaaggctttatttttctacaagagtgactgatgagtctagaccttcctctcttcttctcaagattgtcacaaagatcaaaatatttaaaataatgtgatctatacgatagcagtatgaattgtaaaatgcaaaacaataatatgaatagcggggctcctacatgga

SEQ ID NO: 722653 - DNA, 1428 bp, Homo sapiens
atgtatatatagattaatacatctgattctgttaatagtgaaaatttatttaattttaagtatcttttctttcttatcgtattctatttttatggctgagttgcagttgaaaaagtagcactttgtttaccttaccaggaaacttctagcactaaagatcaaaatatgtacttttagtgattacattttttagtcactgataatgttttgacagttataatgtggcctccttgtcatgtcataataataattcttaaaactattatattcaatccatttaggatgatcttagaaattttaatatgtgttaagaacttttaagatcataatctaattcccatacattgtagattagaaggttgagactctagatgttcaatagcttagcactagttcccagcttgttagggattaccaaagttagaaaccatgttttctgactcttacagtgtttttcttttaaatgtattataggtaaacagttaagctattttgttatctattatacgtctgccatttctgatagactctatataaaaattaatatatagtataattaagtacaggtagaggaactctcacttttacatagaataaagttgttttgaggtttgattttttaaaaaacatagtaattatcattcaggcaataatgagaaaagattaaaatttataaaatttattgatttgctggacaatgcaaaccaattaatatttgttataaccaattatcataacactgtaatacctgtggtgatctcctaataaataaactcacctagaatttcaaaatagctttaaaaatttacatttcattgatattttctttttcatagatgaggagcttttctctggaatgtatatagatttcatggggacagatgctgctatttttcgaagtttaaccaagaggaatgcggtcagaactgatcaacataattccaaatggctaagtggtaagaaagcatttgatgcatttattttttagtatcrtgttaaactaacttatttaattctatcctaacaactagggaaaatggttaaaaactaaaatagcaggctattacatgaataatggtaattctgtaccctatgatttaaaatattcggggaaaataaacaattgaatagctcatagtccatatttcgattctttatttctattaatcatcctacagttatcatatgaatatgaataaataaaagtgacagtgataatttatatttcagtacccaagcatcttctccagttgtttaattgtaacatattgcaattaaatatgctttttacttcatttaatctgcttgtatgttttaacaataccaaatctaaaaattatcccaaatgtatgacattgagatgcaatgaacagagtatagccggggcctcctctctttttgttttatacttagattctaaaattacaa

SEQ ID NO: 722654 - DNA, 1244 bp, Homo sapiens
aaatcttaaatgataggaaatgtttttgttcaattggatcatctcaaataggttaaataaatgtatactcatccatatgggtaatggaaatacatatagctttaaatactatacattcttttgaaacatcaagagcttgtttatatacaaagaaggttgtttttaatgactaacagctgcaaatacaaacctcattaagccaaagaataggcacaatatagttcctcttcagattctttaatactctgtaatatacgttgaaaataattatgaacatataaactaatatttatatataacaaactttaaaataaatgttcataaattagttgctgttgctaatttgattttgttcctgtaatgactcatttaaattttaatatagttgtttttgacttcctttgctcttatatgtcttctaatcacattgattttttttcacaagtgtggatttttcctttcaataaattctcggggaactgaaatatgaattccaaaaattaattattgtcatagaaatatttgggcagctaacaaaataagagatgctatcaaatgctcaaataaaaccataaaaccattccaaaatctgtgaaattagtcataagcatttaataatgattggtgacattaagctaaagataagttgatatcagatgttatttccacttacttacatagatttactcatgttcttacaagaagatactacgatactacagatcatatcaaaataaccattttcaagagactcactgaattttttctgatggcttgaccaataggttgacctgcagccgttttgcaaattgtaaagtgaatccagttatctaaaaagagaacaactaaataattaccaacttttaaaaacattattttatactattcaaaacttatttttcttacagcagaagagaaggtagtaacttaaggttaaacaggactaattgaaacttttaaaactgcatatatagttatakttatatacacatgcatccatatagatacacacaatttatttgcccaatcgaatgtcaaggttttagttagttagatttgtgagttacttgaaatggtttttaaaaaatcaaaaatcagcaacaaaatataagatctcagataattcctggtcaaatatatattcagttagaatccatgtgtcattgtttaaactaaaacataactactaaaatcctagaatttcatttactttttgaaaaggaaaatacaaaaataaagatgat

SEQ ID NO: 722655 - DNA, 1425 bp, Homo sapiens
tttcattaagctaaaactttctgcttttagctctgttaatcatctaagcaaaacataaagtgttagcaattaaaatccatactgctataacaactgaaagcaaaaataaaacagagttaagcatcccttaatccttcagattttttggttgtatcaaattttaattgacgttataacaagataacaattataagaagaaaatttaatgtgatttaaaatttggtcttaggtagtaatacagcataattmtgtaataaactaacgtttttaaagaaaataaattttcatggtcggattttctgccttggctaaaaagaatataacctactccccatttctctctctgcccctatgtactcacattcctacatgctccatttatttctaaatgttaatattttattcatactctaaataaattgagcttaaacaatagcacatgctgtcaaacatatccatgaaatagggcttaatggatgtactatgtaaatactataggagacggttgaaaaattaagtaggattatatatatttagatatatatacattacatgcacatggtgtcaaacttgatttattaattgtagaatatcagtttccctatttctgtgaccatacaaccctaagctcctaaaaaatatattttctttttcaaaataccttgattcatttccctagatcaaggaggtatagaccaagaagaagaaagtatgaagtatttttgtgtcattgcagattatggaccataatgagtcaatatttttaaaggcctattcacctgtgctccaggatatattttttaaacatctatttttatattataaaagtaatatattttcaatacaacaatctttgaagacttagaaaagtacatagaaagcaacagaaaataaaccatctcttattagctcttcgaccttggagacttaaactttctgtacatcttggttttcttatctgtgaaatgtgctaatccgtagcacttaaccttattgggttgttaagaggattgatgagttaatatttgcagagagcttagagcagtgcatagtacacagttaatgctatatcgctgttaaagaaagtaaattgcactactgaaacataatcactcttaacaatttagggtatattcttccagggttttgttatatagacataaatgtgtataaaaatagaattttattatatgctgtataatgttagcagctttatatttcactaacattgtgccaggaaatcattttgaaagagaattaaacaatgaaaagaaagcatgcatcatatttatttccgctgaagtctctaaggcttcattcatactccaaactttttgtggatttttactgtggtcaggacctgcactaagctctatgcaggacagatgccctgaccatttcaccgggtttagagacaatgtcaat

SEQ ID NO: 722656 - DNA, 636 bp, Homo sapiens
tcttacttgtgactttatagctttctccacttctctagccagcaaactcctatgtctttgtcaatgcccacatcagatacagtgttttctgtaaaatcttcccaagctcttccagatgaagtctgttgctttctctttcatgcctgcaaaatcctttatgtgcactgatttaagggttcctatcacactgggctgcagttatgagattacaagtttgtctcttccactagactctgaggccctgaaggtcagggctgaagtkctatgcaggtttgtctctgcagagcctggtgtacagcagtatacaacagtttcttaaatgaatgaatgagtcagtgacagagccacttatttttgagtcccaagcctatccctccagctcccagaatgactcaactactaaaaacaaagagaagatgtgactatcaagaaagagagcgggaggaataaataggcttctttgtgtgagagagaaccacggacatgaagcaggcctctcaggtatggcaggatgcctgctttatgtccaggttgactttgtgcctgtaggaactgggctggtggttatagaccaggtctggtcggccttacctatgcagatggtaaccaggccacctatgagtgagtgcagccgac

SEQ ID NO: 722657 - DNA, 1025 bp, Homo sapiens
attaatttcctttagccaaaggaagatagatcctttagccaggggaagacttaaatcactaaatcacataaaatccctctctctccttctctctctctccccttctctctctccctgttttaatagtacttagctatctcaaagtgttgctggaaggattcataagcatgttaagtgcttcgaagatgagaagcaatatataaatgcttaagtattattattaaacttcaagtaaatgagcacatagcatgtgatttaaatggaatgcatgtgaatacacaatccacaaatagccaaacaactaaagaagcttcagctaagactcacaacccacatgacgctaagcctttaatatcatagaatgtttttagagctgaaaaactatcagagatcattcaatgaaagttcttcattttacgggctgtgaaaagggggcatcacaagtgaccagtccaagggcacacaaatggatagggatagacacaggacaagaaaccaaayttcctcaatgccaaccagtgcttctcataccctgctcacctttaactacaagatgtcaaacatcaagataaaaatagcatgcttggccgggtgcggtggctcatgcctgtaatcccagcactttgggaggccaagacgggtggatcatgaggtcaggagatcgagactatcctggctcacatagtgaaaccctgtctctactaaaaacacaaaaaacttagctgggcgtggtggtgggcgcctgtagtcccagctactcaagaggctgaggcaggagaatggcatgaacccgggagttggagcttgcagtgtgagcggagatttgtgcactgcctcccagcctgggcacagagtgagactccgtctcaaaaaaaaaaaaaaaaaaaaaggccggtcgcagtggctcacgcctgtaatcccagcactttgggaggccgaggtgggcggatcacgaggtcaggaaatcgagaccatctgggctaacacggtgaaaccccgtctctactaaaaatacaaaaaaatta

SEQ ID NO: 722658 - DNA, 1453 bp, Homo sapiens
cctgcacatacatgcacatatatatgtatacacacatacataattgtactgttacagttatatggtaaatatctgtgggttagttggaaaaaataacacaacttgaactttgcagccttaactcatcctgttaactagacctggaatactccttcttatgggttggaattcaaccaggagttagggaccagcctgggcaacacagaaaagccccatctctaaaaaaaattaatgataggccaagcctggtggctcatgcctgtaatcccaggactttgagaggctgaagcgggtgaatcacctgaggtcaggagttcaagaccaacctggccaacatggtgaaactccatctctactaaaaatacaaaaaaaattagccgggtgtggtggcacatgcctgtaatctcagctacttgggaggctgaggcaggagaatcgcttgaaccagggaggtggaggttgcagtgagccgagatcgcaccaytgcactccagcgtgggtaacagagtgagactctgtctcaaaaataataataataaataaataaattaaatacatttttaaagtaaaataaaaaatagaaaaagaaattatacctaacccttaatcaaacagtaactttactgtatgctgaagctccacatcttttttattttctctatttttattttattttttattttagttttttttagaggtggggttttgccatgttgtccaggctggtcttgaacttctgggctcaagtgatccaaccacctcagcctcccaaagtgctgggattataggtgtgagccactgtgcccagccctcaaatcttttttaaaaatacatagtaactatgtgacttattttatttttcctagtcctagacgtttaagaaatgttcctattctttcctacctccattttttgcaattagcctgtaacacctcaggagggttacgttttattcagcttttattccctgcagcctgtagcacaactctttatgtaacaggcactcaattatgtttgctggatggaatttaagattaacaataacagacatagttgtctgtgcctgtagtcccagctactcatgaggctgaggtgggaggattgcttgagcctggaaaattgaggctgcagtgagccgtgatcatgccactgagtatagtcacactctagtctgaggaaaagaaagagaccctatctcaaaaaaaaaaaaaaaaaaaaaaaaagaggccagctgggactacaggcgcccgccaccacgtccggctaattttttgtatttttagtagagacggggtttcaccatgttagccaggatggtctcaatctcctgacctcgtgatctgcccgcctcggcctcccaaagtgctgggattacaggtgtgagccacctcgcccagcagcagaattcatttctaatttagataaagtccacattatataaactggctgtatg

SEQ ID NO: 722659 - DNA, 660 bp, Homo sapiens
ttaacttttggggctggtagaactcctggaagttctttggcttgcagctacatgaatctcatctttgcctggatcttcacatggtggttttccctctgtgcccgtgtctctgtgttttcacattgccgtctcctctttacaaagggcaccagttatattggagtagggcccacacaaatgatgtaatcttaactcgattatgtctgcataactcgattacatcagataaagtcacatccacggataataaggattaggatttcaacctattttattttcagggatggtggggacacaattcaacccacagcactttttattttaaggcgcatattccaatttcagccaacactgcaatatttctctcctcaactcatacactctctgcccttggacataaaaatcagataagcctccagacaattatagaaatactacatttaccattgtattatcatgtagaatgtttttctgctttattcatttttatagcacacaatgtaatttttacaggtaacaagttattaaaaacatgattctaacatgtcatttattaaacaaaatatacaaaacacattatattaaatattataaaaactaaaactctggcccttttcctcaatttttgttggaaaaaatragacatcctccctgctttga

SEQ ID NO: 722660 - DNA, 658 bp, Homo sapiens
aaatagatattaaatttttaggtattagaatctgtacattatcaaattatactaaatatgctttatgcccttgcttaaaaaaattatagaaagattctgtgacacacatatgcattccccattaaatttatatgacaaataagcctaaaatcagtctgccttgatgatttaaatatatattacacagaattatttttcattcacagcagtctagtagtttagattcattttagtacataataattcaatgcattaacctttgaattattttgaaataggcataataaaagtgaaaacataaatacaagtagcaaataacattatttgctgttggcatagcagaataaaaattgagtgaaacacagaaaaagtaatataaatacgtgttgtcctgaggttaaaaaaatttgtctaatatatcatgtagaatcattaagaataggtttatatctttgataaaattattctatgaatctgccataatatgataaactttacattcakcaatttattatataatggtaacaatatttaggtaattataaaaggttatggcagtatttattcataggtgatgcttaaaatctttttatgatattagtattcccccaattcatactgacatgaataaccatttacttttaaagcatgtgtttta

SEQ ID NO: 722661 - DNA, 2860 bp, Homo sapiens
  misc_feature 2726: n = A,T,C or G
aattataaggcaaacttcaaggaaacaagcagtggagtgattgaaactcgaactgcaattgtgccatttttttctcctacaacatgtaaagtatttgtttyaagaaaaagtagcattctgtgtcatttacatatggaaagattcagaaaatctgcatttctgacatccctcattctatatctaaaatctggtaatgacgaagacggattaagaatataagattatgagataattgttatttactgtttcctttttcttcttccttttccttttttttttttttttttttttttttgctgaggtagggactccacttaactcctccttgttagggctataaggaaggaaggaaggaaggaagaaaggaatctgttttcaaatattgcaatcaataattatgatcatgaaaaattattgtcatttcttttaccaagatgtaacttttaggatagacaatatatgttaaaaaaaaaaaaaagaaaaaaaaacaaacaagaatatgtgctttttccggttcaaggtccttaaaatttatatgaatttttgccaaggtatctacctcgcaaatttttttctgaatgaatttatttagagaaataaaagattgtgggccgggctcagtggctcacgtctataatcccagcactttgggagggtgaggtgggagcatcacatggtcaagagattaagaccatcctggccaacatggtgaaatcccgtatctactaaaaatacaaaaattagctgggcgtggtagtgcgcacctgcagtctcagctacttgggagactgaggcaggagaatcgctttaacccaggaggcagtggttgcagtgagccgagatcactccactgcactccagtctggcaacagagtgagactcagtctcaaaaaaaaaataatttattttatagagtaaggaatcgaataaaaaaaaaaagatttttggggggaataatattaggttctctagaaagaatgtcccctgagcttctgcctcatttttcagcatttcaagtaccaatcctcagcagaagcactaagttgaaattataatcctataaattttgtcaaataacaacaaagggatatatgatcaccctgttaatgataatatgctccactgagttatcatctgaattgaagtgagtcaggtgggatgtgtttcactgaatcataatggtgtttctaaaaaataacttttccgaagttataatacacaagaacatgaaagtaaacttcctgagctacaattcaggaattaaatcacatagttacagaatatcattagaaatcttacagcaaaaataggttttattaatatccttgaattcactgattaaacctatttctttttttctgcaatttatgtaaattttgtaggtttgttcattttaagatgaactgtatcaagctgggattttcaaacttctttcagtttcatatttctgcccaattgttgtttttaatgtgcttatatttttccaaccactcaaacttatttataatgccattcgttatgtgttagaagctatctaaatcatgcttaggatttttgtatgcctgtctaaaatggaaaatgcattcagagacacaggagagatttatttatttatttatcttaccaagctaagaaaacccaacaaccaatactttctgattcatcctggaaactcaatttgtcagatatcagggtagttttctatttccatctgcaaataaataataggaatcgcagtcactccttgctgtaatgactgcatcatcgacttcatcagttatttaaaaagctagggagaaaaccagcgacagctgtaaaagggcctggaattgtttggaggagaccttacatgctatagtttcaggataaaagtggaattataaatgaacttgggaaactttgcaaggtactaactgtaagtcccatgctgtgcagtctgcctgtgcaaaggaaaatcccctttgaagagattagcggaggtggtttgtatgtgatcacagcagctgagatgatgtgtgacttttgcctagcttaaagtggattagcaagacttaaaagatggaaattgttttgtgtgaagctcaccatgctttttggaacataaatgaaatcacagtcctataaacttaaatatgatttctattagttcaatatgcaaaaatccccttctaaaagattaaacagaaaaggattgtggcttgccaatattcacatcgggtaatgactgttacacatttgaaaataatttcttagaatttatttttaattcatccacaaagatgtcactttaagtgtctgagcaacaatgtggtaaaatagacagaacactgggtaagaaatagaaacaatgaaatttggttcccaagtcagccactgactatctgggtcactttagataaaacacttaacctttcttagagtttgtattctcatctataaaatgaaagaatatacaccacacagcccttataattttgcagagtatatccaattacagtgtgtatttaagggagctttaaaagcaatgaaatactaagttttagttattatttataaacatctttggtttgtactattgatccttttttactatatcacataataaacaaatcaatgtctgatttctctgaaaaccctctttttccataataaaaagagagggaataaagatgagtacataagacagatcattggggtgattgaatgtcgttttattccctctctcncgccagcaaaatatatcataccatctcaccaaataatttaggttgcttttgtaagccaccagacctcacttcatttttcacaaatatgtgaaagtaaaagctataccacatgtttaatagtgacccatggagta

SEQ ID NO: 722662 - DNA, 1098 bp, Homo sapiens
  misc_feature 396, 409, 410, 411, 412, 413, 414, 415, 416, 417, 418, 419,420, 421, 422, 423, 424, 425, 426, 427, 428, 429, 430, 431,432, 433, 434, 435, 436, 437, 438, 439, 440, 441, 442, 443,444, 445, 446, 447, 448, 449, 450, 451, 452, 453, 454: n = A,T,C or G
  misc_feature 455, 456, 457, 458, 459, 460, 461, 462, 463, 464, 465, 466,467, 468, 469, 470, 471, 472, 473, 474, 475, 476, 477, 478,479, 480, 481, 482, 483, 484, 485, 486, 487, 488, 489, 490,491, 492, 493, 494, 495, 496, 497, 498, 499, 500, 501: n = A,T,C or G
  misc_feature 502, 503, 504, 505, 506, 507, 508: n = A,T,C or G
ttgtatgtgccatactttcatatcattggcaatgcagtaggtttgcatatgtctgtgtcactaaaaacacatgagtaatgtgctgcactatgatgttaggatggctaagatgtcaccaggggataggaattgttcagctccattttttttttatgggactatcattgtatattcagtctgctcttgaatgaaatgttgttatgggatacatgactataatgtaaattatatagatgataaatagatagacatagatcaatagatattatggtaggattaactaggagaattatggtcagctcaaacatcatagggctttataatgcataaccatcatattcaatctactttgaaatatgactcttttggagaatgtatctttttatttcaacagantaaatgattgcannnnnnnnnnnnnnnnnnnnnnnnnnnnnnnnnnnnnnnnnnnnnnnnnnnnnnnnnnnnnnnnnnnnnnnnnnnnnnnnnnnnnnnnnnnnnnnnnnnnatgaattagttcatcattgctttttcttgtccatgttagtcagtctcacttaactaatcacatataaagttcctcgattcattctagaatgaatatatctgcttagcgtttgtgttccccagcagtcaacccagagacaaaatgtcctgtgtaagtagtttcttcaggaggtgatccctagagataccagtaggaagtagggaagagggttagagagcaaaaaggaagccaagcaatggcgcagcattgttcagatactttatcactttgggcaacttgagctaaatcctgctggagaacctgggtattagggtggagttgtgaccaaagctatcccaactgaaggccaaggaagctggggtatttatccgtcacctcactttcaccattggctgaatgctgctctcagagatttaactctcaactacttctggcttgccttccacactggccaagtatagtccacaggcagacaaaggtcaaagagagtcacatatgtttaygttaagcagcctttggtgtgacaagtgccaagatgacatggcaggcgtcaacaactactccagcataacgtggcaggtttacagcca

SEQ ID NO: 722663 - DNA, 1089 bp, Homo sapiens
aaggagatttgagtaactcacttttttttcttcccaggaaatccttcggttggagagactgggttgcagcttgctgctaatcctttccttatcagtttccaaagaacaagagtgggaggcagggtgccttctgtgtttgtgtatggctgtccagattgtggaagctctggggcactggggaaatgagggttttagagttgggcatacagacagatgacttaaccaactgaagctcaaatctcagctgtcccctttttgtgttactttagggagttagtacagctgtcacctcatctgaagaatgagaatactatctacctcattggtttatttttataagcatagaagtctttttcgcatgaaaatactttttaagctttaacaagctatacccatgtactgtattactgttgttatcagtggatgtctgtagccctttctatttggatgtccatttgtggcctgttccaaggttggtggctctgactcttggctgcaaagccttttagtggctgaagctctgtattagcagcaagacatcctggatgacagaaatcctttgttttggaaacaaaaagtagacccgggtctacttttagagcaccacatttttcattatatttattttcacagtctacaattttatatatttatataaaaataataacagctggcccggcatggtagctcatgcctgtaattccagcatattgggaggccaaggcgggaggatcacttgagcccaggagtttgagactagcctgggcaacatggtgaaaccccgtttctataaaaaatacaaaaattagccaggtgtagtggcacgtgcctgtagccccagctgcttgggaagctgaggtgggaggattgcttgagcccaggaggtggaggttgcrgtgagctgagatcacaccactgcactccagcctgggtaatagagagagaccctgtctcaaaaacaacaaaacaaaacaaaaacagctaacaatattgagcacttattacatgctaagtacttttccatgcccttttagtatccaatttaatcctcccaacaacctaatgaggtcattatttttctttttaatg

SEQ ID NO: 722664 - DNA, 805 bp, Homo sapiens
taaaaaattccctttcacatctcaatgaattatttgatccactctacctcactagaataagccagtaaacttttttttttttttcaaaaaaagaaaatactgcagttgattactcaggagaatcataagccaagtatcaactatctcctgccccaagaagaactgtagactaacttaaaataatttatgtaataatttttatcattcagggyccaatcaggaaaacagaaatagtatactttaatatggggaattgcttacacaggtcatgtaaaagattagcaaccgctggagagaccaaggaagaaggagatgttatcagagcccaggagcctgacatgcctgaagaaagctgcagctgggatgggctttcccaggggtagttggagctaaggaggaggagatgtagctgttgtcagagaagctccccaaagtagagagggagaattctgtcctctctcgtccttttgtgtcttccatcaacacttctcattggctaaacccaccagaatagcagctgacatgggagtttgggtcagtccctcaggcgtacagaacaaaacagacaataaaaaggggaggaatgaatggatccgagggcaaatatgccaaggaccaatacattgttcttatttctgggacaattcagtctcttactgacaaaactgagagaatgaacatctgcggatgtcacttcactcttaagaacacttagactgtttagctacttcactggaattttaatttaacttaaaaatgtgtgtttatgtatgggatatatgagtttgctatatatatgtgtagc

SEQ ID NO: 722665 - DNA, 655 bp, Homo sapiens
aacatcattcatttggatattcaagtaatgttatattttttaaagaaacaattacactatgctatcatcatgccatattttgtgggtgttcatgcgtgtgagcttgatttcatttgtgctcatcttttcgactattttccatgtgccagtgattttttcaaatgtgtcttctacttcaaatttctgactgatctcttattatttatatctctgaatttccccaagccctgaaattctgtttattctatctaggcttagctaattttctcctcttcccaaacatttacttctcytttaatttctactgaatgaatggtatggtaaccagcttggttgcctaaggtaaaaatgtggatgtcatcttggataccttctgctttctcaacactcacaatgaatttctcatcaaatctggttgattctactttaaaaatatatcttgaatttccaacaaccctccccaattacaattgccttgattcatgattttatgtctcttgctagactactgtcccttctgcctggaatgctgttactcactttgactccatggtgaacatgtttttcaagactcggtttaagctcatcccttccgtattccgtagcatcatgttcatgcctctgaagcagccttaagcacattgtagtattattc

SEQ ID NO: 722666 - DNA, 1147 bp, Homo sapiens
  misc_feature 49: n = A,T,C or G
gagcaagactctgtctcaaaaaaaagagggtccaggcatggtggctcancgcctgtaatcccagcacttagggaggccgaggcgggtggatcaygaggtcaggagatcgagaccatctttactaacatggtgaaaccccgtctctactaaaaatacaaaaaattagccaggcgtggtggcaggtgcctgtcgtcccagctgctcaggaggctgaggcaggagaatggcgtgaacccgggaggcagagcttgcagtgagccgagattgtgccactgcactccagcctgggcgacagagcgagactccgtctcaaaaaaaaaaaaagaggaaccgcaaaagcccagctcctgagcatgccccgcacccaccccgaccgctgttctgcactcacacccactggtctgggggccgggctctctgctgaaggggaagtcagggcagggcctggctggaggctctgtggagcttgggcctctctggcgttgcattttggagctctggttgtctctattccacttctctgcctccagtagcatctgcccacctggcccttctttgtgtgtaaactccagtgtgtgtgtgtgtgtgtgtgtgtgtgtgtgtgtgtgtgtgtgtgagacactagctgcctgtctggattctgcccctgacagctggaaatacatccagctgcctcacccccgccaagcctggcccaggcacatgggtaagagggttcagtggtgctgagagagaacacgtgcccagaactggtccaaagaggcccatgatgggacggtgggtgcaggggagaggcagaaggatatttgccctgggctttatttctataaatggtgccaaatttagactttagaccttaccttcacatgaggttatggacacagtcttagagagtcactgaattcaaagaagacatttgtcattcgtgtataaggcagtgtctcattgcccaccatgctttctgtgatgccttatgaattaacatatctgttagaagtccttcaaatgtcttgtgacaatatatcaagacaactatacctttgtgagttcaaagccctcgcaggattcaggaaaaacacagcatacattttataaccctggtatggaatttccccattttattttttaagagaagaagaacctcaaa

SEQ ID NO: 722667 - DNA, 1483 bp, Homo sapiens
  misc_feature 1382, 1383, 1384, 1385, 1386, 1387, 1388, 1389, 1390, 1391,1392, 1393, 1394, 1395, 1396, 1397, 1398, 1399, 1400, 1401,1402, 1403, 1404, 1405, 1406, 1407, 1408, 1409, 1410, 1411,1412, 1413, 1414, 1415, 1416, 1417, 1418, 1419, 1420: n = A,T,C or G
  misc_feature 1421, 1422, 1423, 1424, 1425, 1426, 1427, 1428, 1429, 1430,1431, 1432, 1433, 1434, 1435, 1436, 1437, 1438, 1439, 1440,1441, 1442, 1443, 1444, 1445, 1446, 1447, 1448, 1449, 1450,1451, 1452, 1453, 1454, 1455, 1456, 1457, 1458, 1459: n = A,T,C or G
  misc_feature 1460, 1461, 1462, 1463, 1464, 1465, 1466, 1467, 1468, 1469,1470, 1471, 1472, 1473, 1474, 1475, 1476, 1477, 1478, 1479,1480, 1481: n = A,T,C or G
tgcatgttgtgccaactgtgacctttacctgcaggtttcaggcagctatttgattttctgttcaaggagagcattgtaaccctagcaacagataccatggtgcagatggcagatctaatatccaaagtctgtttgatggggacacatactaacactgcaagcagaggaaccttttttaatactttaacaagactttaaattgagctgctctgcaaagcagaatcttcctctttcttagacacaataggactgccagtggcataccaggtttatcagctcttctcttcatcacccccaaacctagctggagttcaatctttaatctcctcctaagtcacagaatccagagagctagcatccaaaatactgagataacataccatggtctcacaccaggacaatgagctgtaggtaagttagtcaaatgtaggagcttctgtggttaggtaactttgtctctcttatcagtacctcatggaacttagaaatttggtctagtgttgaggagacttggagtgtcagtatcacactagctgtgtgaatgtgagtgtgttgatatgtctgtcttaacattcctgtattgcagtattttatctaagtcaagtctaaaatggagtattaaaatatggaaatatgtacatcttaagattgacgaaataatgatagatagggtaggctaaatcccgtaacaggtaacttccaaatctcagaagcataacacagtagattatttcttgttcatataactcagtaattcagcgattcatggtctatgctctttccatgatgcagttctaccctcatgcagatcctcagacccctccccattcagctaagacatgtataatttctgcttacctttggttggccagaactagtcatgtgaccatgccgaattgcaagcgagtctgggaaatgttgtctcactgtgtgctttggagaaaaaggaaagagactgtggtgaatacttagttgtcaccactacagtctggccctctatcaaatccccattgatttttcttcccaagtagagaacacctttcaacctcttactcaagagaagccaccaaagtcccatcatgaccacgaagacagctcaaagtccaggatctcagggtaatgtgaagttctccctatcagtcccattctttcacgattatggcacctaacatccagtacagcagagacactggtttcaagttctatgtgagtcacccagatatctttcttaagaagattcagaagtgtcttaggagagrgaataatctagaaaagggattggagtcttggatatacaactggcagctctaaatcatttatccattaaaattcccatgacctcaactatagtcccatgctggtgaggatttggatctagacannnnnnnnnnnnnnnnnnnnnnnnnnnnnnnnnnnnnnnnnnnnnnnnnnnnnnnnnnnnnnnnnnnnnnnnnnnnnnnnnnnnnnnnnnnnnnnnnnnnca

SEQ ID NO: 722668 - DNA, 587 bp, Homo sapiens
ggaggccaaggcaggaggsatcacctgatgttgggagttcaagaccaatctgaccaacatggagaaaccccgtctctactaaaaatacaatattagccgggcgtggtggcacatgcctgtaatcccagctactccagaggctgaggcaggagaattgcttgaacccaggaggcagaggttgtggtgagccaagatcgcgccattgcactccagcctgggcaacaaaagcaaaaccccatctcaaaaaaaaaaaaatgataaacatcactgaaaagtttggaagtactaccagtttctatgaccaatagctttccaaacagctgcaattatttgaaggtcaatgaactaaaaatgtccatgtatcggctttaggcaaaaaggtcattaatgctttaggggactgtaataagtctggaagaggctaacttgactctcaccttctgcagttctctatctgatcaccctgagatcctcttcaactgccaggctcctggaaggtcagagtcaagccagagactgactccctgaccagccatacagagcctaaagttacaacctacctggattggcaaggtcttctacgactt

SEQ ID NO: 722669 - DNA, 587 bp, Homo sapiens
ggaggccaaggcaggagggatcacctgatgttgggagttcaagaccaatctgaccaacatggagaaaccccgtctctactaaaaatacaatattagccgggcgtggtggcacatgcctgtaatcccagctactccagaggctgaggcaggagaattgcttgaacccaggaggcagaggttgtggtgagccaagatcgcrccattgcactccagcctgggcaacaaaagcaaaaccccatctcaaaaaaaaaaaaatgataaacatcactgaaaagtttggaagtactaccagtttctatgaccaatagctttccaaacagctgcaattatttgaaggtcaatgaactaaaaatgtccatgtatcggctttaggcaaaaaggtcattaatgctttaggggactgtaataagtctggaagaggctaacttgactctcaccttctgcagttctctatctgatcaccctgagatcctcttcaactgccaggctcctggaaggtcagagtcaagccagagactgactccctgaccagccatacagagcctaaagttacaacctacctggattggcaaggtcttctacgactt

SEQ ID NO: 722670 - DNA, 587 bp, Homo sapiens
ggaggccaaggcaggagggatcacctgatgttgggagttcaagaccaatctgaccaacatggagaaaccccgtctctactaaaaatacaatattagccgggcgtggtggcacatgcctgtaatcccagctactccagaggctgaggcaggagaattgcttgaacccaggaggcagaggttgtggtgagccaagatcgcgccattgcactccagcctgggcaacaaaagcaaaaccccatctcaaaaaaaaaaaaatgataaacatcactgaaaagtttggaagtactacmagtttctatgaccaatagctttccaaacagctgcaattatttgaaggtcaatgaactaaaaatgtccatgtatcggctttaggcaaaaaggtcattaatgctttaggggactgtaataagtctggaagaggctaacttgactctcaccttctgcagttctctatctgatcaccctgagatcctcttcaactgccaggctcctggaaggtcagagtcaagccagagactgactccctgaccagccatacagagcctaaagttacaacctacctggattggcaaggtcttctacgactt

SEQ ID NO: 722671 - DNA, 658 bp, Homo sapiens
atggagttgctctggttcacacgcctctgacaatactacaagctacaacagacataggagccaaatggatgggtcacagggcataagcatggttaatatgtgccagactgaaaaactgcaytgtggtattcattcaactttgacttccattgtgttgcagatgatcaagaggctcttcaatgcattcctgaagccttccttaatccttcagtatgcaagtcttttctcttctgaagctcctggccatcattcttgtcattttctcttctaaaattatcaggtctatttccgccagatctttaatcagtaacagctttacctaagagcctgccacgtcatttccgtcaattccattaaatcctgaacctttcatggaaatttgcagttttctctttgcaatcttcttaccttgtatccttaagtgtccatgatgccctgcactggtgagaaacaagttgacaaagataccgatggcacagttgccagtgggaagtgggaagggatatttgaatagcaatattcttataaatgtttcattagaaaattttcataataaaatcagaatatcaatgcctgtcttttcatttttttctatattttagaaagatcctttagaaacaaaataaattatctaaaaattaaactcactactttttac

SEQ ID NO: 722672 - DNA, 639 bp, Homo sapiens
agtattaatttttagtatgctgttcagaagtctgttgaaatattagtttaaagcttagaaaagaggtcgagggcagcaaattatagttctgacaagaaaaatggaatatatcctagactaagaaatgttgcttaactctcttttttttttttttgcctaggactccttttctggattatcctaattaactattaagggagaagaattagagacctagatcataacagataattcattaaactagaacttggaagaaaaaaattcaaaccatgagatttctatttaaaaaaattagagaacatcctatttccatctccttccaactttaacagatacaggatactagaaacctttttagctgtgagccgtcataacatacaatccatatacagacacataaacaatgttacctcataaaagcctcctgcatatattcaatactattttatacaggcctttcttcttataggaaacagttatagaaytgataccaaaatctgagacaagttaggcacttattctcttcattcatgaaaacaaacaaacaaacaaacatactttgacatttgatcataaaatactttaaaaccttgttcccttgtaaaatataatcaattatttcaaaaacggtcttttgtt

SEQ ID NO: 722673 - DNA, 597 bp, Homo sapiens
acagcagagaaagagcttggcccgatttgtcttcccaggctgtgggggtcttgaaaaagagctaccwtacagctcgtgcctggtcagtggggagactaagttgaaaggggatgatctgggcctctggtctaccgtgcacacaagtgtaacagtcgcttttgcttagggtgcggatggaatatttaatccattccagccaggcatttgtacttcggtatcctgtctccattgctagggtttgttttagatcttttacttttataatggacaccttggttttctcattagttataggaataacaggtgtagttcctttagtaaaatgaaggtaaggttttagggaggtacagccttctgaggaagcctagccctgggactgagtggtccagagaatatcataccgggaatagcaaggtagccaatgataaggaattttacaaggattatgttgagagtggggtgagtactaagggcaaagatacttttctgaagaggctggttgcctttgactttgtaggtctccacagggtatggctaagcatcaaacacaatagttttggtggggggcgctgacagtggagtgagggaagaagcaga

SEQ ID NO: 722674 - DNA, 513 bp, Homo sapiens
tttcgagatgcatggacgactgcaatctgcagagctcccctcctctggtttaccccctctccccaaggctgtgatgctgacttagctatccagggctgcccagcaccacgctccaaaccccttcaccagactctgctcccctgagtgtatgacacatgtgtctcttcatcctaaatcttatcaaagcgtatttctacttagagtttcattttagctggctgaagatataatctgtatggtacacactgccaacaacttaacttagttcgtaagtatctgtatttttcaaaaggacttctagagtcatcactgcttttgcccagaaaataaatgcctaacgctgatgctaggaacaaaggaatraatgtcgatgggaggtaggataaaaatgggaagtaagtggttttcatcaaataacaccccctttgatttgatggctgctatagaggcaacaacctgttttatccttttccctgataagtaccaaagcataatgattacaataatagttaa

SEQ ID NO: 722675 - DNA, 618 bp, Homo sapiens
atgagttaaatttttgagatgcaaaattatatgttctgcccattttctctacctgttttgtgtgaaagataatatgattgaatgtatgctttgtttgtgcccaagtacacgtctgaaccacagcctattctttatatcctattgagagaattgtggctccttttttcttttacgttacttaatatttggctgtagctgttctttggcagtaggtagggtatttgataattctgctgtgctgcataaacatttttacttcaaagtgattgcttgtccatgtctcactggaattatttcaagycagacgtctaattctgtccaacatctttaatgttttcaaaatcatcttgggtgttgttaatggagtatcattaggtacaatttgaaacatttcagtgggcagtacatggattcagaatatttgtgcaatatgtgctcttgcttctgaagtctttgggggatttttcttttatatacccttctcctaacactttattttctttactagttgacttagttgtatagttatagtaaacataatttttccatttggccaatatttatgaaaactatagtaggatccaaacattccaaaagagcactgggataagaaagagg

SEQ ID NO: 722676 - DNA, 618 bp, Homo sapiens
atgagttaaatttttgagatgcaaaattatatgttctgcccattttctctacctgttttgtgtgaaagataatatgattgaatgtatgctttgtttgtgcccaagtacacgtctgaaccacagcctattctttatatcctattgagagaattgtggctccttttttcttttacgttacttaatatttggctgtagctgttctttggcagtaggtagggtatttgataattctgctgtgctgcataaacatttttacttcaaagtgattgcttgtccatgtctcactggaattatttcaagtcagaygtctaattctgtccaacatctttaatgttttcaaaatcatcttgggtgttgttaatggagtatcattaggtacaatttgaaacatttcagtgggcagtacatggattcagaatatttgtgcaatatgtgctcttgcttctgaagtctttgggggatttttcttttatatacccttctcctaacactttattttctttactagttgacttagttgtatagttatagtaaacataatttttccatttggccaatatttatgaaaactatagtaggatccaaacattccaaaagagcactgggataagaaagagg

SEQ ID NO: 722677 - DNA, 618 bp, Homo sapiens
atgagttaaatttttgagatgcaaaattatatgttctgcccattttctctacctgttttgtgtgaaagataatatgattgaatgtatgctttgtttgtgcccaagtacacgtctgaaccacagcctattctttatatcctattgagagaattgtggctccttttttcttttacgttacttaatatttggctgtagctgttctttggcagtaggtagggtatttgataattctgctgtgctgcataaacatttttacttcaaagtgattgcttgtccatgtctcactggaattatttcaagtcagacgtctaattctgtccaacatctttaatgttttcaaaatcatcttgggtgttgttaatggagtatcattaggtacaatttgaaacatttcagtgggcagtacatggattcagaatatttgtgcaatatgtgctcttgcttctgaagtctttgggggatttttcttttatatacccttctcctaacactttattttctttactagttgacttagttgtatagttatagtaaacataatttttccatttggccaatatttatkaaaactatagtaggatccaaacattccaaaagagcactgggataagaaagagg

SEQ ID NO: 722678 - DNA, 1345 bp, Homo sapiens
tggttaggggattatccagattctgcatgatatagtttgtacatattaaagtgattttacttttagaatcaacatataatttatataccacgtaaatatcctgccctgatcaaatttgattatctcctgagatgctaaatttaatgaatgattctctttttttaactttaagtttggggtacatgtgcaggatgtgcaagtttgttacatgggtagcatgtgccatcagagtttgttgtttattttttctgagtttcttgaaaatctttctctcctcttgcctttctatcgctgatgtgctgttgagatatctggtgcctgtattactttcttactcttataaataacttggtcattttgactgtaagccctgagaatttttcatttgaccttaaagtctaaaattttaccgtggtacgtttcagggtgattgccctggctcagtttttcaggtgtataataggttctttcaatatattgacgtaaggattttatttttcctagaaaattacttatggattttaaaaataaatattagtttcattccattgcattactattattattattatttttgagacggagtctcattctgtcacccaggctggagtgcagtggcacaatctcgactcactacaagttctgcctcctgggttcacgacattctcctgcctcagcctcctgagtagctgggactacaggcgcccaccaccacagccggctaattttttgtatttttagtagagacggagtttcaccgtgttagccaggatggtctcgatctcttgacctcctgatccgcccacctcggcctcccaaagtgctgggattacaggcatgagccaccgtgcccggcctattattcttcttaagagatcccagttgcatatatgtagaactcctttgcatgtccttcatttcaaccactttttctccagccattattacttttccactttttttttttttttggtcatgtttatattcatggttactttatttaaactcaagttcagaagtacaagtgcaggtttgctacataggtaaacttgtgtcatgggagtttgttgttagattatttcatcatccagktattaagcttagtacccgttagttatttttcctgatcttctccctcctcacaacctccactctccaaaagtcctcagtgcatgtgtgttcctctatgtgtccatgtgttcttatcatttagctcccacttagaaatgaaaacacacagtatttggcttcctgtttctgtgttagtttgctgaggataatggcctccagctccatccatgctcctgcaaaggatatgatctcattttttgcggctgcatagtat

SEQ ID NO: 722679 - DNA, 1345 bp, Homo sapiens
tggttaggggattatccagattctgcatgatatagtttgtacatattaaagtgattttacttttagaatcaacatataatttatataccacgtaaatatcctgccctgatcaaatttgattatctcctgagatgctaaatttaatgaatgattctctttttttaactttaagtttggggtacatgtgcaggatgtgcaagtttgttacatgggtagcatgtgccatcagagtttgttgtttattttttctgagtttcttgaaaatctttctctcctcttgcctttctatcgctgatgtgctgttgagatatctggtgcctgtattactttcttactcttataaataacttggtcattttgactgtaagccctgagaatttttcatttgaccttaaagtctaaaattttaccgtggtacgtttcagggtgattgccctggctcagtttttcaggtgtataataggttctttcaatatattgacgtaaggattttatttttcctagaaaattacttatggattttaaaaataaatattagtttcattccattgcattactattattattattatttttgagacggagtctcattctgtcacccaggctggagtgcagtggcacaatctcgactcactacaagttctgcctcctgggttcacgacattctcctgcctcagcctcctgagtagctgggactacaggcgcccaccaccacagccggctaattttttgtatttttagtagagacggagtttcaccgtgttagccaggatggtctcgatctcttgacctcctgatccgcccacctcggcctcccaaagtgctgggattacaggcatgagccaccgtgcccggcctattattcttcttaagagatcccagttgcatatatgtagaactcctttgcatgtccttcatttcaaccactttttctccagccattattacttttccactttttttttttttttggtcatgtttatattcatggttactttatttaaactcaagttcagaagtacaagtgcaggtttgctacataggtaaacttgtgtcatgggagtttgttgttagattatttcatcatccaggtattaagcttagtacccgttagttatttttcctgatcttctccctcctcacaacctccactctccaaaagtcctcagtgcatgtgtgttcctctatgtgtccatgtgttcttatcatttagctcccacttagaaatgaaaacacacagtatttggcttcctgtttctgtgttagtttgctgaggataatggcctccagctccatccatgcycctgcaaaggatatgatctcattttttgcggctgcatagtat

SEQ ID NO: 722680 - DNA, 606 bp, Homo sapiens
caattctccattaatttacttttgaccttcacttacaaggtcccaaggatggccagaggtgaaagaytagggctctctcaggtctttccttagcatgtacacagccctacacctgtgcaacacttatgtgtgcacctggtattccagattcttagcaacaagtaggaactttgcaaagtctcctattgacattttattctacagatttaaaaaaaaataaatgtttcacaacttatttgcctcaactggtatcatcacctctgcagcaacagtgttaggaaactgctgctgattgtttcagcaaatgccctagagatacaattctctacagacggagcatcttgaggaacttcaaatctggacttccccttccaggggctgctattcggctggttttcaaggataccactgaattattacaaaagggatgaaaatgaggcaaactgaaataccgtgaaactccttgtactaagtttcagtcattttttaataaaccctcttcagattttgcaaagttagcttattttgaaaattctgaaaaagctgattttgacaaattttgctagtgtttttattgcttttatttagaagtcatttttcagagtt

SEQ ID NO: 722681 - DNA, 606 bp, Homo sapiens
caattctccattaatttacttttgaccttcacttacaaggtcccaaggatggccagaggtgaaagattagggctctctcaggtctttccttagcatgtacacagccctacacctgtgcaacacttatgtgtgcacctggtattccagattcttagcaacaagtaggaactttgcaaagtctcctattgacatttkattctacagatttaaaaaaaaataaatgtttcacaacttatttgcctcaactggtatcatcacctctgcagcaacagtgttaggaaactgctgctgattgtttcagcaaatgccctagagatacaattctctacagacggagcatcttgaggaacttcaaatctggacttccccttccaggggctgctattcggctggttttcaaggataccactgaattattacaaaagggatgaaaatgaggcaaactgaaataccgtgaaactccttgtactaagtttcagtcattttttaataaaccctcttcagattttgcaaagttagcttattttgaaaattctgaaaaagctgattttgacaaattttgctagtgtttttattgcttttatttagaagtcatttttcagagtt

SEQ ID NO: 722682 - DNA, 606 bp, Homo sapiens
caattctccattaatttacttttgaccttcacttacaaggtcccaaggatggccagaggtgaaagattagggctctctcaggtctttccttagcatgtacacagccctacacctgtgcaacacttatgtgtgcacctggtattccagattcttagcaacaagtaggaactttgcaaagtctcctattgacattttattctacagatttaaaaaaaaataaatgtttcacaacttatttgcctcaactggtatcatcacctctgcagcaacagtgttaggaaactgctgctgattgtttcagcaaatgccctagagatacaattctctasagacggagcatcttgaggaacttcaaatctggacttccccttccaggggctgctattcggctggttttcaaggataccactgaattattacaaaagggatgaaaatgaggcaaactgaaataccgtgaaactccttgtactaagtttcagtcattttttaataaaccctcttcagattttgcaaagttagcttattttgaaaattctgaaaaagctgattttgacaaattttgctagtgtttttattgcttttatttagaagtcatttttcagagtt

SEQ ID NO: 722683 - DNA, 628 bp, Homo sapiens
gcaagagtaaatgaggaagaagcaaaagtggaaacccctgataaacccatcagatctcatgagacttattcactatcatgagaatcgcacaggaaagactggccccatgatttaattacctccccctgggtccctcccacaacatgtgggaattctgggagacacaattcaagttgagatttggtggggacacagccaaaccatatcagcatcaaaactctaagcatatggatgactccttccgtgggacaatggcaagtgatggactaactgcagcaacactgatttcttaagctcgtgaggtattttgcatgtggttcaacaccttctagtatatgsgggacatgacatctattccattgttctctatctttagggatttggtggaaacagtagacctcaggaagactggtattaaacatcctattacatgtgtacattcatagacatgccattgtgtgccaattgagcatgggagagagggagaacttatctggatggtatgttctttagaagatagcatcagtgagaataaatatgaagatacatggtaaatataaagtagagaattttaggaaatagagtaagtgaagaggaaggagaaaaccaccaaaaaagtagtagggag

SEQ ID NO: 722684 - DNA, 1371 bp, Homo sapiens
ttggcattataggtagaatattctcaataatatttaaaccatacatttaaatataatttaatttaaatatataatataaataaatataatttaaatcayaactcccagacacatatttagaaaagcaaagttgatcaaccaaatgaagcaaaaatagcaagttatctaactggtgaaattctgcattttttataatgttgtataactcaaacataattttaattttgctgttgttattgttgcttattggattggttggtttgttcatttcttttttgcattgactcaccctagatatttaaagtgtttcaacatcttgcccaaatagtggtcttacgaagaatttcaaagaagtacaaatacctgggaatttctaaaaattgtgactacattcaagaattttgcgataatgccccaatagtgagggcataacatcaagttagattatcccccaaaacacactgtactttattacataagaaaagaaaagaataggtactattaaaatatttatggcaatgcaaagtacctaagggacatgaacatttacttatgtaaaagatgattggtgaagattatatgctaagcacagtgtgtacctatctctgcctttcctttctgaaattttgtaagccacagaataagtaatcacttcccacttctggactatgctcttagtccaaataaaattttgattcataccaaaaattcatattagagagaatttctgacctcctacagtagtttctaattgagaaaattattataatggaacactcagaggaaataaaacatttgggactaagaaagcccacatatataatttcatgaagatgcaaattaaagatagtattgatttaagttcttttttttctcttttgcatctatggctattgcatttcattttttgagcattcactatgtgctgggcaccccatgctaggtggggacaatggtggtaccaaagttaatcacgtagagactggtgctcaagaaatgagtcatctaataggataaataagatgaagataaaagtactataacaaaaaaacatttttgtgctatatgatagatgaagtagattatttaatctatcatatagcctatgtgaagggcaaagaggcaggcgtggcttctaggtggggacagcataaaacattttggcaatgacatgtatgctggatcttgaaagttaagtaggatttgctttaaggaaagggtgtatgttggaggcacgacaggagcaaagggaattggagtagactgagaaaagtattcttgataaagaaaatatgagtaaaagttccatgctacctataagaatttccatgatgaaaattattacttgaaaatgactttaagttcttggga

SEQ ID NO: 722685 - DNA, 1371 bp, Homo sapiens
ttggcattataggtagaatattctcaataatatttaaaccatacatttaaatataatttaatttaaatatataatataaataaatataatttaaatcacaactcccagacacatatttagaaaagcaaagttgatcaaccaaatgaagcaaaaatagcaagttatctaactggtgaaattctgcattttttataatgttgtataactcaaacataattttaattttgctgttgttattgttgcttattggattggttggtttgttcatttcttttttgcattgactcaccctagatatttaaagtgtttcaacatcttgcccaaatagtggtcttacgaagaatttcaaagaagtacaaatacctgggaatttctaaaaattgtgactacattcaagaattttgcgataatgccccaatagtgagggcataacatcaagttagattatcccccaaaacacactgtactttattacataagaaaagaaaagaataggtactattaaaatatttatggcaatgcaaagtacctaagggacatgaacatttacttatgtaaaagatgattggtgaagattatatgctaagcacagtgtgtacctatctctgcctttcctttctgaaattttgtaagccacagaataagtaatcacttcccacttctggactatgctcttagtccaaataaaattttgattcataccaaaaattcatattagagagaatttctgacctcctacagtagtttctaattgagaaaattattataatggaacactcagaggaaataaaacatttgggactaagaaagcccacatatataatttcatgaagatgcaaattaaagatagtattgatttaagttcttttttttctcttttgcatctatggctattgcatttcattttttgagcattcactatgtgctgggcaccccatgctaggtggggacaatggtggtaccaaagttaatcacrtagagactggtgctcaagaaatgagtcatctaataggataaataagatgaagataaaagtactataacaaaaaaacatttttgtgctatatgatagatgaagtagattatttaatctatcatatagcctatgtgaagggcaaagaggcaggcgtggcttctaggtggggacagcataaaacattttggcaatgacatgtatgctggatcttgaaagttaagtaggatttgctttaaggaaagggtgtatgttggaggcacgacaggagcaaagggaattggagtagactgagaaaagtattcttgataaagaaaatatgagtaaaagttccatgctacctataagaatttccatgatgaaaattattacttgaaaatgactttaagttcttggga

SEQ ID NO: 722686 - DNA, 950 bp, Homo sapiens
tacaaaaaattagcctggcgtggtggcaggaacctgtaatcccatctactcagaaggctgaggcacaagaatcgcttgaacccggcagtccgaggttgccaagagctaagatcatgccactgcactccagcctgggcaacagagtgagactctatctaaataaataaataaataaataaataaataaataaataaataaaataagatatctcagctggttttggtagtgatgctattcttcttgtgctaaaaagtaatgcaactcaaacagttgcacacgatcaacaatttcttaggagatgttttgttgattttattgggcttagttcatctgttcattggatgaatattcattgagtccctagtagccactacagatgcatttcaaaggaaacctttctaagactatctgaggacatatgtataactaaattatttggtgttttctgttgattttcttttttaagtaagaagaaaatgaaataatagaatagcagcaacataattcttcaatattaaagtctagctataaccagtagactgaagagatgaacctagtgctgtatctatcctgcctgtccacctctcatccatctagagtggctgtcccatttctataccataggccatactgatgaagcagtgactgaayacaggacagctttcaggaagaattaaactgtagctcttagattcagactgcagactgcccataaagaagatttctgccaagtaacacagtgaaagctgttgacattccctgcttccttcaatatgaaacttccccaacaattcaaagtcacaatccatgatctactacttagagttcaaagtacatcattcatcacaatatagtccaaatagtttctaggagattaaatgacataaacacaacaattgaagaggaataaggaataaaacaagatggatggcagtggctcacacctgta

SEQ ID NO: 722687 - DNA, 1462 bp, Homo sapiens
caactctgaccctcacactttctaataaaaagccgttaatgatacccttatttttgccaggtaagttaagtccagcttatttattgaggcaggggtgagggggttggggtacggccacactcataagtgtgacgtctgctgtttcctgtgcctactctggtctatctcaagccctcaccttcttaatcttcacgcgcacccagctttcatgccataaagggcaagagtagtttcctgaacatccacactcagtgagacctctggatttgatcctgccatcccctctgcctggatcagcgttccttttcccatcccatccacctcaccacctccttgcttacccgacacagtctttatcatctttcaaaactcacagcaagggttatagcctctgcaacatcttctctcagccaacctgacagcatcagccattcccttccttgtacccccaggccgcatactatgtctctattgctgtggtttgcatgtgtttcctgcaaaattcatgtgtcgaagcttaatccccactgtgctggtgtcaggaaaggggaccttttgggaagtgattaagtcatgaaagctctaccctcatgagtaggttagtgccttgtcaaagggctggagggaagtagtcgtgactctttttcgccccttctgaccttcctgccatggaaagacacagcgttccttccttctggatgatacagccacaggtgctctcttggaagggatgacatcaggcattaaacctgctggcaactggatgttgcaccccagcctccagaactgtgagaaataaatgtctgatttttataaattaatcactctcaggcattttgttaaataagtacaaatagatgaaacattcacgttataatatatgctcctataaagtagaggccatcctcaccatcttcatcactgtagccccagcacctagcatggaataagcatgaaatcaggaccagcctcaccttccaaccygacagaaattcttttctttacatgagcatgtactatgcttccttctgtctttgcttttgctctggtacttccttcccacagaaatttcctctctattatggattcaccagaattctacccatcctaaacaaagctcagcgtacatatcttttcccacaagaagccttgtttgatctgttttcattcatcctacatgcatgtgtgatgtgtgtgtgtaagtgtgtgaactcccaaacatgaaaatcgtatgatttactgttatccgattatattagaatttggattcagattttaaagctttattccttaatttaaaaaaagtttgccctactctaataataaaactcatcttgcaggggcaataacactaatttctaataatagatcttatgatagcatctggaatacagtaaatgatcaataatgttaattcatgttctttcttctttaagagacttaacattttatgacttcagca

SEQ ID NO: 722688 - DNA, 1462 bp, Homo sapiens
caactctgaccctcacactttctaataaaaagccgttaatgatacccttatttttgccaggtaagttaagtccagcttatttattgaggcaggggtgagggggttggggtacggccacactcataagtgtgacgtctgctgtttcctgtgcctactctggtctatctcaagccctcaccttcttaatcttcacgcgcacccagctttcatgccataaagggcaagagtagtttcctgaacatccacactcagtgagacctctggatttgatcctgccatcccctctgcctggatcagcgttccttttcccatcccatccacctcaccacctccttgcttacccgacacagtctttatcatctttcaaaactcacagcaagggttatagcctctgcaacatcttctctcagccaacctgacagcatcagccattcccttccttgtacccccaggccgcatactatgtctctattgctgtggtttgcatgtgtttcctgcaaaattcatgtgtcgaagcttaatccccactgtgctggtgtcaggaaaggggaccttttgggaagtgattaagtcatgaaagctctaccctcatgagtaggttagtgccttgtcaaagggctggagggaagtagtcgtgactctttttcgccccttctgaccttcctgccatggaaagacacagcgttccttccttctggatgatacagccacaggtgctctcttggaagggatgacatcaggcattaaacctgctggcaactggatgttgcaccccagcctccagaactgtgagaaataaatgtctgatttttataaattaatcactctcaggcattttgttaaataagtacaaatagatgaaacattcacgttataatatatgctcctataaagtagaggccatcctcaccatcttcatcactgtagccccagcacctagcatggaataagcatgaaatcaggaccagcctcaccttccaacctgacagaaattcttttctttacatgagcatgtactatgcttccttctgtctttgcttttgctctggtacttccttcccacagaaatttcctctctattatggattcaccagaattctacccatcctaaacaaagctcagcgtacatatcttttcccacaagaagccttgtttgatctgttttcattcatcctacatgcatgtgtgatgtgtgtgtgtaagtgtgtgaactcccaaacatgaaaatcgtatgatttactgttatccgaktatattagaatttggattcagattttaaagctttattccttaatttaaaaaaagtttgccctactctaataataaaactcatcttgcaggggcaataacactaatttctaataatagatcttatgatagcatctggaatacagtaaatgatcaataatgttaattcatgttctttcttctttaagagacttaacattttatgacttcagca

SEQ ID NO: 722689 - DNA, 624 bp, Homo sapiens
  misc_feature 151: n = A,T,C or G
cttgacactactttgagaatagatatttatgcagaaaaattataataagcccggagcggtggctcacacctgtaatcctagcactttgggaggccgaggtgggtggatcacctgaggtcaggtgttcgagaccagcctggccaacccgtcngaaccctgtctctactaaaaatacaaaagttagctgggcatggtggtgggcgcctgtagtcccagctactcgggaggctgaggcaggagaatggtgtgaacccaggaggtagagcttgcagtgagctgagattgtgccactgcactccagcctgggcgacagagcaagactctgtctctaaaaaaaaaaaaaaaaaaaaaaataggccaggcgtggtcgcgggcacctgtaatctcagctacttgggagcctgaggcaggagaattgcttgaacccaggagggagaggttgcagtgagccaagatcgcgcccttgcactccagcctggccaacaagagggaaactgggtcccaaaaaaataaataaataattacctgcgcatggggcagggtgcctgtaatcccagctactcgggaggctgaggcaggrgaatcgcttgaacccgggaggcggaggttgcagtgagccgagat

SEQ ID NO: 722690 - DNA, 624 bp, Homo sapiens
  misc_feature 151: n = A,T,C or G
cttgacactactttgagaatagatatttatgcagaaaaattataataagcccggagcggtggctcacacctgtaatcctagcactttgggaggccgaggtgggtggatcacctgaggtcaggtgttcgagaccagcctggccaacccgtcngaaccctgtctctactaaaaatacaaaagttagctgggcatggtggtgggcgcctgtagtcccagctactcgggaggctgaggcaggagaatggtgtgaacccaggaggtagagcttgcagtgagctgagattgtgccactgcactccagcctgggcgacagagcaagactctgtctctaaaaaaaaaaaaaaaaaaaaaaataggccaggcgtggtcgcgggcacctgtaatctcagctacttgggagcctgaggcaggagaattgcttgaacccaggagggagaggttgcagtgagccaagatcgcgcccttgcactccagcctggccaacaagagggaaactgggtcccaaaaaaataaataaataattacctgcgcatggggcagggtgcctgtaatcccagctactcgggaggctgaggcaggagaatcrcttgaacccgggaggcggaggttgcagtgagccgagat

SEQ ID NO: 722691 - DNA, 624 bp, Homo sapiens
  misc_feature 151: n = A,T,C or G
cttgacactactttgagaatagatatttatgcagaaaaattataataagcccggagcggtggctcacacctgtaatcctagcactttgggaggccgaggtgggtggatcacctgaggtcaggtgttcgagaccagcctggccaacccgtcngaaccctgtctctactaaaaatacaaaagttagctgggcatggtggtgggcgcctgtagtcccagctactcgggaggctgaggcaggagaatggtgtgaacccaggaggtagagcttgcagtgagctgagattgtgccactgcactccagcctgggcgacagagcaagactctgtctctaaaaaaaaaaaaaaaaaaaaaaataggccaggcgtggtcgcgggcacctgtaatctcagctacttgggagcctgaggcaggagaattgcttgaacccaggagggagaggttgcagtgagccaagatcgcgcccttgcactccagcctggccaacaagagggaaactgggtcccaaaaaaataaataaataattacctgcgcatggggcagggtgcctgtaatcccagctactcgggaggctgaggcaggagaatcgcttgaacccrggaggcggaggttgcagtgagccgagat

SEQ ID NO: 722692 - DNA, 624 bp, Homo sapiens
  misc_feature 151: n = A,T,C or G
cttgacactactttgagaatagatatttatgcagaaaaattataataagcccggagcggtggctcacacctgtaatcctagcactttgggaggccgaggtgggtggatcacctgaggtcaggtgttcgagaccagcctggccaacccgtcngaaccctgtctctactaaaaatacaaaagttagctgggcatggtggtgggcgcctgtagtcccagctactcgggaggctgaggcaggagaatggtgtgaacccaggaggtagagcttgcagtgagctgagattgtgccactgcactccagcctgggcgacagagcaagactctgtctctaaaaaaaaaaaaaaaaaaaaaaataggccaggcgtggtcgcgggcacctgtaatctcagctacttgggagcctgaggcaggagaattgcttgaacccaggagggagaggttgcagtgagccaagatcgcgcccttgcactccagcctggccaacaagagggaaactgggtcccaaaaaaataaataaataattacctgcgcatggggcagggtgcctgtaatcccagctactcgggaggctgaggcaggagaatcgcttgaacccgggaggcggaggttgcagtgagcygagat

SEQ ID NO: 722693 - DNA, 356 bp, Homo sapiens
  misc_feature 337: n = A,T,C or G
tgaagaaactcagatgtgcttcaggaattgtaaggcaaagcagagggaggaggattccagatatccattgcatccaccggagcagcacattgttaatctgtattcagtaccagtattctatccaatagctwatgtgaaggaagggccccacagctgggggaagacaggggttgggtgtaagggatgggggaaattaggagaagaggctcctttactagaagacttcacatttccccttagctatataactaatagtctatatatttttacattcttttatttactaatttttaaaattggtacattgtaattgtacatatttatggggtacggtgtntttcttgatattctctatg

SEQ ID NO: 722694 - DNA, 1818 bp, Homo sapiens
ctggggcaggcacagaacaagtattaaataggcagaagctattgctcttattaattattattaatattattgccacaccattatgatttttggtttatatagttaacagaaaagtttaaaataaatggagcaaacagtaaatttcaggagataaatggagaaagggccagaataaagctccaattgcatccagggtgatattcaatagattggttttattttgttttgttttttcactttttattccgcatgcataagtaaacagaaatagtataatttacctcatgtacccataatccagctgcaataatgttaactcatggccaatgacttttcattttatcactactcatttcttctaacccctctcccgctgtattattttgaagagaatcccacgcattgtattatttattccataaatatttcaatatgcgtttatgaaaggtaaggacttgaaaaataacaataaaatactaagtaaatcttttttgacttactcttaacactctcatatgaaaaatatgcagcttaccaaatgcttctttaacaactattagctcatctgttcattatcatcttggggaaggcaactgaggctcagtgaggttaatgaacttgccaggcrtcacagagcctcagtttcctcaaagatgacaaggaacagatgagcaatcacttgtgaaaaaagctggattcaagcccagttccatgtgacaaagactatgtactgtaccatgcactttacattgtaccatattgctcttcctatactggcttcaaccccagagtttctcctctcaccccctcacccctggtctctactttggtcatgaggcagagatgagaggggctatagctaagttgagccaggcactggcagagggatctgacattgaaagtaattaatatgtatgagcaggggtgcatccaagtttgcagggacttaagcttatttaacttgatgggctgctttaagacaaaaatatatgtattacaaataaaaacttaggtccgaaagctagtattgagctagaataagaaaagaaacaataaattacacattttttaaagcttacaaatctttaaagtattttaaatgctataaatattacaaaatatttaaaatagcatatttttattaattaacctcctgaaacacttatataataatttttcctacacttttggctgcacattctttgaccaccttttcatatgactatgattctgtcacatcattttctaaagagaataaaaagccaatttggtcctttctttaacatggtagagcaaatgttttttattattgatagtttttaaagtttatttcagcattgtgactcataatgtaaaattttagaattattatgtaagttaggaaactttatcaagttttcttcgtacataaactttaagattttagaacatttcatgttttcttgttccatgactaatcttcgattctttttgttgacattcattaaccacatttcctgggtcatttcaggttcttaaaagggacctgtgcaagtagggggctcctgaaacttgagtttcattagatttagagtaaagttgactcatcagattagctggttacctttttccttccaggctcttatgtcctcatttcctctccctggggccagatcttcatttcctcaccaggcctcatacttacctaggaagtaaatttcacttcaactccaggcacagagcattcattcccctgactctgtaactctgcaaaacagtgctgcgagtccccatcactctcctcagtgactgaattagaccacaagagccttctaatac

SEQ ID NO: 722695 - DNA, 482 bp, Homo sapiens
tttccctacagctacatgtggccgaagagttatagtaagaagagatgtccacaatgtcagggatatgaatttgcaaggagggacatccctgattcttccctttctttcttccttttactttatacagagctgatggctagagatggctagagatgaagcagccatcttgagccacgaggaaatcttagcaatggagacctgtgaagcggmagactaacacagaatgagccaaatgaatgctttttctactctggctgcctgacttcagactttaaacattaacatccttactatttggggctttctgtcactgtacatgaatctgaacagactaatattccctgtgacatattaaatatagcattaatttatgtacttagaggttattgtctatctctgcccagtagtatgtaaactttctgagggtaatacctcttcttctgtttacttctgtttctttttcagttgcaatagtgtcaggt

SEQ ID NO: 722696 - DNA, 1226 bp, Homo sapiens
tataagaaaatgaatttatttcttaagttctagaagctgagaaagctgagaagccatatctgttgagtgtcttcttgctggtggagactctctgaagagctctgaaatggcacagcacatcacatagtgagggggccgagcatcctagcttggatatctcttcctcttcttataaagctacctgccccactcccacgataatccattaatccattagcccatgaatcccttaatccctgaatggattaatccaggctctgccctcgtgacctgatcacctcttaaaggtgattaatagcacctctcaataccagcacattggggattacattgggaatcaacatgaattttrgagggaacaaatattcaaaccatagcagttcttattgtgagctatttccctggctttagtgctaggtgttagacgttgattcatatctcctgtatactggcaagtaacttaaaacttagggtgacaactgatgagacagagaagtatacagagttttttgtgagcacagaggaaaaatagcacatttttaaaattccaataaaaatagagaaaaaaccgtatccttaaaatcaaataaaccaattttgggacaataacaaaaataaagtaacatacaggtgttatagttttaaactaaactaaacagactaaacggattaaaaattaattataaaatcttatgaagccaataaaatcatggtctgattcatttccatgacttccaaatcctgtaattaaggttttctctgatttattctggcgatatcagtcattttggggtagttctacttattgtcacatactcagtcaaaaatctaattctccgttgtctcatatatttgtggtaagatacttaaatcttactcagttcagaatttgagtcatattaattttgttcccaaattataataataattttctgaaattatttaaatatgtgagtctcaaaatgaactataaaatttattttcaaagcgtgatctgctgaggcccatcagcaggcacaagctgtaaaggttatcctcagcaaagagtttaaaaaggcaaatcctttcttcagctctcaagggttgatgccacacaatcttttttatgcctgtgttaatttctagtaatctaccaaatgaaatttttttgtttctatactgtggtgtttgtaaattgctttttaaaactctgtagcctatagaaaaggctgattgctgtacaatat

SEQ ID NO: 722697 - DNA, 1226 bp, Homo sapiens
tataagaaaatgaatttatttcttaagttctagaagctgagaaagctgagaagccatatctgttgagtgtcttcttgctggtggagactctctgaagagctctgaaatggcacagcacatcacatagtgagggggccgagcatcctagcttggatatctcttcctcttcttataaagctacctgccccactcccacgataatccattaatccattagcccatgaatcccttaatccctgaatggattaatccaggctctgccctcgtgacctgatcacctcttaaaggtgattaatagcacctctcaataccagcacattggggattacattgggaatcaacatgaattttggagggaacaaatattcaaaccatagcagttcttattgtgagctatttccctggctttagtgctaggtgttagacgttgattcatatctcctgtatactggcaagtaacttaaaacttagggtgacaactgatgagacagagaagtatacagagttttttgtgagcacagaggaaaaatagcacatttttaaaattccaataaaaatagagaaaaaaccgtatccttaaaatcaaataaaccaattttgggacaataacaaaaataaagtaacatacaggtgttatagttttaaactaaactaaacagactaaacggattaaaaattaattataaaatcttatgaagccaataaaatcatggtctgattcatttccatgacttccaaatcctgtaattaaggttttctctgatttattctggcgatatcagtcattttggggtagttctacttattgtcacatactcagtcaaaaatctaattctccgttgtctcatatatttgtggtaagatacttaaatcttactcagttcagaatttkagtcatattaattttgttcccaaattataataataattttctgaaattatttaaatatgtgagtctcaaaatgaactataaaatttattttcaaagcgtgatctgctgaggcccatcagcaggcacaagctgtaaaggttatcctcagcaaagagtttaaaaaggcaaatcctttcttcagctctcaagggttgatgccacacaatcttttttatgcctgtgttaatttctagtaatctaccaaatgaaatttttttgtttctatactgtggtgtttgtaaattgctttttaaaactctgtagcctatagaaaaggctgattgctgtacaatat

SEQ ID NO: 722698 - DNA, 1236 bp, Homo sapiens
tgggaaatatattttaattgggaaataagaacaattagaagtgtaaatactattcaaggtatatctcacttgaaacaaactatcatcttaattaataaaaatgaatttaaactcatttaaagaaaccaaaagcataggaacttggggccatttagtgaaggaatacacacacacaattgttttatagaaaaagtacattgatatttaaggtgcagttattggaaagcttaaaagacagtcacaagaagctgcataagaaggaaggaaaacacacaaacttgttaagacatattttttccccaaatatgcaaaaaattgctttggcaaatacagtgtaataccttaaacatgtggaaaatatgaataaacagtgaagagcacattcatttattaaatgtttatcaaatgcttggacatcagtgtaaagcactttcttgtatatttttcctgttttattctcaaatgaaatgatctgttatcttaatctcctttaatatataaagaacctgagactcacagagataaataacttcctcaaggacatatgacagtaagcaacaaatcagggctttttgagtcttatggttactttgctttctggagagttctgagctgctgagcttttcctataaaagcaaatctcagattgtgttccttattatatcagatttgctttcctctcrtgcttaatcccttgattttggtttcgtattctatttatcgtgttgtatctacttttcactatgtaaaaacttccttccaatgagaaagaaaatcagttttggccttacaattagcatcccaaagctttctagagatcagagttgcatgacattataagttgctgccattttgaatcatcatggaccacggatatttagcaagaataaaggtgctaatctcattttgtcacttacatgttagatttttcagtggttaaagaccagtggttgacacagtgtcaaaattaatcttatgctaattgttttatttatcagcttaagtgattaaactatttgtgtgtgagtgagcatgcaaccttccctgtgaattcttaataacaaaatgctctttttggacacatcattgttaatgattcctctactttcccatcttctaaagactcttctacctcactcactcctacccccatttatgatctcagttagaacgctacacttatgctcacgtcaacctcaaactattaactttaaaacttctccttgtttatatttg

SEQ ID NO: 722699 - DNA, 1236 bp, Homo sapiens
tgggaaatatattttaattgggaaataagaacaattagaagtgtaaatactattcaaggtatatctcacttgaaacaaactatcatcttaattaataaaaatgaatttaaactcatttaaagaaaccaaaagcataggaacttggggccatttagtgaaggaatacacacacacaattgttttatagaaaaagtacattgatatttaaggtgcagttattggaaagcttaaaagacagtcacaagaagctgcataagaaggaaggaaaacacacaaacttgttaagacatattttttccccaaatatgcaaaaaattgctttggcaaatacagtgtaataccttaaacatgtggaaaatatgaataaacagtgaagagcacattcatttattaaatgtttatcaaatgcttggacatcagtgtaaagcactttcttgtatatttttcctgttttattctcaaatgaaatgatctgttatcttaatctcctttaatatataaagaacctgagactcacagagataaataacttcctcaaggacatatgacagtaagcaacaaatcagggctttttgagtcttatggttactttgctttctggagagttctgagctgctgagcttttcctataaaagcaaatctcagattgtgttccttattatatcagatttgctttcctctcgtgcttaatcccttgattttggtttcrtattctatttatcgtgttgtatctacttttcactatgtaaaaacttccttccaatgagaaagaaaatcagttttggccttacaattagcatcccaaagctttctagagatcagagttgcatgacattataagttgctgccattttgaatcatcatggaccacggatatttagcaagaataaaggtgctaatctcattttgtcacttacatgttagatttttcagtggttaaagaccagtggttgacacagtgtcaaaattaatcttatgctaattgttttatttatcagcttaagtgattaaactatttgtgtgtgagtgagcatgcaaccttccctgtgaattcttaataacaaaatgctctttttggacacatcattgttaatgattcctctactttcccatcttctaaagactcttctacctcactcactcctacccccatttatgatctcagttagaacgctacacttatgctcacgtcaacctcaaactattaactttaaaacttctccttgtttatatttg

SEQ ID NO: 722700 - DNA, 1236 bp, Homo sapiens
tgggaaatatattttaattgggaaataagaacaattagaagtgtaaatactattcaaggtatatctcacttgaaacaaactatcatcttaattaataaaaatgaatttaaactcatttaaagaaaccaaaagcataggaacttggggccatttagtgaaggaatacacacacacaattgttttatagaaaaagtacattgatatttaaggtgcagttattggaaagcttaaaagacagtcacaagaagctgcataagaaggaaggaaaacacacaaacttgttaagacatattttttccccaaatatgcaaaaaattgctttggcaaatacagtgtaataccttaaacatgtggaaaatatgaataaacagtgaagagcacattcatttattaaatgtttatcaaatgcttggacatcagtgtaaagcactttcttgtatatttttcctgttttattctcaaatgaaatgatctgttatcttaatctcctttaatatataaagaacctgagactcacagagataaataacttcctcaaggacatatgacagtaagcaacaaatcagggctttttgagtcttatggttactttgctttctggagagttctgagctgctgagcttttcctataaaagcaaatctcagattgtgttccttattatatcagatttgctttcctctcgtgcttaatcccttgattttggtttcgtattctatttatcgtgttgtatctacttttcactatgtaaaaacttccttccaatgagaaagaaaatcagttttggccttacaattagcatcccaaagctttctagagatcagagttgcatgacattataagttgctgccattttgaatcatcatggaccacggatatttagcaagaataaaggtgctaatctcattttgtcacttacatgttagatttttcagtggttaaagaccagtggttgacacagtgtcaaaattaatcttatgctaattgttttatttatcagcttaagtgattaaactatttgtgtgtgagtgagcatgcaaccttccctgtgaattcttaataacaaaatgctctttttggacacatcattgttaatgattsctctactttcccatcttctaaagactcttctacctcactcactcctacccccatttatgatctcagttagaacgctacacttatgctcacgtcaacctcaaactattaactttaaaacttctccttgtttatatttg

SEQ ID NO: 722701 - DNA, 1202 bp, Homo sapiens
atcctcccacctcagcctcccaagtagctgggactgcaggcagcacttggctgatttttaaaattttttttgtagagatagggtcttgctatgttggccaggctggtctcaaattcctgggctcaagcaatcctcctgccttgggctcccaaagtgctgggattacaggtgtgagccactgtgcccaacaaaagcagattttaaaatatttacatcatttaatttttgtatcagcctggtttagggtaaacagattgtagggaccaagggaaaacttctccttcacccgctgaaggttcactgaaaaatcaactgacaaaaggcatattaataggagaaaaggcatccaaatttattaatatatatgggagtcctacaaaatataagaactcaaagaaatggccagatggttgacctctttatgccgtctcaaggttacagaaagaatggggcctcagagcatggctaaaaacaggttatggtggtaaatcagtttctaatggcaagacaggttatgggagggagagaagaggagacctggtctgcaaaggtggtcttgttatgtagatgaaaccttgcaggtggcaaccgtcacagagaatagatgggaaatgtttctttcagctctttaaagatgtcactctcagttaatcttttctagatccagacaagggaggaactctaagcctgactgtatcactgctgattttccctcagatgcaaatctcccccaccagacacctttgcagggctgcccatgctcgcaggccctctgaacagccctctcaaaatatgtcaaagaagggtattttggggtgaaatattttggtttctttcagggtgatgagttagaccacaggtgatatgcacacaccagacaactctgaactgtttctcattccaaggtctcgagttcatcgcagggggcaggtagccatggggggcgggcaagaaatggggagggcaggtaggagctcagcgaggttttggtacccgctgcttctctctctcactccctgctgtaacgtaactaattctcgcagacttataaacagtagaaactctyaacagaaaccacttgcaaattttatttctcagtgctttctgtttgaactgcatcagcaacactctggaggcaaatgttcaaaacagagacacagccgtattggctggaaacagggaactatttctatatggtgctt

SEQ ID NO: 722702 - DNA, 626 bp, Homo sapiens
gttggcccctcatgcgctgacaggtgtgtctgactcgggccacacagcactggccagggctgcagagggagctcagagggccagcacagcgactggtggaggaagcctggtatgggagcatcgctaggcgaggctgtcagcacttggtgtctgtgygttctgtctttaataaagtctcatggtgacccagctctggtctctgcctccagccggactccaagcctcgtgtcagagcttgagtggatcagatacccacgtgttccaggactgcctctcgctctgtctcccctgaactcctctcatcatttatttttagagacggtcttgttctgtcacccaggctggagagcagtggcaccatcactgcccactgtggcgaactcctgggctcaagcgatcctcccacctcagcctcctgagtagctgagactacacgtgcgcactaccacacccagcaattttttttttctactttttgtagagacggggtcttagctatgttgcccaagctggttttgaactcctgggttcaagccaccctcccgcctctgcctcccaaattgctgggattgcaggcatgagccactgcacccagccaccattttcattagagcagccaaaaggca

SEQ ID NO: 722703 - DNA, 622 bp, Homo sapiens
attcaaaacactgccattcaattaaaagcagcccagaacatggcacgactggttcttggaataccaatctgcaatctctgatcttgtccaactctctctgctccccattttacagatcaggaagctgaggcccagagaggcctagggacttagccatggctgcagcagttgttattgggaatgccatgaggccaggatgcctgttatgtgttctttgcccagcctagcagtttggctggcttggctatgccagaggtctcaccatgcagttctcaagtgcttcctgagcrtctctcatttgcatagacatgacatttacaaacacatccatcatctacttgattctggcaatgacaccgagggagcagaactggcattaatccattttttttaatggtgagaacactgaggtttggagaggctggtgacctgccaaagtcacagtcctagaaagggctgcagccagggcctccaattacagatcaagggtttttccacccccaaactcagtcatctcgtaaaaacgtcaggctccttggggaatacagcttgagatggataatcaactcctcctaaaagggaaccataaatggatgagatacttgggtaaactgaatattct

SEQ ID NO: 722704 - DNA, 642 bp, Homo sapiens
gataattaagttttagaaatctgctgcacaacattgtacctaaagttatcaatattatattgtacacttaaaaatatattaaaaggcctggcatggtagcttatgcatgtaatcccagcactttggaggctgaggtgggtggatcacttgaggtcaggrgtttgagaccagcctggccaacatggtgaagcctcaactctaccaaaaaaaaaaaaaaaacgtatctgggtatggtggtgcatgcctgtagtcccagttacttaggaggctgaggaaggagactcacttgaatctgggaggtggaggctgcagtgggccaagattgcaccactgcattccagcctgggcaacagagcaagactctgtctttaaaaaaaaaatctattaaaacgatacattttatgttaagcggtcttacttcaaaaaaaatagaatattaaaaacaaaacaaaaccagaagaatgtcattgttgtttaatgtttgattcctgatagcattcaagtcccaccacacctcctttgtcttctggcccccatcaagctgataggaatgtcagtgttccctcctttgtagttgatagaaagttcaagccacacaaacccaaacccatgctcaggaaacattatcccagacctaattca

SEQ ID NO: 722705 - DNA, 642 bp, Homo sapiens
gataattaagttttagaaatctgctgcacaacattgtacctaaagttatcaatattatattgtacacttaaaaatatattaaaaggcctggcatggtagcttatgcatgtaatcccagcactttggaggctgaggtgggtggatcacttgaggtcaggagtttgagaccagcctggccaacatggtgaagcctcaactctaccaaaaaaaaaaaaaaaacgtatcygggtatggtggtgcatgcctgtagtcccagttacttaggaggctgaggaaggagactcacttgaatctgggaggtggaggctgcagtgggccaagattgcaccactgcattccagcctgggcaacagagcaagactctgtctttaaaaaaaaaatctattaaaacgatacattttatgttaagcggtcttacttcaaaaaaaatagaatattaaaaacaaaacaaaaccagaagaatgtcattgttgtttaatgtttgattcctgatagcattcaagtcccaccacacctcctttgtcttctggcccccatcaagctgataggaatgtcagtgttccctcctttgtagttgatagaaagttcaagccacacaaacccaaacccatgctcaggaaacattatcccagacctaattca

SEQ ID NO: 722706 - DNA, 628 bp, Homo sapiens
cggcctcccccattatcaacaccctgcaccctgaatagtgcatttacaacagtgatgaccctacacggccacaccacgagcacccgaaccccacacggccacaccacgagcacccgaaccctacacggccacaccacgagcacccgaaccctacacggccacaccacgagcacgcgagcgctgcacggccacagcacgagcacccgagccctgmacggccacaccacgagcacccgagcgctgcacggccacagcacgagcacccgaaccctgcacggccacagcacgagcacccgaaccctacatggccacagcacaaccgccagaagtccgcagcttatggggggcccctcttggtatggcatgctctgtgggttttgataaatgaatatccactgtgcatccactgttacagcaccacacgcagcagcttcactgccccaaaagggccctgtgcaccacccattcatccctccctccccaccaccactgaccaccacggaaccctttcctggctccatggtgctacctgttccagaatgtcatgcggtgggaccccacagcgtgcagccttttcagccggcacctgtcacttcgcagaatgctgttaaacttgctcacgtctttt

SEQ ID NO: 722707 - DNA, 628 bp, Homo sapiens
cggcctcccccattatcaacaccctgcaccctgaatagtgcatttacaacagtgatgaccctacacggccacaccacgagcacccgaaccccacacggccacaccacgagcacccgaaccctacacggccacaccacgagcacccgaaccctacacggccacaccacgagcacgcgagcgctgcacggccacagcacgagcacccgagccctgcacggccacaccacgagcacccgagcgctgcacggccacagcacgagcacccgaaccctgcacggccacagcacgagcacccgaaccctacatggccacagcacraccgccagaagtccgcagcttatggggggcccctcttggtatggcatgctctgtgggttttgataaatgaatatccactgtgcatccactgttacagcaccacacgcagcagcttcactgccccaaaagggccctgtgcaccacccattcatccctccctccccaccaccactgaccaccacggaaccctttcctggctccatggtgctacctgttccagaatgtcatgcggtgggaccccacagcgtgcagccttttcagccggcacctgtcacttcgcagaatgctgttaaacttgctcacgtctttt

SEQ ID NO: 722708 - DNA, 650 bp, Homo sapiens
cataaatttacaatgtatctgtcttaactttgcccctatattttgtgaagtgaaaacatttcaatttcaggagctaagcaattacagtgtccagtcactttgcaaataagtctgctttgtctgaccacctgaatacacaagtccatcattcttaaaacgaaatctttgcctcaacatttcttttgttggctttatactagttagttactttttgtcagctcttgtcttgatawtctcctttactttggacacttattgcttcctctaagatttgaatcttaccctgtccttatcagtatttcttaaaaccttaaaaatgtaccctcaaaatcctgtcgcatcactggaatcttgatgcctgctgttgggcccactgacactattcacttgtctggatctttgaagcttattggtcctatgtcagtgttccctactcatctgttaaaatgctcactagttgtctttggctgaattttgcctattattaccagttgctattctatccaaattcagatcctatttgtccagctggactggctatggtgtatgaaatcacgaatcttggttcaatgtttagttctgatactgacctagctgaatttgttaatggtattgagctttattttcttcaccttcaatatggggacaga

SEQ ID NO: 722709 - DNA, 650 bp, Homo sapiens
cataaatttacaatgtatctgtcttaactttgcccctatattttgtgaagtgaaaacatttcaatttcaggagctaagcaattacagtgtccagtcactttgcaaataagtctgctttgtctgaccacctgaatacacaagtccatcattcttaaaacgaaatctttgcctcaacatttcttttgttggctttatactagttagttactttttgtcagctcttgtcttgatattctcctttactttggacacttattgcttcctctaagatttgaatcttaccctgtccttatcagtatttcttaaaaccttaaaaatgtaccctcaaaatcctgtcgcatcactggaatcttgatgcctgctgttgggcccactgacactattcacttgtctggatctttgaagcttattggtcctatgtcartgttccctactcatctgttaaaatgctcactagttgtctttggctgaattttgcctattattaccagttgctattctatccaaattcagatcctatttgtccagctggactggctatggtgtatgaaatcacgaatcttggttcaatgtttagttctgatactgacctagctgaatttgttaatggtattgagctttattttcttcaccttcaatatggggacaga

SEQ ID NO: 722710 - DNA, 817 bp, Homo sapiens
ttatcagctttcccacctgcatgaggagccccaagtgaccagacagcagtcacagcatcaggttaaatgaaactcctgctttgctccctgttggaagaatttccccctgggaacttagatttcagtagaacataaagttgtgaagagataaagacaaaattcttccaataaagtcacggttgagggcatgcattcctacttccactcctcggttctcgtgcccatgcattgtagctcctggaatgcagcaccacctacagcttcatggtttgcttcctgtattataccttaatcagacagcatcccaaacacacaggttgtatggccctctacactgaaccttaataggccattttatcattctgttgagcggccttctttctggatattgtggtgacctgtgatcatgagcctggtatctgttgtagaagatcctgagtatatgttaagaaagattctgaattgctaaatcaaatatttcataggccctcaagtggtggtgctgccagaagtgctgcttgcagggaaggcaaacttatatgcagaataggtataaattctagtaaggatgaattgctgtcccctctggactagaagggatctgatgtaatcaaacttccatcaactggctggttgatcttcttgacaagtggtgccatattgaaggtacagctgctgagctgttgggcatccatcaattgaatcacctaaattcatcytggtacagattgttggacccatgcatagtctccattcttgccaccatggatattctctttatgggctgatcgtactagcactggagggggcaatgaga

SEQ ID NO: 722711 - DNA, 2005 bp, Homo sapiens
tgccatatacataatatatacattttatatttctaaatatgatttataaataagtatattaatatatgaattatatacaatgcatatatatgatgatgtataatgcatatattttaatggtatatttctgttatattaatatgttataataatatgatattatatattatataatacactatatataatgcataatatgctacatatattatataacctatataatagggcaaaaatcatctatatgctattcttctttgtcaaaaacgtcttagatattctcagctctttatttcccagatgaactttagaatcattttgtcaaattctaaaataaaaagggggggaataaatgtcatctttataatattcagtgttaccatcaacacttgcttcttctatttatttaaattttattttattattatcaggaagatgttgtcatttcctccatacctgctacagacatttttgttttaaaatttccaaatattttatgtgttgtttatattgtgaatgaaatcaatttctttttctataatcaagttatatgtggtcattgctcttatatagaaaagctattgagttttcggttgattctcttaggactgtacacatatatattcctatttttatcaaattaaaatagatgtccycttttcactatttatggctatttcatatctcataacactaagcaaaataatacttaacaatagtgatataaggcattcttgtcttagccttgattttaattggaatgcttcttgcatttcactgaagtaagatatttgaagcatatttggtgttggtttaagagagattagctttgtcaggtaagaaacttccaattcatccaaaaaaattaaaccagaaatggctgttgtattttatcagttgttttctttttttctttcgagttaacctaaagtatcgtgcagataagtttcctaatagtaaagcatcttcggatccaggaatattctgagttaactgtcaagccgaatttgggtttcagaatatcttattgagtattttgcattgatacctttataaataaaactagtttacaagttttttcaattgctctgttgtgggttaatatcaagacaattggcttataaaattattccagtccttttcaatatttttttatctctggaataatttatgaagcataagaatatgtgtcttttgaaaatttgagattatttactagtaaaattatctgtactagcagccacatattttctttctttttcctcttggagggatttttaaataattttataattttactatagtagtaccctacttatttattggtcaatttggatcattcatcttttcttataaattcatctatatacaagattttcaagtatatccgaatggaattgtatgttatattattttatcactttaacatccttcatattcattgttaaatcttctatctcactcatgctttttttcccctattttatgttgtttagatttagcaaatatttattttattggctttctttttcaaagacctgttacaattatcaacttaaagaatttgatttcttcttttattttcattatctttctacccaatgtctttaagcttcttgattttcacacttttgtgaatttatttatccgtttaaaaaataatgagagaatgtaaggttatgagtttgttctatcttgtgaattatcatattcatgttttaatacttttaaaattaataaatagcccatcctgtgatgttattttattctttgacccaacagttattttggagatgttttaaatttagtggagggtttttacaaatttgttctctattattaatttttaattgtaaccgattatggaagagactgtgtttttgaattcttttttgggagaatttattaaggcttgttttatggtcagcttttaaatgatctacagatacgtaagatcaaagtatcttctatgtttataagggagcctaatatataaattaaacat

SEQ ID NO: 722712 - DNA, 651 bp, Homo sapiens
cattctcaaaaggtaggcaccgtcaaagttttgacatctttctagacatttttcaaagaacattcaggcacatacgttatttcttttcacaaaaataaaatcataytttacatattgatccataactttatacttaataattcatcagacttacctttaatctttaaacctctatagaagttttcattttatgactatttcagcatccattaaatcattgccctattgttggacatttagattgtcttatatttttagcgattacaaataaagttccttacatatatatctttacacatttgtgcaaatatttctataggatgtaaatctaaaactacgagttgaaaatattttaattttgatagttattgtcacattgtaataatagttatttgccagttatttgtcactccaaattgcttgtcccaattcactctgtaccagaagtatatgagttctgttcctgcatattctaggcaaacctggacttttttaatgtttaatatttggtaatttgacagagaaagatggaatctcatttttaatttgcatcttcctaatcgccagtgaagatgaacatcttttcatatgcttattaggtattagcattttattcttttgtgaactacttcttcatattctttgcttttg

SEQ ID NO: 722713 - DNA, 1465 bp, Homo sapiens
taacactattctcagttgtagtatttgggttactatttttctcactcttcttaggctttaattaaccacttttgaatcactggcttattatttgggttgaggatattacacatcacaaaaataataaccaaaaacccataagtgacatgaaaatatgtctctggagatgatctgcccaagctggatcagccaaattcaaattagaggatgcacaaygttggagaatgtgacagttattaagaacaaaatggggctgggtgcagtggctcacgcctggaatctcagtgctctgggaagctgaggcaggaggattacttgagcccaagagttcaagaccagcctgggcaacaatgtgagagcttatctctaaaaaaaatttaaggattagctgtacatggtggcgtgcgcctgtagtcccagctactcaggaggttgaggcaggagggtaatttgagcccagttcaagactgcagtgagctatgatcacaccactgcactccagcctgagggacagagtgagaacttgtctctgaaataaatagatagatagatagatagatagataaatgtacaagatgggattgttgcaagaatcttaatcaattaatcaattttgcatttcagatttatgagtagagcaattccatcctttttttccttagaggtttcctatggaccacttgtatacctttagggacccccccagtggtccatgaaccacactttaggaaaattctatagccattaagtctgtcgtctgaaccatgaaatgtagttgggtggggggaattgtcctgttaccctggtctctggccacctagagctggaagagtgcatccttggctgagtgacatgttaagtgggagggaccttgatagacacataaggggcatcaagagagacccaggacatgtaatgagcagaaacctggacagctcagtctggaggatattcatgggatgatgtaggatctgtcaggactcagctcatgatgggcggctctggtcccctgatgtcccttggttaggtgttctgtttctaccagggtcctgtagcatgcaataagctggttttgactagtaaataaccccccagaactctagaggtctgcattgtaattctcctattgtggtgtcagcttttcttgatgtcacaaatacccccaatgccatagggtctgtgggtcttaagggccaagtggcaggaccatttgcaccacacctggaactgttgaacagctctttcttgctctgtgtctcattcaaatttgacagcctttaatgtcacctgtaaaacatattcccaaaggtagaatatgttttctccagagtctgaggaggcctaccagatgagctttcttatctgctgggcaagaatttctccttttctttggaggggatgtctagtcatgcttctgactaccaaaccactaaagatctcactgatgttagtaagacactaaatc

SEQ ID NO: 722714 - DNA, 640 bp, Homo sapiens
ttggaagtcggaggcttgatacagatggtgggatgggtggaggtgggatggggaagagatcattatgtccagccccctgcctccgtgcggcttctcctccccctgtagattagagcgttttctgggtcgggaaggggaggacgagatggagctcgtggccttgggttccctcctgcgtcgccccctgtaactgcgtcccccagcacgcactgctgacgcgcatccccagcccggggcggcgcgctccgcaggcatcccgcccccgactcccgctccgtcccaacatcgcgcaggcgcaagaccggrctggcgccagcgaacgcgccctctcgtggcggactggccaggtcgcagtctttgttgttgcgctggaggcggcgtacgggacaggggagaaagatgtgggtggagtctgggaggcagatgcgagaatcagatcacaatgacgagaagccctttcctttgtccctcacggcaacgtatagatgcagataaagaaaacacggcctcagacctcaagagacttagagacaggtgcacagaaactgaagctgaatgagacacactggacagcagtcattcgttcattcagcaaacattcactgggatggggagatacagggacaaaggaccagagggc

SEQ ID NO: 722715 - DNA, 590 bp, Homo sapiens
agttctctctctcccatgctaaagagtcacgactctgagagctaggactgtggagacggtattcagtttcttgtcttggctggtggctgccacagtggagaataaactgtgamtaaactcctcactccccaactatcaatcaaaatttcctgatttcatcagcaattgtagtggtctgggcccacagtataattacagaaattagtccataatctcaaaagagataattatcttgaataaaaaatataaattataacaatgactgtggcactcattgtcatgatgtttacttcaatcagataggatatgattttacctctgattagcacttgtgggtattgttgcaacactatctacaaatcactgtaaaatgggcaaaggtctctcctactccttcctgactcttccattgtgtaccttgctgcgtccctctaccctagccacaacacatatccaccctacttgtgataccagaagtatattcctagaacataatcaaatcatggtcagatttatttattatgtaaaatatattcagtggtttataattgattgattgtgcaatgaagtccaagtgccatgacctggta

SEQ ID NO: 722716 - DNA, 590 bp, Homo sapiens
agttctctctctcccatgctaaagagtcacgactctgagagctaggactgtggagacggtattcagtttcttgtcttggctggtggctgccacagtggagaataaactgtgaataaactcctcactccccaactatcaatcaaaatttcctgatttcatcagcaattgtagtggtctgggcccacagtataattacagaaattagtccataatctcaaaagagataattatcttgaataaaaaatataaattataacaatgactgtggcactcattgtcatgatgtttacttcaatcagataggatatgattttacctctgattagcmcttgtgggtattgttgcaacactatctacaaatcactgtaaaatgggcaaaggtctctcctactccttcctgactcttccattgtgtaccttgctgcgtccctctaccctagccacaacacatatccaccctacttgtgataccagaagtatattcctagaacataatcaaatcatggtcagatttatttattatgtaaaatatattcagtggtttataattgattgattgtgcaatgaagtccaagtgccatgacctggta

SEQ ID NO: 722717 - DNA, 1748 bp, Homo sapiens
  misc_feature 2, 3, 4, 5, 6, 7, 8, 9, 10, 11, 12, 13, 14, 15, 16, 17, 18,19, 20, 21, 22, 23, 24, 25, 26, 27, 28, 29, 30, 31, 32,33, 34, 35, 36, 37, 38, 39, 40, 41, 42, 43, 44, 45, 46,47, 48, 49, 50, 51, 52, 53, 54, 55, 56, 57, 58, 59, 60,61: n = A,T,C or G
  misc_feature 62, 63, 64, 65, 66, 67, 68, 69, 70, 71, 72, 73, 74, 75, 76,77, 78, 79, 80, 81, 82, 83, 84, 85, 86, 87, 88, 89, 90,91, 92, 93, 94, 95, 96, 97, 98, 99, 100, 101: n = A,T,C or G
tnnnnnnnnnnnnnnnnnnnnnnnnnnnnnnnnnnnnnnnnnnnnnnnnnnnnnnnnnnnnnnnnnnnnnnnnnnnnnnnnnnnnnnnnnnnnnnnnnnnntgtttcatggtcagaactgtatagtatattcctgttttggagattcacaatatgcattagcatatttaaattttcaagagactctacattaaagaagtcttgttggtatgttttccaagctttttcccacagaattttcctgctaggaataaatgattccatcaagtatctgctaaggaaagctctttaacatgtcatatgaagccttccatgatctggctctgctggattcttcagccatcattcccctgactccacatgtcccactctattctttactcccactgaagcactttctcagcatttggccctagctgaagctgctgcttcccccttctatcattcttcaatacttgtttcaaaagtcacttcctgcagaaaactttttctaacccttcctatatgtttccatagccttctccatgcttgcctcttttattattacacttaccacatttttactgaaagtaactatttaatgaatctttctctccccctaccaaacctcttgaaggaagtggttatgtttctttcgtctttgtacttccagcataagcacatgctatggcctgaatgtttgtgatcctcccagattcatgtgttgaaacttaatctccaatgcaatgtattaagaagtgggcctctgggaggggtgataggtcgtgagggctctgtctttataaatgggattagtgcccatataagaggcttgaggaaacctgtctgccccttctgcacatgagaactcagtgagaagaccatctctgaagcacagagtgagccctcaccaggtaataaatctattggcacctttatcgtggacttcccagcttccataactgtgagcaataaatttctgttgtttagaaattaaccagtctatggtatttttgttataacagcccaaacgaactaagacagagatatacttgacatttagtaacgactgaaatgaaataaatagtgcctggctcatgtagcaggtacccataattaaatgccatggacattagttattaataagtcataaaaggttttcctcaaccataagcaactatttgaaagtttttgaatataaaatcaatgcgtccaattttgactttatatctcatgtattcaatgagttcttataatcaccacagtgccttcacaaatgttgtggtgctcctttcacttctctgatagcacatacgatgttgttctataaatctgaaaagttgcggcatttcattgagtttatttttaagcaaatatttgagatggacagaactgagtaggcaaaggaaagaggatgtggtcaaggattccctgawttggttcataaagggatatagtgaggtaaattaatgctgacacagtgccctctgtcaaaacagcctgctggcctaggaaaatgatcacaagcagcatatgtgctggttagggaagagaaaagcagtccagatggctgatttttaagcagccagacttagaaagaaaaggggaaaatttgtatccaggtcattcctaactcttctcctgggagatcatctaaagttgttgcttttaagttcccaggaattctgccgataaatactcactacctcattgtaaagctgtgagcaaccccttaaaactggagactagatggatgtttactaaaaagta

SEQ ID NO: 722718 - DNA, 920 bp, Homo sapiens
gcagaaatgtccccattttgaaaactgtgaagaactcccaggatgtctaattaaaatagggtatggataatgaaagtgatcccataagtgtgctggtggagagctgcttccacttacttttctgtgcaaacccaaaccatcactatcacaaagttccaaaaaccatgacctcagcaacatgtaattgttaggtactcactatgaatttcttaaaccacacagtatgaattcttttagcaaattaggccccartgattttactaagcaaaatgtcccactgtagaacatcatgtgaattttagagctagaggagctcagaatggggaaaatggataataatacgaattaaaaggaagaagttgaaattcctagttaaataatcattataaattatatctttcaagtaaaactacaactattgatttccatggtgtgtgtaaacaagacaatacaaacgtgttttataaactgactataccttttttcttaatttctctatatcttttaaacaatatttacatgctgttcattttgttttatttaattttccatatttaccttgtttttcatatctagagtatgacaatctagcaactctttatttctggtaacattctaaaatgttttatttggaaccacttattatggcagatgataaaaatctaggctcagttttatcacctccacctaactcctaaaatagatgacataaattcaataagaatctaaatctacttatcttcagggtacaatacaaaatccatctacttattcaaatttttgattaacagcattcatatttatgaaatgctctgggctttgcaggtgaaaatatgtgaaactcaagtatcattaaatattctgtgatgttatcacagtgttttgtgtgcatatgtgctaatgttcaataactttaccct

SEQ ID NO: 722719 - DNA, 973 bp, Homo sapiens
tctccacaggaaaacaaccagggatctaaaagattctgaagattttggtaaatgagatatggttgaaaaacctgggcaagagtggagagcaaaaatttagtgagcataatactatctttcaaaatgcttgtaaccaaacaaatattagaacataaataaaatattccaggcctaaatgatatttctgaatcctcaactataatgagtrtaagttctgtgccttctaagtcttcgtagcatcttgagtctgtaaagttattgctaataacaatgttagaagtaacatcatttccaatacttcatatatgtatggctatttaaagtttatatccttgtatatcacattgttcaagcttcctgatcctatgagattggcaaagatggtattattattgtctttttacaaataggagagcagaaattcaaaaagtttattctgtacctagaagattactgaataaacaacataaaatggggaggtgctaaagctaaactccccaatcaggttagaaaatgtagatggaagactaaaacagacatcaccaaatattttatagaacatcatctcctttataattctcagaggaaggagagcttgggggagtgggatataacagcttaacagcttcaaagcactttacatttggaaatagttgcctagcattttgctttagctgttagtgctcaatttacctaatttttctgttaagtgcttcaatcacatgtaaatgtgttatgaatatagctcataaaatgtctgaggggtggtgttctataataaaacaaccccaaatgggaagaattctaaaaacgaaaaaatattcctttccatttcattggtttcagataaatgccttattcttagaaaaacaaaaaaacaaaaaaagagagaaaaaccccaagcatctgtgaataattcaaagtactaaatggcatgaatagattcatattttaatgttatactttcctttta

SEQ ID NO: 722720 - DNA, 973 bp, Homo sapiens
tctccacaggaaaacaaccagggatctaaaagattctgaagattttggtaaatgagatatggttgaaaaacctgggcaagagtggagagcaaaaatttagtgagcataatactatctttcaaaatgcttgtaaccaaacaaatattagaacataaataaaatattccaggcctaaatgatatttctgaatcctcaactataatgagtataagttctgtgccttctaagtcttcgtagcatcttgagtctgtaaagttattgctaataacaatgttagaagtaacatcatttccaatacttcatatatgtatggctatttaaagtttatatccttgtatatcacattgttcaagcttcctgatcctatgagattggcaaagatggtattattattgtctttttacaaataggagagcagaaattcaaaaagtttattctgtacctagaagattactgaataaacaacataaaatggggaggtgctaaagctaaactccccaatcaggttagaaaatgtagatggaagactaaaacagacatcaccaaatattttatagaacatcatctcctttataattctcagaggaaggagagcttgggggagtgggatataacagcttaacagcttcaaagcactttacatttggaaatagttgcctagcattttgctttagctgttagtgctcaatttacctaatttttctgttaagtgcttcaatcacatgtaaatgtgttatgaatatagctcataaaatgtctgaggggtggtgttctataataaaacaaccccaaatgggaagaattctaaaaacgaaaaaatattcctttccatttsattggtttcagataaatgccttattcttagaaaaacaaaaaaacaaaaaaagagagaaaaaccccaagcatctgtgaataattcaaagtactaaatggcatgaatagattcatattttaatgttatactttcctttta

SEQ ID NO: 722721 - DNA, 643 bp, Homo sapiens
cagtgccctacaactgaagtaacagctataaagtggagactaactcaggattgagagagacaagatctcccgtctctgaggaggaagtccagaggcttccaactgtaagaagcagagagtccctcatggctcaatttcactgtgatactcctggggaaagtaggaaagttaacagcacatgcatgagagctgggtcagcttatctagactctggtttccacttttcaatggaatattaattggattcatttaaaatcatgcatgtcttgctgaaatattaaatcataatccatgtgattgtggtcagcaatttcagtggggacccctagtgcaaaaccgaataggatgcctctccttttcctttctgttatgttaaaggactgcaacattatgttatatataaagtttcagtgccacaaaagaaatagcactcaaatataaaattttctttttaattctcagcaaggcaagttacttctacagaagggtgcgcccttacagatggagcaatggtgagcgcacacttggacaagggagggaaggggttcttatccctgactcacgtggcccctgctgctgtgtcgttcccctgttggctagggttagaccgcacaggctaaactaattccrattggctaattta

SEQ ID NO: 722722 - DNA, 1647 bp, Homo sapiens
tacaaagagatctacttgaacagtataaattgagacagaggtaaaagaaatagcatgcacccttatcattaccagtttttgttttcactcttcatggaatttaatgtttgagtgagctgaccctctattcgctgcattatgtctcagaacccgggagaaacagcatgaggccagaaggcaatcactgaggttcctcagaactttatcaacaacttttgcaaactatatgtgagttctgctttaattatgrtaatcagatctcaaatgaaaaatcatatcaaccctaaaaggcttgcttccccccagttgactactagttgaaatactttgagtagtatagacctaagtttggagatgaattcacctccagcttgaagactacggctttgactcacacttattcttttctgaggagaaagagagagacatataacattatattcagagttgttgaaatttcgaagggaaagacaagacatcacatacttcccctattttgaaggagtcctcttctctgaatgattggctcactcaaatccatagcagggaaatggccaaagataaactcaggagtttggcaatagagctgccaattactataactaatatttatgagacatgaagataaacctcaggacaagaatcattcagtcaatacaaaaatggttgaaaataatttttagctactttgggatgcttgatatgactttatctactggttagtaagattactgtttattatgtgagtgaacagtaaagaataaagacacagtggtaaaggagaaaaggccttgaacctcaatgagtggcaaagtatcaatttatttcaactgtgcaaatctcttaaagtagactttttcatgaaaactacagagtcccaagatttggtggaaagaaaattggcttctgggagatggacatgggggtggtgagcggaaacctgccacaatccctagtcaacactgcctgagaagcaccatttggcctccctgggtagggttgatttatcctcccactggattcccttattttttatcatccacataccagcctttctcactgggttgtaacccccttgaaaactaaggctgtatcttatttagaacagatgagcccttaattaaaatgtgttgaattgaattaatctcagttccatcacactgatattcagactgacacattctggagcttcccaaaaagtcatcatgttactgtaaaaccatccttaagacaagcttgcctgctcctaggccagctgcaaggaaaagtcctagagacttgaaagtgcctgaagctccaattggttataatgtggacactctcagagccaaaggacatcaaaagcacccagaaacacaggcacccatattctgcctccattattattaaaaataaagttggggaggggagtattgaatgagaggtgaaatgaaattagaagctgaatctaaaagagaacctatattttaagtaagatgagctaatttcttcaggtgcttaggtcatactagaatcagccacaaggaaatatctttcctcctggtgtttgctgatgagaagtaagtgaaaacgtgtcttggattgtttgcaattaatttgtcacagagctacaggaacaaagtaaaattcatgccaaaggacaactaa

SEQ ID NO: 722723 - DNA, 1647 bp, Homo sapiens
tacaaagagatctacttgaacagtataaattgagacagaggtaaaagaaatagcatgcacccttatcattaccagtttttgttttcactcttcatggaatttaatgtttgagtgagctgaccctctattcgctgcattatgtctcagaacccgggagaaacagcatgaggccagaaggcaatcactgaggttcctcagaactttatcaacaacttttgcaaactatatgtgagttctgctttaattatgataatcagatctcaaatgaaaaatcatatcaaccctaaaaggcttgcttccccccagttgactactagttgaaatactttgagtagtatagacctaagtttggagatgaattcacctccagcttgaagactacggctttgactcacacttattcttttctgaggagaaagagagagacatataacattatattcagagttgttgaaatttygaagggaaagacaagacatcacatacttcccctattttgaaggagtcctcttctctgaatgattggctcactcaaatccatagcagggaaatggccaaagataaactcaggagtttggcaatagagctgccaattactataactaatatttatgagacatgaagataaacctcaggacaagaatcattcagtcaatacaaaaatggttgaaaataatttttagctactttgggatgcttgatatgactttatctactggttagtaagattactgtttattatgtgagtgaacagtaaagaataaagacacagtggtaaaggagaaaaggccttgaacctcaatgagtggcaaagtatcaatttatttcaactgtgcaaatctcttaaagtagactttttcatgaaaactacagagtcccaagatttggtggaaagaaaattggcttctgggagatggacatgggggtggtgagcggaaacctgccacaatccctagtcaacactgcctgagaagcaccatttggcctccctgggtagggttgatttatcctcccactggattcccttattttttatcatccacataccagcctttctcactgggttgtaacccccttgaaaactaaggctgtatcttatttagaacagatgagcccttaattaaaatgtgttgaattgaattaatctcagttccatcacactgatattcagactgacacattctggagcttcccaaaaagtcatcatgttactgtaaaaccatccttaagacaagcttgcctgctcctaggccagctgcaaggaaaagtcctagagacttgaaagtgcctgaagctccaattggttataatgtggacactctcagagccaaaggacatcaaaagcacccagaaacacaggcacccatattctgcctccattattattaaaaataaagttggggaggggagtattgaatgagaggtgaaatgaaattagaagctgaatctaaaagagaacctatattttaagtaagatgagctaatttcttcaggtgcttaggtcatactagaatcagccacaaggaaatatctttcctcctggtgtttgctgatgagaagtaagtgaaaacgtgtcttggattgtttgcaattaatttgtcacagagctacaggaacaaagtaaaattcatgccaaaggacaactaa

SEQ ID NO: 722724 - DNA, 1647 bp, Homo sapiens
tacaaagagatctacttgaacagtataaattgagacagaggtaaaagaaatagcatgcacccttatcattaccagtttttgttttcactcttcatggaatttaatgtttgagtgagctgaccctctattcgctgcattatgtctcagaacccgggagaaacagcatgaggccagaaggcaatcactgaggttcctcagaactttatcaacaacttttgcaaactatatgtgagttctgctttaattatgataatcagatctcaaatgaaaaatcatatcaaccctaaaaggcttgcttccccccagttgactactagttgaaatactttgagtagtatagacctaagtttggagatgaattcacctccagcttgaagactacggctttgactcacacttattcttttctgaggagaaagagagagacatataacattatattcagagttgttgaaatttcgaagggaaagacaagacatcacatacttcccctattttgaaggagtcctcttctctgaatgattggctcactcaaatccatagcagggaaatggccaaagataaactcaggagtttggcaatagagctgccaattactrtaactaatatttatgagacatgaagataaacctcaggacaagaatcattcagtcaatacaaaaatggttgaaaataatttttagctactttgggatgcttgatatgactttatctactggttagtaagattactgtttattatgtgagtgaacagtaaagaataaagacacagtggtaaaggagaaaaggccttgaacctcaatgagtggcaaagtatcaatttatttcaactgtgcaaatctcttaaagtagactttttcatgaaaactacagagtcccaagatttggtggaaagaaaattggcttctgggagatggacatgggggtggtgagcggaaacctgccacaatccctagtcaacactgcctgagaagcaccatttggcctccctgggtagggttgatttatcctcccactggattcccttattttttatcatccacataccagcctttctcactgggttgtaacccccttgaaaactaaggctgtatcttatttagaacagatgagcccttaattaaaatgtgttgaattgaattaatctcagttccatcacactgatattcagactgacacattctggagcttcccaaaaagtcatcatgttactgtaaaaccatccttaagacaagcttgcctgctcctaggccagctgcaaggaaaagtcctagagacttgaaagtgcctgaagctccaattggttataatgtggacactctcagagccaaaggacatcaaaagcacccagaaacacaggcacccatattctgcctccattattattaaaaataaagttggggaggggagtattgaatgagaggtgaaatgaaattagaagctgaatctaaaagagaacctatattttaagtaagatgagctaatttcttcaggtgcttaggtcatactagaatcagccacaaggaaatatctttcctcctggtgtttgctgatgagaagtaagtgaaaacgtgtcttggattgtttgcaattaatttgtcacagagctacaggaacaaagtaaaattcatgccaaaggacaactaa

SEQ ID NO: 722725 - DNA, 589 bp, Homo sapiens
  misc_feature 490: n = A,T,C or G
tctgagtgtgtatgggaaattttattagtctgtgataccaaataatttgagttcaggaattttagccactgctgctgctgctggaagtatagatggattaggtaagggctagaagtgttcaacaacttgctctaggtctcggcttggagcatgggtcccctgactcccaggccaggtctctccagctcgttgtgctgtcacagaaaccacaaaatatctgcttttcccttttctttgccaaatccaagagtgagaagctaaattgcgcattaaaattctactcaccaattcatgataaagcattaaaaatttaaattctatcccttttgtcaagcacctttccttttattaattatctaatcccaacagactcgattgataacccttgttacatgaatcttcagcttattgatracatccatctgggtactatcgtgcatatgaaggcaagtgtatttaaaaattattagagcatttaaaattagggtanataaaactagcccagtctcagcagaattgtgagaaatcatgaggggagataatacttttcatggtaaggttaagaagattcactccagcactgaggcta

SEQ ID NO: 722726 - DNA, 579 bp, Homo sapiens
tatgtaagatgtattctaactcagaaaaaggagaaatcacacaaaattgacattagaaaagagatctgaaatatttagaatctgaaactagtgaggatgaattactgtgtttccaattctaaaaggtaggatgatgtgtgtaaattcatggaaacggaaacacagtttttktttgtttgtttgtttgtttgtttttgttttttaattgtgtggctcctatgggccaggcattttttcagattgtattgagttgaagaatggccctccaaaatagatgtctaagtcctaacccctgataccggtgaaaatggacttctgaaaataggttctttgcagatgtaattaacttgataacctccaaaagagaccattctggatttagggtgaaacctaagtccagtgactgttatcattatagaaaaaaacaagaggaagatttgagacagagacatccagggtaagacagagggaggaagagattggatttatactgctgcaagtcaatgaaagccaagggttgccatcagccaacagaagctagcagagaggaagaaggtggatttcccctcagagcctcca

SEQ ID NO: 722727 - DNA, 646 bp, Homo sapiens
tgtagccctgttacccctgtacccccaagtgacgtccagtcaacttccagaagcagagctgtcagctgtgtgagcgatgccaccctagatcatccagcccctagctgagcctccagctgaaggcacacacgtaaagaagcttagcctggagcaacgaaaccagactcaaattagcagaaccacccagccagcccctggactcataagcaataatagatggttattactttaagccactaatttaagggagggttggtttgttatgcagcaaaagctaccagacacagggtgaaatggagaagagataagaaatgcattgtyctatgtaacaaaaagattatatgctaatcatagtatctgacacatcacagggccacttctcttctgacaaaggcacccctttctcctttcttctgggttgatgcagccccacataaagatgcatgacttgccacgtggtgcagataggatacagctcctactttccccctcagtcagttacccttgtgcatggcacaacttgctcaactgcaagcagcctccttgcatgccatcaaagcgtcttcttttgccctctctaggcagcaatactgtactatgctataccccaacacagctcactggacaagaacttggtacctgacca

SEQ ID NO: 722728 - DNA, 805 bp, Homo sapiens
tcctgatcccagggaaattatggatgctgtatatgttacggtcccagggaaatacatgtatggtaagagccacaaaacccacaagagattgctctaacaatggatctcaactctgcctgaaattccgtgttctattttaaatctttggaataaaatttcctgccatatacttctcaatgagaggaaaagttaaagggaaaaaacaaatgaagagtaaagctgaagcaaaacaactttcacagtatgagtgattcttaaagttattttcctttaactcagagaaacatctttttaaaactttttaaatgctttatttggggggaataaaattatttatggtgcttgggagtagaaggtcaccatgccttatttttgttgggcttctatgcttgaaagattttgcctaattgtggttgggcaagaaaacttcaagtgaaaagcgcattttatattttatttaattaaatacratcaaaggtgccctcagagcacttgaatgagcattttcctagttatatggcacagtctatataagaatatagccattggctcaatgtccttgttattgattcaatagttccttctgctatggacgaccaaaattttccattctttgaaacctcatgttttactacacagatgaaatacacctgtttctgatatacaaccacttttcattcttaactgtgaaaaattcatgaaatgtaaaaaaaatctgcatttcccattctggagttaaatataatttggaacttcgcactgtcaattagaagaaaaaaataggggacacctactccatgcaagg

SEQ ID NO: 722729 - DNA, 615 bp, Homo sapiens
tactccctaactcattttaggaggctagcataaccttgatagctaataaagacaaaattagaaaggacagttataggccagtcttactgattagcatagtgttaaaagctttccctttaaggttagaaatctgacaagaatgccaactatcagcttttctttctttcttttttcttttttttttttggctgttgtttagacagggtctcactctgcctcccaggctggagtgcagtggcacaatcatggctcactacagcctcagtctccccgggctcaggtcatcctcccaccttagcctcctgagtagctgggattacaggctcatgccagcrtgcttggcccagctatcagctttttcatttaacattgtactagaagttactgtcagaatagaaggcaggaaaagaattagaagggaagaaataaacttgattatatgtggatgacatgattggcagtgtggaattaccattcccagactgctccccaccccaaatagattcatcattagcattactaaggctttggttaaaaatcagttagattggctgggcgaggtggctcatgcctgtaatcccagcactttgagaggctgagatgggtggatcacct

SEQ ID NO: 722730 - DNA, 646 bp, Homo sapiens
ctattcttagcttggagatcactcaaacacttgtctggcataatcagatatgtctttagttttgcttccaatgttcaaggaagtaactgataggattgaaaattccaggagagcacagaagtcataaaaaaaaattgggccaggcatggtggctcacgcctataatcccagcattttgggaggccaagataggaggactgcttgaacccaggagttcaagagcagcctgggcaagacggtgatacctcatctttacaaaaaattaaaaaattagccaggtgtggtggcacaatgaactaattttaaccttaatctatgaaaaacacaattaagaataaaatcttaaagtactcccagaaaataacaaataacattgaattattcctctgtaagcatgaaatgcacacatacaaacaaaactatatacattagtaaagwaaaataaaagcctagtatatatgcagagaatggctagaaaatcatcacagcaatatcaaacttacccaatagcttcttcttcttcttcttttttttttttttaactgagtctcgctctatcacctaggctggagtgcagtggtgcgatcttggtttactgcaacctccgcctccccctgggttcaagcaattctctgcctcagcctcc

SEQ ID NO: 722731 - DNA, 646 bp, Homo sapiens
ctattcttagcttggagatcactcaaacacttgtctggcataatcagatatgtctttagttttgcttccaatgttcaaggaagtaactgataggattgaaaattccaggagagcacagaagtcataaaaaaaaattgggccaggcatggtggctcacgcctataatcccagcattttgggaggccaagataggaggactgcttgaacccaggagttcaagagcagcctgggcaagacggtgatacctcatctttacaaaaaattaaaaaattagccaggtgtggtggcacaatgaactaattttaaccttaatctatgaaaaacacaattaagaataaaatcttaaagtactcccagaaaataacaaataacattgaattattcctctgtaagcatgaaatgcacacatacaaacaaaactatatacattagtaaagtaaaataaaagcctagtatatatgcagagaatggctagaaaatcatcacagcaatatcaaacttacccaatagctkcttcttcttcttcttttttttttttttaactgagtctcgctctatcacctaggctggagtgcagtggtgcgatcttggtttactgcaacctccgcctccccctgggttcaagcaattctctgcctcagcctcc

SEQ ID NO: 722732 - DNA, 643 bp, Homo sapiens
tttatttttataatgtttaccttgaaacactgcagtcactcagtccacatctgctgagtgtccctgtagatgtggcccattccaatcctcactctacattaaaacaaaacagaaggccttttaatattcaattttgcactttctcgaaagtgatccatctgcatttgcaccaaattgatatccctctttctgtgctttttcccaaaatgaaaatgtctttctgatgacatttcctataacaagcaacaatgaagttgcttgttataaaaagtgtgaattaaaagaaagtgttttctttaaccatcaataattcttccatccaaagaaaaccatttggcatatgtctttccaaatttctttctctgctttcgagtttttttcttaaacaaagattagaccatatcrcgtatactgttctttaaacaaaggtgatcttttcttgttcataaacatagatctacattaatctgactttgttcttcattgcttaagaagaaaatataactgcttatttttagaaaccatagtttatttaattttagttgttcatacacgttatattaagcctagaaagcctcaaccacaacaagcagcaaggaaattttcgtctgtcctttgtgtgtcaaatttatcagcacacact

SEQ ID NO: 722733 - DNA, 596 bp, Homo sapiens
  misc_feature 276, 511: n = A,T,C or G
caaattaggtaaaagacaaagttcctactgatatggtttgtcttcaaaacatagtgagacctaacattttacatagattttcatagagtgacttttttttcctttcaatctgtttctagtgaacatacagtgacttttaaatgtcttttacaagcaaataatttcatggcatacaaaaatatataccatgtgtaaacaccatcatttcaattttttttttttttttttttttgagacggagttttgctyttgttgcccaggttggagtacaatggncgccatcttggctcactgcaacctctgcctcccaggttcaagcaattctcctgccttagcctcccatgtagctgggattacaggcatgtgtcaccctgcccagctaattttgtattttaggtagagatggggtttcatcatgttggcaaggctggtcttgaactcctgaccgaggtgatccacctgccttggcctcccatagttccgggattacagatgtgagctgctatacccnggccacatttcagattttaataaatgtaccatagggagaagtataaagtgaaaagaagtataactaacgttatttctgttggttg

SEQ ID NO: 722734 - DNA, 612 bp, Homo sapiens
taaaagttttgcctcatagatttaatatttgacttctaattttttaaaaaattattaaaaaaataaaaaggcatacaacttataaattttgataatttcactggatagatrtttttcattccagacacgttcaagtatttattggtttgtaaactcatcattgtaaggctatcagatcacatatttctaaaaatatagtttattcaactgaatttgaacttctgcatgtgtgggattacagatacttatagtattgatatgaaccaaatttttttgtttatacaaattacagactgcactaaatttgttttacctgaccataattggacacggattgtctattgcatcactgcttatctcgcttggcatattcttttatttcaagtaagtaaatttaaaatattttaagaaaattactagatgtcttgggtgaatgccccatcatgtgcatatttacatcatgtctgacaaaatataccaatatagatgatttataatgtttaaaataagttgaaataagttgatcttagctttgtaaaatatgtagaggagactgatgaaatatcttaacctgaattttacaaaattagtaggcatataaaagtgaagaca

SEQ ID NO: 722735 - DNA, 1148 bp, Homo sapiens
tactgattttagatttatatgatatgcagtagtactttcaaaacaacctaaagataagatctatagaaaattcacatttttgactcactaacattgtcttgtgtatatatgcacttcattcaaaccaagacactacaattaatttttttcttaaaaaaattcaagtgtttcaatggtttttcactagtaactttacagctaaaaattttaaagagatctaaattcaacttcatttcctgataactaacatatacatgcttgattcagtattcatatttgtttacggaaaatgtagasatgagatgtaaagttaccaatttttaagaagagaataattaaattattaaacagggccaggcatggtggctcacgcctgtaatcccagcactttgggaggttgaggtgggctgatcacttgaggtcaggagtttgagaccagccttgccaacatggcgaaaccccatctctactaagaatacaaaaaagaaaaattagccaggtgtcgtggcacaagcctgtaatctcagctattcaggaggctaaggcaagagaatcgcttgaaccaggaagcggaggttgcagtgagctgagatcacaccactgcactccagtctaggtgacagaatgagacttcgtctcaaaaaaaaagtaacagataaattattaatcagtcctggaggattaccacaaacttatttaccaccagatcgatgatatattcagtatttcaggctcgaaggaaatcttaatgacagcaagcaaatccaacaactctaaatagttattatggtccaattcactaagtcaaacttaatgacagtaagacagaacactttttatgttgtattcatttctcagaaaagacagtaacaggtctgcaacttagcaaccatgctggagaactcgaagatatctccactgtctgaggaagtattgcaaaaagtataaattactaatgtggttgcagttttcaaaacaatacctccagaagtgcagttcgaatccttcacatttttctttgcattttaaacaaggggctccaaatccttgctcgtgacctaagcccatctgttaaaaagaaaacatcatgaatctgttattagattctttacaaatctaaaaattcaataaattgcacttttaattcc

SEQ ID NO: 722736 - DNA, 1148 bp, Homo sapiens
tactgattttagatttatatgatatgcagtagtactttcaaaacaacctaaagataagatctatagaaaattcacatttttgactcactaacattgtcttgtgtatatatgcacttcattcaaaccaagacactacaattaatttttttcttaaaaaaattcaagtgtttcaatggtttttcactagtaactttacagctaaaaattttaaagagatctaaattcaacttcatttcctgataactaacatatacatgcttgattcagtattcatatttgtttacggaaaatgtagacatgagatgtaaagttaccaatttttaagaagagaataattaaattattaaacagggccaggcatggtggctcacgcctgtaatcccagcactttgggaggttgaggtgggctgatcacttgaggtcaggagtttgagaccagccttgccaacatggcgaaaccccatctctactaagaatacaaaaaagaaaaattagccaggtgtcgtggcacaagcctgtaatctcagctattcaggaggctaaggcaagagaatcgcttgaaccaggaagcggaggttgcagtgagctgagatcacaccactgcactccagtctaggtgacagaatgagacttcgtctcaaaaaaaaagtaacagataaattattaatcagtcctggaggattaccacaaacttatttaccaccagatcgatgatatattcagtatttcaggctcgaaggaaatcttaatgacagcaagcaaatccaacaactctaaatagttattatggtccaattcactaagtcaaacttaatgacagtaagacagaacactttttatgttgtattcatttctcagaaaagacagtaacaggtctgcaacttagcaaccatgctggagaactcgaagatatctccactgtctgaggaagtattgcaaaaagtataaattactaatgtggttgcagttttcaaaacaatacctccagaagtgcagttcgaatccttcacatttttctttgcattttaaacaaggggctccaaatccttgctcgtgacctaagcccatctgttaaaaagaaaacatcatgaatctrttattagattctttacaaatctaaaaattcaataaattgcacttttaattcc

SEQ ID NO: 722737 - DNA, 639 bp, Homo sapiens
tgatacacaaatactaaccactgtgttacaaatgcctaccagattcagtaaaataacatgctgtagaggtttgcagcctaggagtgataagtacaccataatatagcctaggtgtgtagcagactataccatctaggtttgtataagtgcaccctgtgatgttcttacattgacaaaatcaaccaactatacaattctcagaacacgtccccgtcattatgcgacatatgacagtacactgaagcacttgmctccaggagagaagctcgggccctgtagaacttctacgtctgctgtgcttcaaaccaaaccacagggaaggagagaaggggccaactgtgtgaggagcagctttttcattgtgtatataatcgggggatctgtaaactcttcctattaagggccaggtagaaaatattttcagctgttcagacctgacagtctctgtctcaattactcaactctgccattgtctcccaaaagagaaagcagacacacaatatgcaaacgaatgggcgtgaccatgttccaataaaacctcatttacaaaagcaggacttgaaccaaatttaaatcacagaccatggtttgtcagcccctgcatttaatgatcaatcttatctttctagtgtagtttgg

SEQ ID NO: 722738 - DNA, 1184 bp, Homo sapiens
tgttttgttaagtttgcttcatatgcgtttcaaagagacaaagtggaaatggcattgatttttatcattttacagacgaaaaaaactgagcctggaaacctcaatgtatccaagcctggctgatcgagtgtccaagcaaggcaaaagcccatacgcagtgtttttcccaccagaggacgagaagtagaaacctcaaactgcccctttgccctcaggaacgactgggactcagctgaggtccctgccagcttggctgaggccaccacacctcagcaatgaggaggttgcagctcagaccagtgtctggggaatgaggcttatagggctgtctgcaaacttgccccacctgctcgtcccaggggatcttgatgggttgcaatgagcaaaccaaaagttctggctgacaatgcatgagscgagggccaccaagtcagtgatgctgaggctgaggaccaagggctcaaagaatcctctctccctacagcaagaatgaacatattgatcagagggacccaccattcaccaaggaaggacagccttgcatccagatgagtgtactcaggaagcaacttgacccccataggcaagtcgaggtggggaccacagagacttttgttcactattatcccagtgttcttggaaaagggctgcccttgatagccatctgttgaatgactgaatgaatacactggtggttgaatgaatcaagggttgaatacttggatcacagcaataataaaaacctatctgttggccagacatggtggctcacgcctgtaatcccagcactttgggaggccaaggcaggcagatcacttgagcccaggaatttgagaccagcctgggcaacatggcaaaaccccatctctactaaaaatagaaaaattagctgggcattgtggcacgcgcctgtaatcccaggtacttgggaggctgagacacgagaatcacttaagcctgggaggcagaggttgcagtgagctgagatcgcaccactgcactccaggctgaatgacagcatgagactgtctcaaaaaaacaaacaaacaaacaaacaaacaaacaaaaaaacacctatctgtgtccagcttcatccttcctcctcatcagaatcctgattttggagaagtagtatatcataatggctaacagggaagactttgaatccagcctgcccgagttca

SEQ ID NO: 722739 - DNA, 1184 bp, Homo sapiens
tgttttgttaagtttgcttcatatgcgtttcaaagagacaaagtggaaatggcattgatttttatcattttacagacgaaaaaaactgagcctggaaacctcaatgtatccaagcctggctgatcgagtgtccaagcaaggcaaaagcccatacgcagtgtttttcccaccagaggacgagaagtagaaacctcaaactgcccctttgccctcaggaacgactgggactcagctgaggtccctgccagcttggctgaggccaccacacctcagcaatgaggaggttgcagctcagaccagtgtctggggaatgaggcttatagggctgtctgcaaacttgccccacctgctcgtcccaggggatcttgatgggttgcaatgagcaaaccaaaagttctggctgacaatgcatgaggcgagggccaccaagtcagtgatgctgaggctgaggaccaagggctcaaagaatcctctctcyctacagcaagaatgaacatattgatcagagggacccaccattcaccaaggaaggacagccttgcatccagatgagtgtactcaggaagcaacttgacccccataggcaagtcgaggtggggaccacagagacttttgttcactattatcccagtgttcttggaaaagggctgcccttgatagccatctgttgaatgactgaatgaatacactggtggttgaatgaatcaagggttgaatacttggatcacagcaataataaaaacctatctgttggccagacatggtggctcacgcctgtaatcccagcactttgggaggccaaggcaggcagatcacttgagcccaggaatttgagaccagcctgggcaacatggcaaaaccccatctctactaaaaatagaaaaattagctgggcattgtggcacgcgcctgtaatcccaggtacttgggaggctgagacacgagaatcacttaagcctgggaggcagaggttgcagtgagctgagatcgcaccactgcactccaggctgaatgacagcatgagactgtctcaaaaaaacaaacaaacaaacaaacaaacaaacaaaaaaacacctatctgtgtccagcttcatccttcctcctcatcagaatcctgattttggagaagtagtatatcataatggctaacagggaagactttgaatccagcctgcccgagttca

SEQ ID NO: 722740 - DNA, 1184 bp, Homo sapiens
tgttttgttaagtttgcttcatatgcgtttcaaagagacaaagtggaaatggcattgatttttatcattttacagacgaaaaaaactgagcctggaaacctcaatgtatccaagcctggctgatcgagtgtccaagcaaggcaaaagcccatacgcagtgtttttcccaccagaggacgagaagtagaaacctcaaactgcccctttgccctcaggaacgactgggactcagctgaggtccctgccagcttggctgaggccaccacacctcagcaatgaggaggttgcagctcagaccagtgtctggggaatgaggcttatagggctgtctgcaaacttgccccacctgctcgtcccaggggatcttgatgggttgcaatgagcaaaccaaaagttctggctgacaatgcatgaggcgagggccaccaagtcagtgatgctgaggctgaggaccaagggctcaaagaatcctctctccctacagcaagaatgaacatattgatcagagggacccaccattcaccaaggaaggacagccttgcatccagatgagtgtactcaggaagcaacttgacccccataggcaagtcgaggtggggaccacagagacttttgttcactattatcccagtgttcttggaaaagggctgcccttgatagccatctgttgaatgactgaatgaatacactggtggttgaatgaatcaagggttgaatacttggatcacagcaataataaaaacctatctgttggccagacatggtggctcacgcctgtaatcccagcactttgggaggccaaggcaggcagatcacttgagcccaggaatttgagaccagcctgggcaacatggcaaaaccccatctctactaaaaatagaaaaattagctgggcattgtggcacgcgcctgtaatcccaggtacttgggaggctgagacacgagaatcacttaagcctgggaggcagaggttgcagtgagctgagatcgcaccactgcactccaggctgaatgacagcatgagactgtctcaaaawaacaaacaaacaaacaaacaaacaaacaaaaaaacacctatctgtgtccagcttcatccttcctcctcatcagaatcctgattttggagaagtagtatatcataatggctaacagggaagactttgaatccagcctgcccgagttca

SEQ ID NO: 722741 - DNA, 1184 bp, Homo sapiens
tgttttgttaagtttgcttcatatgcgtttcaaagagacaaagtggaaatggcattgatttttatcattttacagacgaaaaaaactgagcctggaaacctcaatgtatccaagcctggctgatcgagtgtccaagcaaggcaaaagcccatacgcagtgtttttcccaccagaggacgagaagtagaaacctcaaactgcccctttgccctcaggaacgactgggactcagctgaggtccctgccagcttggctgaggccaccacacctcagcaatgaggaggttgcagctcagaccagtgtctggggaatgaggcttatagggctgtctgcaaacttgccccacctgctcgtcccaggggatcttgatgggttgcaatgagcaaaccaaaagttctggctgacaatgcatgaggcgagggccaccaagtcagtgatgctgaggctgaggaccaagggctcaaagaatcctctctccctacagcaagaatgaacatattgatcagagggacccaccattcaccaaggaaggacagccttgcatccagatgagtgtactcaggaagcaacttgacccccataggcaagtcgaggtggggaccacagagacttttgttcactattatcccagtgttcttggaaaagggctgcccttgatagccatctgttgaatgactgaatgaatacactggtggttgaatgaatcaagggttgaatacttggatcacagcaataataaaaacctatctgttggccagacatggtggctcacgcctgtaatcccagcactttgggaggccaaggcaggcagatcacttgagcccaggaatttgagaccagcctgggcaacatggcaaaaccccatctctactaaaaatagaaaaattagctgggcattgtggcacgcgcctgtaatcccaggtacttgggaggctgagacacgagaatcacttaagcctgggaggcagaggttgcagtgagctgagatcgcaccactgcactccaggctgaatgacagcatgagactgtctcaaaaamacaaacaaacaaacaaacaaacaaacaaaaaaacacctatctgtgtccagcttcatccttcctcctcatcagaatcctgattttggagaagtagtatatcataatggctaacagggaagactttgaatccagcctgcccgagttca

SEQ ID NO: 722742 - DNA, 1184 bp, Homo sapiens
tgttttgttaagtttgcttcatatgcgtttcaaagagacaaagtggaaatggcattgatttttatcattttacagacgaaaaaaactgagcctggaaacctcaatgtatccaagcctggctgatcgagtgtccaagcaaggcaaaagcccatacgcagtgtttttcccaccagaggacgagaagtagaaacctcaaactgcccctttgccctcaggaacgactgggactcagctgaggtccctgccagcttggctgaggccaccacacctcagcaatgaggaggttgcagctcagaccagtgtctggggaatgaggcttatagggctgtctgcaaacttgccccacctgctcgtcccaggggatcttgatgggttgcaatgagcaaaccaaaagttctggctgacaatgcatgaggcgagggccaccaagtcagtgatgctgaggctgaggaccaagggctcaaagaatcctctctccctacagcaagaatgaacatattgatcagagggacccaccattcaccaaggaaggacagccttgcatccagatgagtgtactcaggaagcaacttgacccccataggcaagtcgaggtggggaccacagagacttttgttcactattatcccagtgttcttggaaaagggctgcccttgatagccatctgttgaatgactgaatgaatacactggtggttgaatgaatcaagggttgaatacttggatcacagcaataataaaaacctatctgttggccagacatggtggctcacgcctgtaatcccagcactttgggaggccaaggcaggcagatcacttgagcccaggaatttgagaccagcctgggcaacatggcaaaaccccatctctactaaaaatagaaaaattagctgggcattgtggcacgcgcctgtaatcccaggtacttgggaggctgagacacgagaatcacttaagcctgggaggcagaggttgcagtgagctgagatcgcaccactgcactccaggctgaatgacagcatgagactgtctcaaaaaawcaaacaaacaaacaaacaaacaaacaaaaaaacacctatctgtgtccagcttcatccttcctcctcatcagaatcctgattttggagaagtagtatatcataatggctaacagggaagactttgaatccagcctgcccgagttca

SEQ ID NO: 722743 - DNA, 926 bp, Homo sapiens
ttggacttttactaccttttggacttttactaccctacctttatggtagggactttatttatgttgttcatcatgatatccctactgcttagaatgtagctcatcacagtgtcagtgcacagaaaacatctgttgaatgaatgaatatttcttttctttmttttttttcctttttttgagatggaatcttgcgctgtcacccaggctggagtgcagtggcgtgatctcggctcactgcaagctccgcctcctgggttcatgccattctcctgcctcagcctcctgagtagctgggattacaggcgcccgccactatgcctggctaatttttggtatttttagtagagacggggtttcaccatgttagccaggatggtctcgatctcctgacctcgtgagtcgcccgcctcggcctcccaaagtgctgggattacaggcgtgagccactgtgcctggcctgaatgattatttcttgagcactaatgatattcaggttgtaggttgagcatctggaatacagcactaaatgagacacgtcgttctctttaatggacccctagaatgtaattttagtaaggtgtttggcctttcacctttcatggccttggatagcagctctgggaggcaagcacacccagacaggagtgactggtgtccaatttcgatcataatactagggtcagattcagaagtcctagaagttttagtgttgaaagagtttttagagatcacgacatccaaacttccctatttataagtcccagagagaggatgtggcttggacaagtttacacagagggctagaggcagagtgaaaattaaaatgcaggacttttgactctaggagttacgttcatttaattttattgtctcaatactaggatctgggttctgagcagcctacgcattgtttcaaaagaaaaatt

SEQ ID NO: 722744 - DNA, 926 bp, Homo sapiens
ttggacttttactaccttttggacttttactaccctacctttatggtagggactttatttatgttgttcatcatgatatccctactgcttagaatgtagctcatcacagtgtcagtgcacagaaaacatctgttgaatgaatgaatatttcttttctttattttttttcctttttttgagatggaatcttgcgctgtcrcccaggctggagtgcagtggcgtgatctcggctcactgcaagctccgcctcctgggttcatgccattctcctgcctcagcctcctgagtagctgggattacaggcgcccgccactatgcctggctaatttttggtatttttagtagagacggggtttcaccatgttagccaggatggtctcgatctcctgacctcgtgagtcgcccgcctcggcctcccaaagtgctgggattacaggcgtgagccactgtgcctggcctgaatgattatttcttgagcactaatgatattcaggttgtaggttgagcatctggaatacagcactaaatgagacacgtcgttctctttaatggacccctagaatgtaattttagtaaggtgtttggcctttcacctttcatggccttggatagcagctctgggaggcaagcacacccagacaggagtgactggtgtccaatttcgatcataatactagggtcagattcagaagtcctagaagttttagtgttgaaagagtttttagagatcacgacatccaaacttccctatttataagtcccagagagaggatgtggcttggacaagtttacacagagggctagaggcagagtgaaaattaaaatgcaggacttttgactctaggagttacgttcatttaattttattgtctcaatactaggatctgggttctgagcagcctacgcattgtttcaaaagaaaaatt

SEQ ID NO: 722745 - DNA, 926 bp, Homo sapiens
ttggacttttactaccttttggacttttactaccctacctttatggtagggactttatttatgttgttcatcatgatatccctactgcttagaatgtagctcatcacagtgtcagtgcacagaaaacatctgttgaatgaatgaatatttcttttctttattttttttcctttttttgagatggaatcttgcgctgtcacccaggctggagtgcagtggcgtgatctcggctcactgcaagctccgcctcctgggttcatgccattctcctgcctcagcctcctgagtagctgggattacaggcgcccgccactatgcctggctaatttttggtatttttagtagagacggggtttcaccatgttagccaggatggtctcgatctcctgacctcgtgagtcgcccgcctckgcctcccaaagtgctgggattacaggcgtgagccactgtgcctggcctgaatgattatttcttgagcactaatgatattcaggttgtaggttgagcatctggaatacagcactaaatgagacacgtcgttctctttaatggacccctagaatgtaattttagtaaggtgtttggcctttcacctttcatggccttggatagcagctctgggaggcaagcacacccagacaggagtgactggtgtccaatttcgatcataatactagggtcagattcagaagtcctagaagttttagtgttgaaagagtttttagagatcacgacatccaaacttccctatttataagtcccagagagaggatgtggcttggacaagtttacacagagggctagaggcagagtgaaaattaaaatgcaggacttttgactctaggagttacgttcatttaattttattgtctcaatactaggatctgggttctgagcagcctacgcattgtttcaaaagaaaaatt

SEQ ID NO: 722746 - DNA, 926 bp, Homo sapiens
ttggacttttactaccttttggacttttactaccctacctttatggtagggactttatttatgttgttcatcatgatatccctactgcttagaatgtagctcatcacagtgtcagtgcacagaaaacatctgttgaatgaatgaatatttcttttctttattttttttcctttttttgagatggaatcttgcgctgtcacccaggctggagtgcagtggcgtgatctcggctcactgcaagctccgcctcctgggttcatgccattctcctgcctcagcctcctgagtagctgggattacaggcgcccgccactatgcctggctaatttttggtatttttagtagagacggggtttcaccatgttagccaggatggtctcgatctcctgacctcgtgagtcgcccgcctcggcctcccaaagtgctgggattacaggcgtgagccactgtgcctggcctgaatgattatttcttgagcactaatgatattcaggttgtaggttgagcatctggaatacagcactaaatgagacacgtcgttctctttaatggacccctagaatgtaattttagtaaggtgtttggcctttcacctttcatggccttggatagcagctctgggaggcaagyacacccagacaggagtgactggtgtccaatttcgatcataatactagggtcagattcagaagtcctagaagttttagtgttgaaagagtttttagagatcacgacatccaaacttccctatttataagtcccagagagaggatgtggcttggacaagtttacacagagggctagaggcagagtgaaaattaaaatgcaggacttttgactctaggagttacgttcatttaattttattgtctcaatactaggatctgggttctgagcagcctacgcattgtttcaaaagaaaaatt

SEQ ID NO: 722747 - DNA, 1820 bp, Homo sapiens
attttctatgcaaccgagttttgactgaagctattaaattaagctaataaaaacagtatacaatctgtgaaagggtaggctctgaactgggtggaaatggccaattatagtgtaaagttagaatcactctctacttgtgaacctaaagaaacccagaccatgaagtggttacacccagaaattcaatgcctatatgctagagtttcatctgtactcttgtctagtcaacatatattctcataggtctatcagcaggaataatgaaaggaaccttaaaataaattacctaaacccctttcaaacaaaatttgaaatgaaaatcttaattcaaagaattatcagatgcagaaatcagggagtgtttatatttacatattttaaattttaaagaggctgctatcacctcaaatagttatgacatggctcggatgtttgtcccctccaaagctcatgctgaaagtgattcccaatgttggaggtgaggcctggtgggatgtgattggatcatggcgcagattcctcatggtttagcaccatccctgcattagtctgttttcacactgctataaagataccacccaagacttggtaatttataaacaaaggaggtttaattgactcacagttctgcatggctgggaaggcctcaagaaacttacaatcatggtggaagaggaagcaggtaccttcttcacaaggtggtaaaagagagaagagtgaaaaaggaacttccaaacacttataaaatcatcagatctcatgagaactcactcactatcatgagaacagcatgggggaaactgcctccataatccaatcacctccctccctcaacacgtggggattatgattcgagatgagattccagaggggatacagagccaaaccatatcagtctycttggtgagaagtgagttctccctcagttagttcacatgagatttggttgtttaaaggagtctgggacctcctcctttgctctcttgttccctctcttgccgtgtgatgtgctggctgcccttggccttctaccatgattgcaagcttcttaaggccctcaccagaagcagataccagcactatgattcttgtacagcctgcagaactgtgagccaattaaacctcttttctttttaaatcatccagtctcaggtatttgtttatagcattgcaagaatggactaacacaaatcagaagacattttttaaaaatgattattgtttgaatatatagaaacagagggtagaaaggtagctattgggtggtggaggggtgaaggaaatggaagtcaaagcttacaaagttgtggttatgtaagatgaataagtagagatgcagtgtacagcatgaggactatagttcataatactgtattgtatactggaaatttgctgaaagagtagattttaggtacttttaccacgtacacacaaaaaaggtaaccatgtgtgatgatgggtatattaattggcttgactttagtaattatttcactgtgtgtatatcaaaacatcaaatatatttaagggatacaacatgatgtttttacatatatatgatatatgtgtttttacatatataattatacatattaaggagagcagcctctaactttatatatatatatatatatatatatgtatatggtatatgtatatgggtatatatgtatacatatatgtatacatatatatgggtattttatatatgtacacacacccatatgtaaaattatttaaaggctgctgtcttgagtttttgtggagataaacaagttaacattaattaaaattatgtttcttggaaacataattaaatg

SEQ ID NO: 722748 - DNA, 1820 bp, Homo sapiens
attttctatgcaaccgagttttgactgaagctattaaattaagctaataaaaacagtatacaatctgtgaaagggtaggctctgaactgggtggaaatggccaattatagtgtaaagttagaatcactctctacttgtgaacctaaagaaacccagaccatgaagtggttacacccagaaattcaatgcctatatgctagagtttcatctgtactcttgtctagtcaacatatattctcataggtctatcagcaggaataatgaaaggaaccttaaaataaattacctaaacccctttcaaacaaaatttgaaatgaaaatcttaattcaaagaattatcagatgcagaaatcagggagtgtttatatttacatattttaaattttaaagaggctgctatcacctcaaatagttatgacatggctcggatgtttgtcccctccaaagctcatgctgaaagtgattcccaatgttggaggtgaggcctggtgggatgtgattggatcatggcgcagattcctcatggtttagcaccatccctgcattagtctgttttcacactgctataaagataccacccaagacttggtaatttataaacaaaggaggtttaattgactcacagttctgcatggctgggaaggcctcaagaaacttacaatcatggtggaagaggaagcaggtaccttcttcacaaggtggtaaaagagagaagagtgaaaaaggaacttccaaacacttataaaatcatcagatctcatgagaactcactcactatcatgagaacagcatgggggaaactgcctccataatccaatcacctccctccctcaacacgtggggattatgattcgagatgagattccagaggggatacagagccaaaccatatcagtctccttggtgagaagtgagttctccctcagttagttcacatgagatttggttgtttaaaggagtctgggacctcctcctttgctctcttgttccctctcttgccgtgtgatgtgctggctgcccttggccttctaccatgattgcaagcttcttaaggccctcaccagaagcagataccagcactatgattcttgtacagcctgcagaactgtgagccaattaaacctcttttctttttaaatcatccagtctcaggtatttgtttatagcattgcaagaatggactaacacaaatcagaagacattttttaaaaatgattattgtttgaatatatagaaacagagggtagaaaggtagctattgggtggtggaggggtgaaggaaatggaagtcaaagcttacaaagttgtggttatgtaagatgaataagtagagatgcagtgtacagcatgaggactatagttcataatactgtattgtatactggaaatttgctgaaagagtagattttaggtacttttaccacgtacacacaaaaaaggtaaccatgtgtgatgatgggtatattaattggcttgactttagtaattatttcactgtgtgtatatcaaaacatcaaatatatttaagggatacaacatgatgtttttacatatatatgatatatgtgtttttacatatataattatacatattaaggagagcagcctctaactttatatatatatatatatatatatatgtatatggtayatgtatatgggtatatatgtatacatatatgtatacatatatatgggtattttatatatgtacacacacccatatgtaaaattatttaaaggctgctgtcttgagtttttgtggagataaacaagttaacattaattaaaattatgtttcttggaaacataattaaatg

SEQ ID NO: 722749 - DNA, 2752 bp, Homo sapiens
gccaacatggtgaaacctcatctctactaaaaaatacaaaaattagcaggatgtggtggcaagcacctataatcccagctacttgggaggctgaggcaggagaatcacttcaatgcagaaggcagagattgcagtgagacaagattgcaccattgtactccagcctggatgacaagagtgagactccatctcaaagaaaaaagttgagtgtggcccccttcctctttctgtcaggctctcttgcccatttgccttccaccatgagctaacacagcatgaggcccttgccagaaagctgactccttgatacgggacttcccagcctccagaattatgagccaaacaaatttactttctctgtaaattaccctgtctcaagtattctgtgatagcagcagaaaacagactaagacaatctccagctgcttgcttgacacctccatatgcatgaccaaaatcagattcatgttattctctacaaaaccaaattcctgtaatattcccagtgacctgacctgatataatctctcaagcttctcatcatgaagctcactgcctattaatttattttccacatacacagaaccacacagtaattctgcctctgatgttgcacacactgctacagctctttagcatctatttcctccattttcctcttataaaacccccaccgatccttcaaggcctaatggatgtcactttctccataaatttcttcccattttttcttagactagattatcacataagtgaagggtttgtatccctgtagagtttttatagcttttaatttataccatactgtctttcagagttttgtacctttttaaattactacatgtatattacatttgctgtgtgcctattgtatgcctaaatttgcatatatgttaacattaatccagtcgtttcttcaactaatgttaattaaatgatcaattgtaatctgcttatattaagtatctttgggatatgacaatgaacaaaatagccaatgttcctgctctgtgaaccttatggaggtggtaattttatatagacgtaagtgctgtgaggagagttcaacaagataatgtggtaatggctgggggctgtttttactagatggttagggaagacttatgtgaggaggcatgacagagccagccaggtatgacttcacatgcaaacactcataagatcagaatgagttaggaacattccaggaacaaaggaccatcaatatggctagaaagatatggccaggagatcaagtgattggacacaagcgggaaagagagagagagggcgagagagagggagaggagccagatcttgtaggatcttgaaggccatgttgaagagactacatttcattttaaatgagttaagaaatcattggaggagaattttgaacaagaaagtgaggtgatctattgcatgcatttaaaatgtcattctggttcttgtgttgagaataacgtggaggaaagactaagcagagagaacattttggaaactattgagaagtctggtgagtcagaatggaagacggtaagaagaggccacatctgggactcatattaaagtgagcattcttcaaacttgctaaaatattgaatgtaggcatgagagtaagaaagtaatcaagtataagtcttctgtttctgtgttgagaaattgggtgaaagatcctgctatttcataagttggggaaagccggggacaaaattttttttcattaaggaaagggaagccgagagttccatattggacttattaagtctaggacatattagacatttataatccttgcaaaaatcttacaagattgatattatcatcattccattttacaagcaagggaatgaatattcaggaatgtattaagtcttgtcatcctgagaagtgaaactagaatcctttcttgtgtctttctagtatcatagtacctgatgctatggtcttgaatgtttgtgtcactctgaaatgcctatgttgaaatcctaaccaccaaggtaatatattaggaagtgggaactttggaaggtgattargtcatgagggtggagcattccatgaaagtgattagtgcacttaaaaaggaggcatgagggagcttggtcgctctttccaccatataaggacacagtgaaaagacaccatctactaacccgaaagtagatcctcactagacactgaacctgctggaatcttgattttgaatttcccagcctctagaactgtgagaaataaattccttttgtttatgaactacccagtttatagtattttgttacaatagccaaaacagcctgaaatacctgaggggcttttaaagtgccctattgcttccctataaggtatccaatagattttatgatccttccttgagggcagaggttactcagtaggattctccatatcatttaacatcagctatgtaaaacgtgtttctgtaaaaacaaatcatccaaaatattttacagtttaaatcttacatatacgcattacattggaaactttgaaagtggagtcactttcctctgactggaggagtatagtcttcctaagaggcatccttccatatcctcaacagagaaggcaaactgggacagtgggaagagtacctttcgtctttatacttaagtacctgagaactgctttatcgtgtaccttggcttcgaagaaaaagctaagctgttatgttggtaagcaaactaaaagaactaaaacaagtaggcagacttcacaaacacataaattacaa

SEQ ID NO: 722750 - DNA, 1477 bp, Homo sapiens
aagaactcaaagtgtttcagactttggaacatttcagagtgccaacatgatrctccaaggaaatgctcactggagtacttcagatttcggatttttggattagagatgcataacctgtatgtatggtacaaaacccaaatctgaaacacttctgtttccaagcatttcagactaaaggatagttggcctgtcctatatggcaaaactacaaagtacaggaattattaacacaaaacagaggaccatcactaccttggaagacgagatccagaaagcttcacaggaactggggatgaagttcaatctcttcaacagggtgggagtcactcaacttgttcatttcatcactcttcatgtttcccactcacattttcttcactgttttgtacggatgatataaaattattaaggtgatagatggagctctgtaacagcactgtccaatatagtagccactagccacatggggccctttacatttaaattaattaaaatcaagtagtaagatcagaaatgcagttcttcattcacactaatcatatttccagtgctcaatagggacatgtggctgcaggctactgatttggacatgacaaatatagaacatttctatcattgtagaaaattctattggacagtgctgcccaacagaatttgatggacaagaggccttggaatgagactcctacgcaccagaaccctctctcactccaaacaagaaacacaccccacccactgtactactgcccatcacacctctgaagtgtccttgcaggaagttagtgaatcatttccaacagagcccttgctagcgcttaaatcaccaccaaaatcccttccccttccaaggtcctggtggcctcggaacccccttctcagccccctacccagggcccctatctagcatgagttgcatctggaggtaaaatctcaggggatttcacaccaatgcagtgccatgttatggcattgagacaagtacacaaaagaaacccagagagaaagcacactcaccatcctaccacggagctagaaccaaagctcactcaacaaaaatggagctgaaggagtcaccaaagggaagctctgtacttctgaagtcaaggtacttgagtactaatccctttcttttctctctggtttcaccaatctgatcatctgtcaattaggtttcagtttgacctgtccctcattcaacaccatctcataaaacccacctctcctgtctgtgtgatggcttctgctgaaatacatccaaataaacacaggcagcaacagaccagccaaggctgttcagataagcattttagatctcaaccagcagggatgtgtgttggtgggtacacctgtgacagggagtctcagtctcctccaggagtcatggggggtggggggaggcttcaggcatgacttgtctaattggcctacaaaaagaattacttactctccacttacctttgattacctttaaaaaaaa

SEQ ID NO: 722751 - DNA, 720 bp, Homo sapiens
atattttagaaacgttttggtttgcagtagctggagggagaacctgctacatagttctgcaccacggacagtctgagaagcaccaaggacttccaaggtccaggctccagctttagagcgcctagaactcagtggattcaggttttcaggcttttatatttttctaattgtggtaaacagtataccataaaagttgccatcttcgccacttttaagtggacggtttggtggcggtggkaacattcactgtgttgtgcaggatcaccactctccacccccagcacactttacatcttgcaaaattgaaactctgtccccattaagcactaactccccattggatttcatctatctttttttttaattgagggagacaaattggcagggggctgtctcacagcagcgtatgaaatccgttaaaataagaaatctgcataattgtcttaagtgataaacaggaagccatttgttccaggtgaaaagccccttctttacattctcaatggctctgcatataatttttccccctgtacaatggcatgcagcccccagactcctcctcacattaacaggcaggacagtgctgatgacctgggaggcaacacacatgggaatgtccttcccaaaccaaatggacacagctgtgtccaaaatccaccagcaaaaggaaatgaagcactgcctctcctgagttcctggggcaaggggatctgggtgact

SEQ ID NO: 722752 - DNA, 1420 bp, Homo sapiens
tgctttctctgttcagtcttgaccccctgccaaattattctacacactgtgtccaaaaagttatttcaaacatctcatcacttcaacctctcaatggcgttcaacctccttggaatgaagatgtaaatatttaccatgatttataatatcatttataatctggagcttatttaccttttatattcatcagtctccagttacactggacctcatttggttactagaattcagaaaaactatgtttattctctcgtgtcagggactttgtatagactattccatatgtcaaaaataagactctcctagaggttcttctatggctctgtattctgttgacctctatttaaatgccattcctttctccaattcctcagcttagattatttaccctgccataaaattctctaatttctttatttctctcctaaaatatgtaagttctgtggaggtatgaattaggactaagatgtttacttatatattgttttattgttcactttatgggttcaattaaaactagtggaataaattttaaaattaataaactcaagaggcaaatgtagtaatcatttttctttgctgtggactaccatacagcttcaatacaataagggtcatttatgctgcatcagtgatgctgagtagcaacatcctyttctgcagttctaagaagctgtggtaactggatgctgaagcacaagaaagagtatttggtggggacatcaattcatagtgaaccagcaatcccaactgcagtgccagatgaagtaactgtgtaagtcacagaaagtaggagtagtatctggcacaaaccaccacattcaatatgattagcagtcatgacaaggtacatgagcttaatcctgaacagatatctgagtactcagttcataacttgggactactttgaaaagactggaacaacgcagtatgtagacacaagaaccaacactgtttgaattattactgataatatgacctcatgtgaatgcagaaaaaaattattctaatattatctctgtaaatggaagagctaacttataccagcccatttaccttacagttattaaaaatgagctttttcccagattctgacaatgggttgactgtcatttatagatcctagttttctgggttataagttcttttaaactttgtttaaatatcattgccattttaggtgaaagttggagaaattgaatttgacctgactaaaggattattattttttatttattcagttgacaagcagtacaggctcaatgtagaaatttatagaatgaaaaaaaatgaagaggaaataagaataatctctaatccaatcatcaatgactgccattctcaatattttattccacttctttttctgcatatttacagtagagacttggagaatatgtttataaaaggtatatattac

SEQ ID NO: 722753 - DNA, 651 bp, Homo sapiens
caaactctcatatatgatacaaacttttcctaagtgatattcaaatatataccggttatttgtaagtcagtacataaatcagtagctgtatatatttaaacttcaccctgcctcaatttatttacctattaaatggaagtaattttaatgtaccatgcaaggttgtttkaaggattgaaatactgtggatgaaagtgttcaataaaaagtagccatggttattttagtaggcaaacattatagctactgaattaattaatgcattatttagtctagggtaactatttatgcctaagagcctggggagaggaacaccaggatttggaagacagtgaacagaaagcaaatgctgaagaccaactttacatattaaaaaccactagaagttctgcctagtctagatgaccctgtacttagaaaagaagaagaaaacgtccatccttcccctgtctccacctattccacatggctcctggtttccagggctcagaaattagccacattaggtcatacaggccttgagttacagcttaagaaactcaaccgtagcttttatagaactgtttctgtattaaaaagtaatgacaacctccaaacaactcccttagaaaagaattgcagagcccaccgcccacaagccagcgacgggac

SEQ ID NO: 722754 - DNA, 651 bp, Homo sapiens
caaactctcatatatgatacaaacttttcctaagtgatattcaaatatataccggttatttgtaagtcagtacataaatcagtagctgtatatatttaaacttcaccctgcctcaatttatttacctattaaatggaagtaattttaatgtaccatgcaaggttgttttaaggattgaaatactgtggatgaaagtgttcaataaaaagtagccatggttattttagtaggcaaacattatagctactgaattaattaatgcattatttagtctagggtaactatttatgcctaagagcctggggagaggaacaccaggatttggaagacagtgaacagaaagcaaatgctgaagaccaactttacatattaaaaaccactagaagttctgcctagtctagatgaccctgtacttagaaaagaagaagaaaacgtccatccttcccctgtctccacctattccacatggctcctggtttccagggctcagaaattagccacattaggtcatacaggccttgagttacagcttaagaaactcaaccgtagcttttatagaactgtttctrtattaaaaagtaatgacaacctccaaacaactcccttagaaaagaattgcagagcccaccgcccacaagccagcgacgggac

SEQ ID NO: 722755 - DNA, 607 bp, Homo sapiens
ccaaaccaaagaatatatttttttcttgattaatgtaggttatgatgaaaggtgtcagatatatccaaaatcttctcttcattttctccagtgggtcttccccttaacaggctctcatgtgttctctatttcattttgcaccagctatttttatcattatttgtaaagtcaaggccttaaaccaatcttacgcttgcaatctttgagttacagtggagctgtgataactatcaaagtcattatatttttttccgtcaattgtttcccacaatctggctgacattattgttgaattgttgaataaatacagacttgcctcacartagtgtgcagttcatatggacttcagagaaactgcattgagcaactcagattttcaacctgttttaagtttagaaaccagagtattgtaactcagatttagtggtgacgttaagggattcttccacattttcatagtttgagtttttgtacttattttatttaaattatgaattgcaaaactccaaatgtatgttcattgagaaagcatgatatttctcttccttcatcaaaatgtgtaaaacaacagtcaaatagtataaatgatcacattttcttagctact

SEQ ID NO: 722756 - DNA, 1042 bp, Homo sapiens
agttctgtttttagctctttggaggtttgctaccctgctctttttgtgtaatttttttttgagagacagggtctctctctgttgcctaggctggagtgcagtggcatgatcatagctcactgcagtctgcgaattcctggcggctcaagcaatcctcctgcctcagcatcctgagtagctagaactgcaggtgtgtgacacgtgcccagctaattgtaaaaaattatttgtagaggcagggtttgctgtgttgcccaggctagtctctaactcatagcgtcaacaatcctcctatcttggcctcccaaagtgctggtattacaggcataagccactgcccccagccattcccacatgcttctaactaatattttcaggctgagattagatgagctccaacaagtatttggtttagttcaataagagtaacctccttctttaaataaaattagctattatagttcctcatccatattatatgaactcaktaagatcaaaggaataatttactcctaaccaaaggatgcttttgtattgaacattgtatttcataatgattgtatatttctctgaattttcagccttaggtgcaatgtaaaagtaacatcctacaggttctagaatttgctaaacttcacttactattaaaagagattatctttgagagcaggcttaatatatgcatggttttgtttgtttgtttgtttgtttgtttgttttaagatggagtctcgctctgttgccaggctggagtgcagtggcaccacctcggctcactgcaacctctgcctcccaggttcaagcgattctcctgcctcagcctcctgagtagctgggactacagatgtgtgccatcacacccagctaatttttgtattttcagtagaaacaggatttcaccatgttggccaggatggtatcgatctcctgacctcatgatccacctgccttggcctcctaacatgctgggattacaggcatgagccaccgtgcctggcctgcatggtatgttttaaataattagaggaaagaaaggagggtg

SEQ ID NO: 722757 - DNA, 1042 bp, Homo sapiens
agttctgtttttagctctttggaggtttgctaccctgctctttttgtgtaatttttttttgagagacagggtctctctctgttgcctaggctggagtgcagtggcatgatcatagctcactgcagtctgcgaattcctggcggctcaagcaatcctcctgcctcagcatcctgagtagctagaactgcaggtgtgtgacacgtgcccagctaattgtaaaaaattatttgtagaggcagggtttgctgtgttgcccaggctagtctctaactcatagcgtcaacaatcctcctatcttggcctcccaaagtgctggtattacaggcataagccactgcccccagccattcccacatgcttctaactaatattttcaggctgagattagatgagctccaacaagtatttggtttagttcaataagagtaacctccttctttaaataaaattagctattatagttcctcatccatattatatgaactcattaagatcaaaggaataatttactcctaaccaaaggatgcttttgtattgaacattgtatttcawaatgattgtatatttctctgaattttcagccttaggtgcaatgtaaaagtaacatcctacaggttctagaatttgctaaacttcacttactattaaaagagattatctttgagagcaggcttaatatatgcatggttttgtttgtttgtttgtttgtttgtttgttttaagatggagtctcgctctgttgccaggctggagtgcagtggcaccacctcggctcactgcaacctctgcctcccaggttcaagcgattctcctgcctcagcctcctgagtagctgggactacagatgtgtgccatcacacccagctaatttttgtattttcagtagaaacaggatttcaccatgttggccaggatggtatcgatctcctgacctcatgatccacctgccttggcctcctaacatgctgggattacaggcatgagccaccgtgcctggcctgcatggtatgttttaaataattagaggaaagaaaggagggtg

SEQ ID NO: 722758 - DNA, 1346 bp, Homo sapiens
gaggctagcccttgctacattaaaggtggagctagatttacattttattttattttattttattttttatttttcgagatggagtcttgctgtcgcccaggctggagtgcagtagcacgatttcagctcactgcaacctccacctcccgggctcaagcgattcacctgcttcagcctcccgagtagctgggattacaggggcacgccaccatgcctggctaattttttgtatttttagtagagacggggtttcaccatgttggccaggctggtctcaaactcctggcctcaggtgatccacctgcctcggcctcccaaagtgctgggattacagacgtgagccaccatgcccggtcaaatttaccttttagattcacatattaccaccagaagaatgcttcctctgacaactgagcggtactccatccccagagccctttgtgcagactattattgcagtttcctaacttgttatgacactccagccttttcctccaggtcatcatacaatccatttttagagtgattgttctaaagcacaaatcttaggtcactcccctgctcaaaaaccacccactgctcccccrgttccacagaagagagctcaaatttcttagcttggtattcaagaccttccatgataggatccctgtctactactcagcttacctcacttctcccctcctccagccaaatgaaactgttccctgtgtatgttcaggctccctagcttctgctcacagccttctgaatatgaagaagggaaagtcccttaccattccatccgtctctacctgtttaaatcctccccagtcttcaatattcatttcagaggctgcgtctttcaggaggccaggtacaatttctctcccttctccatgcacttctccctgcggcctgtgccttacattctagctgtgcgtatttgtatacttcctgttacaccttggtaacctcatcaagggagagactgactctgacattccagtgtctgaatttctttctttctttttctttttctgtgtttctttctttttttttttttttttttgagacaggatttcactctgtcacccaggctggagtgcaatggtgtgagcatggctcactgcagcctcaatttcctgggctcagttggttctcccacctcagcctcccgagtcgctgggactacaggtgtgcgccaccgtgcccagctaatttttgcatttttagtggagatgtggtttcaccatgtgtctaggctggtctggaactcctggattcaagtgatccgcctgccttggtctcccaaagtgttgggattacaagcatgagctactgcgcccggcctccagtgtctgaat

SEQ ID NO: 722759 - DNA, 2179 bp, Homo sapiens
tttccggatgttaggtaactgtctagtcttttccatgccattgcctcctaggatcatgaaagagttaaatctcctccaaagtcaccatctaagagtacatacacggcaggagcatctggatcattattagattatgtgggcaccagtcagcatagagctctgagcagactaagtaatagcagtggaggcatagttgtggaaaagcaacccacaacttgaatggccaggacacaaaattactctttggtcttggcacagagataggcaccactttcttttctatgcagctctttttacttcaaaagaaaaacattcaaactcattagtttacattactttcaatcaaggatctaaaaataggaaaaattttaaatgctgagatatattttcttctcagaacctaccttaggtattgcgttttttcataccctttcatactctcccacccagaaaggaaaaagaaagtgcctggtatttaactggacctgaagtcagaagatcctaagtaccacaagaaagactactcttttgatatttctggcaagcaccaggattggatgttctagaattctggccaaattttccgtccaattttgccgactaacttgtgaggttctgggcatttggaaagaaacagataagcaactcagcatcagactttttttaaaaaataaaacccagacactaaaggtcttcaggctcaacacaggtggtatttttacagttcgcaaagtccttttgcctggactccattgagaactactccattgagtagtttctctgagtagttactcagaagtcagttgcaagcatcagtggttcctctcgctaaagaacagacactctgcagaatcagaaggggatttctgggtgacttgatgggtctaaaaatcaactctttagccacatctagactccacactagatgtttgacaatcggactttatgcatgctttgtttgggaacacaactgtgaatacaacttaaattataattgtaacttgcaaggcttcagggtgttttcactcgcatgcttttccctctactgaatattcctcctccaaatatttgcatggatcactcccttacttattttaggtaccttcttttgatcatatcatcagaagacctcattgactactcaatataaagataaaaatccttctccctcttctaacccaaataagattcacagatgtagggtcctgggtgggaggaagggtgcccagttatatttgaatttcagatggacaacaaatatgccattttttatataagaatgctccaaataatgttttggacatacttacactaaaaaaattacctggatttatttggaattcagatttaactgggtgtcctgtattttacctggcaagtctaaacccaccccaatgttcccttttctccttctattttagctttttccacaggatacattgctacctgacttgtcacgtatttattagttattttatctgtcttctgagctagactgagggcaggaacaccatygtattctagcaccaagaacaatgcctagcatgcaaagatttgttgcataagtggaatgaatgagtgaatgaatgttgttacactactatgtagagcttggggatgtggtctgcttgctctaggattatcctcttcctctgctactccatcctggccagaaaagggcaggttctgaaggcctggtttggcagctataggcttctcggaaaattctgcttaagcctccccattgttcaggcttccttaccaagccctagccagtcagtttattttttttcaagtttgcctggtgctttatacagaaaccaaggaggcggagtggtttggagattcttagtgggctgtgttttcagaaggaaaaatcttgttggatagtgaatgtcattctgaatttgttcaatgtcagagcagagctcacagaaagtgattgtttatgtctgacacaaatctttattatgcaattgaaaatgttctcagttactctaacttacttttaataaaaagtttaatgtgttatttcttccagacagtagataaaaagatgtcatgcaatattgatttaaaatcaatattttaaagcaagtttgcccttttttctaagtcatttttttctttgaagataaatacacaccttcatggactttgtgtatgagtatatattaag

SEQ ID NO: 722760 - DNA, 1150 bp, Homo sapiens
attttgtgttactattggaggattttcactgtttagactgtaccagggcctcgggtctgaactctgagaaaagggtaaagggaatgtggtcatctttggtcttagtccattgggttgtttggaagatgcccctgtccaggccctgtagttttttttttttttttttttgagatggagtctccctctgtcgcccaggctggagtgcagtggcgcaatctcggctcactgcaatctctgcctcccaggttcacgccattctcctgcctcagcctcccgagtagctgggactacaggcgcctgccaccacgcccggctaattttttgtatttttagtagagatggggtttcaccgtgttagccaggatggtctcgatctcctgacttcgtgatccacccgccttggcctcccaaagtgctgggattacaggtggccgtgtagttttaattcagccaaccccacctgtggctccactcccccggggcagggctgggctggctacagtgaacgtacttcactgctgctctcagtagttctgtgcacggccacagcctactcactggatcrtgatgctttcccctttccaagatgcccctgcctcagggatgcccaatgtgaataggctggcattgttagctactgtcagaactggaagtcccagctgccaaactccatcttttcctcaacttggataattcatccttagaaccttgttgggcccctgtcacccaatcgatggcagtgggagagaaggagattcttcagattagctcatcctacctgcttcgaaacgcacaagtggtgtcacctttcaccgaggagcgagaaaaatataactcaagacaaatatctgactgcctttctataaagaaagggagatttttaacttttcttttgttaaagcaccccaatcagtgaaaatgaacaacttaccctgtcacatgtgttactgtatccagtgtttgtccatcacagacaggagcttccatttatgcaaacctttctacaccccagacaacattattctaaatgattttctgttttttattcatttaattctcatggccccagtattccacccacattattacaaattatgaaactgaggcactgagagtttacattatttgcccaggaacatatagttacaca

SEQ ID NO: 722761 - DNA, 1150 bp, Homo sapiens
attttgtgttactattggaggattttcactgtttagactgtaccagggcctcgggtctgaactctgagaaaagggtaaagggaatgtggtcatctttggtcttagtccattgggttgtttggaagatgcccctgtccaggccctgtagttttttttttttttttttttgagatggagtctccctctgtcgcccaggctggagtgcagtggcgcaatctcggctcactgcaatctctgcctcccaggttcacgccattctcctgcctcagcctcccgagtagctgggactacaggcgcctgccaccacgcccggctaattttttgtatttttagtagagatggggtttcaccgtgttagccaggatggtctcgatctcctgacttcgtgatccacccgccttggcctcccaaagtgctgggattacaggtggccgtgtagttttaattcagccaaccccacctgtggctccactcccccggggcagggctgggctggctacagtgaacgtacttcactgctgctctcagtagttctgtgcacggccacagcctactcactggatcatgatgctttcccctttccaagatgcccctgcctcagggatgcccaatgtgaataggctggcattgttagctactgtcagaactggaagtcccagctgccaaactccatcttttcctcaacttggataattcatccttagaaccttgttgggcccctgtcacccaatcgatggcagtgggagagaaggagattcttcagattagctcatcctacctgcttcgaaacgcacaagtggtgtcacctttcaccgaggagcgagaaaaatataactcaagacaaatatctgactgcctttctataaagaaagggagatttttaacttttcttttgttaaagcaccccaatcagtgaaaatgaacaacttaccctgtcacatgtgttactgtatccagtgtttgtccatcacagacaggagcttccatttatgcaaacctttctacaccccagacaacattattctaaatgattttctgttttttattcatttaattctcatggccccagtattccacccrcattattacaaattatgaaactgaggcactgagagtttacattatttgcccaggaacatatagttacaca

SEQ ID NO: 722762 - DNA, 740 bp, Homo sapiens
ttttaataatcacaccctcgtttaaaaatttcccagtttggagactagtaccacagatgagaaaaagctgccactgattatctgacttataccttggcttaatttaatccagcccatatgcagaaaaccactgtttctccaatgaattgctcttgaaaaatatgaaaatgttaatatcctttcaaagtattttgtgactatattttagaacagagagttggtaaactttttctataaagagccagatagtagatattttaggctttgctggctacataatgcgtctttttttcaactataaaaccaactctttaataatgtaaaagacattttcatctcaagtggccagacctaaattttttaatgtgagctaagaataggtttttaaaaaattgttaaaggtatatttaaaaaataaacaaaacaaaggagtataagtgacagatactgtatgagtcctgcaaagccaaaaatattatctgaaatatttactacaagaaatatgtactatggaaaaattttgctgacccctattctggagaatcataagttaagggtattattataaataatttaacytctgttcccattttttgtagtctacaaagctagcttgtttcttcaaacaacacaatcatctccaaggatgcagaaaaagcatttgatattgacaaaattcaatatccatccctgactaaaactctccagcaaactagtaagagaactaccttaacctgata

SEQ ID NO: 722763 - DNA, 429 bp, Homo sapiens
  misc_feature 2, 3, 4, 5, 6, 7, 8, 9, 10, 11, 12, 13, 14, 15, 16, 17, 18,19, 20, 21, 22, 23, 24, 25, 26, 27, 28, 29, 30, 31, 32,33, 34, 35, 36, 37, 38, 39, 40, 41, 42, 43, 44, 45, 46,47, 48, 49, 50, 51, 52, 53, 54, 55, 56, 57, 58, 59, 60,61: n = A,T,C or G
  misc_feature 62, 63, 64, 65, 66, 67, 68, 69, 70, 71, 72, 73, 74, 75, 76,77, 78, 79, 80, 81, 82, 83, 84, 85, 86, 87, 88, 89, 90,91, 92, 93, 94, 95, 96, 97, 98, 99, 100, 101: n = A,T,C or G
annnnnnnnnnnnnnnnnnnnnnnnnnnnnnnnnnnnnnnnnnnnnnnnnnnnnnnnnnnnnnnnnnnnnnnnnnnnnnnnnnnnnnnnnnnnnnnnnnnnttcaacatgagttttggaagagacaaagaatcaaacatagcagactacgagcgtacaaatctgcatcgtttccctcttaaaatgtgtcggaattggctttttaaaattagtatatgtgacttcaaatttttaagcagatgcagattatactagagtatgcatgaactctggttgtttgactattctgatagggatagaccctgagcttgttttccaccttgtactattttaaaaaatactaagacaaatagctttgtttaaaatagatcattgtatctctttagtattctagttaaaraaaaaaaacgagctgggcaaaatttttttt

SEQ ID NO: 722764 - DNA, 1011 bp, Homo sapiens
ttacccaatatatacaaaatataattatttcaagatgtaatattaaaaatttttgaggattttaaaatatttttaatactaaatctttgaaatcttattttttttttacacttaaagcacatctcaatttgaactagccatatttcaagtgctcagtggtcacatgtggctagtggcctctgtcttgaacagcataggtctaaaccttctccttttacccagactagtcctttcctaaatcttccaggctctgaagccgccactgttaacatacgagctccacttaaagtctcattcctgatttctccaactagtggtcaagcaatcattaattgactaatgtagccacaaacatactcctcataagacatctataatttttagaggaaaaataatattttcagtatttcaaaagtaacattatttttgtctgatctagaaaacatatttaaagaaaaggagaaagagtagaataaccaataatcctaccaccccagaagtaactactggattttaatgtaccttcttacagatttttctcatatgtatgttttttccccagaagtggaattatatggtatacattgttttattatcttcttccccttaacaacatcccagaagctttttctcttataatgattatcttctrcaactttagttttaatgatctaccatatgagtgtgtctcaattcgtttaaccaatctcccattgcccacaggctagtagaccttgagaacctgcacctagaagaggaatggatatcacctgaacgtacctgaagaacagcccacaacgtgatattcagttgtctcctgctgggaagggcgtgaatgtatttgtgattaaatgagggagaggtggattacattaaatggggagaccttcagaattagcaatttctgctaatggagcagggggtaccagcatgtgcggagcgaccacgatgtgtactggatgcattaaacctctcctgaagggtctgcccatctcttgatgtgtgtactcc

SEQ ID NO: 722765 - DNA, 642 bp, Homo sapiens
tgacgctatccaataacagtcgtaaaaatatagaaagtagcattcatgyccattagtaagaatgatcgacaggccaaaaaattaagggccttattattttgtaactaaaaatgaatctctctcaaatgttaagttggaggcatttcttattttcttattagggggtgataattaagctaataatagcatactttactctgtgtggtggcacactgatgcatttttctttttaaccaacctaccgtgttatatgtagttacagcactcggagtacatagttaagcaaacacatgggtagcaaagaaaggtcattattaagagattgttttatttatttaaaaaagtatttttctttgaaatttttctaacaaaatggtattcaatctagaaattacagtaagaaacaaaagatgctaactctaatgaaggagaagtgacaaaagaggttggagaagaaatacatgctttaacgctcctattctccagataaaataaggcacctgatactaacacatgagtccctgccaagagaaaataatcattgtattgtagtggctctttgtgcacagaatttaaggacagggcctactcttatccttgagggaaaaaagtaagtatctgatttaaaatatccactaatgt

SEQ ID NO: 722766 - DNA, 605 bp, Homo sapiens
tgtttagcagtgctttctaagatgatgaaaatggaataaatatgtgctatcaaatayggtggcctctagatacaggcttttattgaatacttgaaatgtggctagtgggatttagaaactaaagttttgattttatttgctaattattttaaatttgaatagtcacatatgactagtagctactggtacagatctcggtaactgtttcttaaactttactgtgcattagaatcagttgaagggcttgctaacacaagccccactaccataatttctgattctgtggtagggccactgaatatgcatttctgaaaagtttccagacacatcatattaaaatgttgaatattaaaggcagaaaaatctggaatgcagccagagacagatgatgcagccagagagagatgatggtgatagaaatcactgacttatattttcattaaaccccgtattgacttaaagtgtacacacagagttgcaaattgacattgaaattcaatcataacacataggtaaaactgaaccacaatacactgttgtcaagaaatggttctaaataagaaacacagtaatatgaaattgtaaagcaagaatgagaaacatta

SEQ ID NO: 722767 - DNA, 646 bp, Homo sapiens
aattctacttccagccatgatggaaatcagatttgctacctccatctgaaacaactaaaaactggacaaacatttgaaaacaaaacagaacaaaacaaaaaccttttcagaaatgttacaacaagcagcacagactctaagckctatgaaaaggagagtggatatgttcttgcaaactacaactttaagtgaaatgataaaaaacagatcctcataatgatgttttcattcaacattgtttcattataccattgataagaaaaaatattagtctcatatgtctcattccttaaagttacagtttccaagaacctatatatgacattaagtgaggacttaccgtataaggaaaaagatagtttaaaagttgaaggatgaaaaaatatgtaccatataaactctaaacataagaaaactagggtggttgtattaatatcagacaaaatagaattcagaataaagagaattaccatagataaagatgaaaacatttcaggctgggtgtggtggctcacgcctgtaatctcaacactttggaggcgaaggctggtggatcagttgagcccacaaggctggtggatcacttgagcccatgagtttgagatcagcctgggcaacatggtacagctctatctctaaaaacaaa

SEQ ID NO: 722768 - DNA, 862 bp, Homo sapiens
cttggtttcgtggttttgcaaagtattggcctccaccgccataggggccagagcttctgcctccaaaatttcctcccttcatgggtccaaaatttgaagactgattgttgtaattsccaaaatcatgtagcttccaccacctccaaaatgcttccatcattaccaaatccattatagccatccccactgccaccatatccaccaccaccatggctgccaccaaagccaccacgaccactgaagtttcctccacgaccgaagttgtcattcccaccgaaaccacctccacgaccaccaccaaagtttccagaaccacttcgacctctttggctggatgaagcactagccatctcttgctttgacagggcttttctaacttcacagttgtggccattcacagtatggtatttctgaatgacagtcttatccacggagtcatggtcgtcaaaggttacaaaggcaaagccccttttcttgccactgcctcggtcagtcatgatttcaatcacttcaatttttccatactgttcaaaataatctcttaggtgatgttcttcagtgtcttctttaatgccaccaacaaatatctttttcacagttaagtgggcacctggtctttgagaatcttctctggagacagctctctttggttccacaactcttccatccaccttgtgtggccttgcattcatagctgcatccacctcctccacagtggcatacgtgacaaacccaaagcccctggagcgcttggtgtttggatctctcattaccacacagtccgtgagcgttccccattgctcaaaatggctcctcaggctctcatcagttgtttcaaagctcaaccctccaatgaagagct

SEQ ID NO: 722769 - DNA, 1283 bp, Homo sapiens
agaaggcagagagaaacgtcagagcaggcatacttacttctaactgactcctcccattccatcggcaagagctagtcacagtgccaccttcacgccagggcctgggaggtctgtatgcaggttaccrggaagaataagtcagtttagtgagcattcggcccataaaaccaccgtgcaggtgaggaaactgctgcaaagtatctactgctacaaagtgcctacgcgaatcaaccagtgtcacatagaagcagattccatattccactgcagcactctttgcctacaacattgatgcttcctaaaaagacgtgtcttgcttttatttcttatatcacacttactatatagatttaaaaaatacagaaaaacttaaagaaaataagtttgcactatacttttccaacatagtcgctctttatgttttgatgcccgctaacctcttccacgtgtgtacccttattatatatcacacagacaaattttaattataaaatgttccaaacatacagaaagcagtataaaagaaacctagggatgcgccactcagatttaacaaatgttaacattttaccacatttgctcagttctctcctttagaaataaaatggatccagctgaaactcatctaattctttctcattcctaaaggaaatgaagaagtgctatcctaaagctggtgtgtatagatcctgtgaatgtttccgtacttttactctatatatatagatagaaacgtttttgtacttttactgtatatatatagatacaaatatatatactgtatatatatagatacgaatatatatactgtatatatatagatacgaatatatatactgtatatagatacgaatatatatactgtatatatattacaaaaagtactgtatatatatacagtaaaagtacaaaaacgtttctatatatatatatatacagagacagtctcattctgttatatatatatacatatatatatatatacagtaaaagtacaaaaatgtttctatctatctatctatctatctatctatctatctatctatatatatatatatagagagagagagagagagtctcactctgttgcccaggctggagtgcagtggtgtaatctcggctcactgcaacctgcacctcctgggttccagcaattctcctgtctcagccacctgagtagctgggcttacagccgtgggccaccctgcctgggtaattttttaatatttttagtagagatggggttttgccatgttgaccaggctggtctcaactcctggcct

SEQ ID NO: 722770 - DNA, 485 bp, Homo sapiens
attgtgataccaaaggctctctgctagttatttaactgaactaatcccccatgtttatttacaatatttgaaggactacattttagaataaactaaagaggggcaatgtaaattcataaagagaggagttgcaaaggaatagaaagagaaaaaaagtaaygaatcatagttgagtttttggaaagcattccagggtggtttctttacctgatcagaaatgggttcaataagatcattttattaaagaactgagaatgtcattttgcccacacaagccaaatatgaactcttcaatgcacaatagcctaacgtggttaactatgtgtgggtgaatctgatgcagaaatgtattctttaagagtaggcatgtgttgacagttcttgtgcaaatttatatgaacatccctgaaacattatacaaacatttgagatcattatgattattaatgaactctcagtgaatatgcaatgcttttaagcagccc

SEQ ID NO: 722771 - DNA, 552 bp, Homo sapiens
gttttttccccagtacctttttattttgtctttaagatatacactaccagggaaattttgccaaagcttagttatgagtttaaagccacataaaataatttctccctgtgtggttttgccaatacagcataccatttggttacttttgtttcattttgcttttgattttaggtattgattctgtttacttcaacttaacttgttttataaattatgtttgaacattttaatgaatcccaaatcccatagttacmagaaggcatatttttgataagtctctctttagttctgcttccttcatttgttgttgttctcttctgtaaggtaacactcttttttttttaagtttactctttaattttttgagataagaaaatcatatgtatatttgtgtgtatgtgtgtgtatagatatatataggtagatagatatttagaaagggaaagaagagagagggtgtattcccatctcattcttaaatagtagaatagcagtagaagtcttataagtacaatttagagattctttaaaaaataacttttgttttccttt

SEQ ID NO: 722772 - DNA, 1061 bp, Homo sapiens
atgctattctcataagtttttattatttattaacttatttacttcagaaatttcaacttttattatagattaaagggtacatgttcagatttgtcacctgggtatactgtgtgatgctgaggcttggagtcccaatgatcctgtcacccaggcagtaagcttggtacctaacagtacccctgcccgcttgccaccctcccccatctagtagtcccaaatgtttataaaattttgattcactaatggtacactttattttttctttccatagtgtcatgttctctttcattttaattcaccatttctgtcaattcaaggagaatctgaggcaaagaaaatacagacagatttgaacttactagatcaatttgaaccagaagcttaagtttacctttaattttgttggaaaaatartttgagtaaattaataatttgatcattaaattataaaagacagttgtaacatctaggaaaacttactatttttaggaccattaacttcaaaactgtttctattaatttacaaacaactttatgcattcttattaaagatgattctttaagaatcaatttagaaaacttaattatctgatcatatcaaaattaacaagattaaatatatttatatattttttattttctaattcagatagacattattttaaggaatttcagttagttaattattaaatatcaatattcaatgatattgaaattagtcaaactgatgattagtaaatatcccattttgttgctaaatagtaatggatgataacaattttcagttgtttaaataaaatcttacttattttgccaatcctcagccaatcttgatgattctttccatcacagcatcattttaaatcataatattttttaaaagcctgttgaagttacagtaattaatggggattaaattaattatataccttttaaaactctcctgacaactagcagaataccagtaaatgattcgtgaagatctgaaaaccatcataatgtccctatagaaacatgaattattatgaaggatctatgaattgtttaaaggagaaacaaaa

SEQ ID NO: 722773 - DNA, 1061 bp, Homo sapiens
atgctattctcataagtttttattatttattaacttatttacttcagaaatttcaacttttattatagattaaagggtacatgttcagatttgtcacctgggtatactgtgtgatgctgaggcttggagtcccaatgatcctgtcacccaggcagtaagcttggtacctaacagtacccctgcccgcttgccaccctcccccatctagtagtcccaaatgtttataaaattttgattcactaatggtacactttattttttctttccatagtgtcatgttctctttcattttaattcaccatttctgtcaattcaaggagaatctgaggcaaagaaaatacagacagatttgaacttactagatcaatttgaaccagaagcttaagtttacctttaattttgttggaaaaatagtttgagtaaattaataatttgatcattaaattataaaagacagttgtaacatctaggaaaacttactatttttaggaccattaacttcaaaactgtttctattaatttacaaacaactttatgcattcttattaaagatgattctttaagaatcaatttagaaaacttaattatctgatcatatcaaaattaacaagattaaatatatttatatattttttattttctaattcagatagacattattttaaggaatttcagttagttaattattaaatatcaatattcaatgatattgaaattagtcaaactgatgattagtaaatatcccattttgttgctaaatagtaatggatgataacaattttcagttgtttaaataaaatcttacttattttgccaatcctcagccaatcttgatgattctttccatcacagcatcattttaaatcataatattttttaaaagcctgttgaagttayagtaattaatggggattaaattaattatataccttttaaaactctcctgacaactagcagaataccagtaaatgattcgtgaagatctgaaaaccatcataatgtccctatagaaacatgaattattatgaaggatctatgaattgtttaaaggagaaacaaaa

SEQ ID NO: 722774 - DNA, 2826 bp, Homo sapiens
gttgtgggatgacatattaaaagcaccaaaagaaaatgtaaaagcagattgggtgcagtggctcacacctgtaatcccagcactttgggagaccgaagtgggaggatcacttgagcccaggagtttgaggctgcagtgagctgtgatcgcaccactgcactcaagcctaagtgacagagtgagtccctgtctctttaaaaacaaagaaaatgtaaaagcacctgattattagcaggtattaatgtcttttaattgtttgcttgatattaaccttaataaagttaaaataataacaggaacataaagaaactctttgtttctttgttgtatcttcccatatagttctttatatatggaaatgtaagaattttctttaaaggagatcaaaaattaaaactttctagtgaaaagcttaggattcaagttaaaagtcttaagaaagaattcttggtctggcccaggccatcccagtggcacatgcctgtagtyctagctacttgggaggctgaagcaggaggatcccttgatcccaggagttccagcccagcctaggcaacataatgagaccttcatctctaaacataaaaataaagaaagaatccatgcactaccctgatttccacaatgctaatgaatttccaattctttcagaaaaataataaataaccagcaatctaaaagtctattttctgttaagaagtgataaagcagactttatttatataaggaaaattcagattggattgacttttaaaaaactaaagtattttgacagggtgcagtggctcacgcttgtaattccagcacttggaaaggcagagatgggagtattgcttggtcccaggagtttgagaccaacctgggcaatgtggcaaaaccctgtctctaccaaaaaaaaaaaaaattagccagctgtggtggtgtgcacctgtagacccagctactcaggaagctgaggtgggatgattgcttgaacccaggaggctgagattgcaatgagccgagatcacaccactgcactccagcctgggtgacagagcaagacaagaccctgtctcaaaaacaaacaacaaaaactaaagtattttattaagataataggttaaaatttttaacattttttatacttggagttttccaagccttatttccatagtccccaaattgaactatatcactacaaattaagtgccatctgttgtgatagtttactactatcacaatggagttacataactcttaccgataataggagttatacagtgtatagtaaaaaaaattcagagcaggtgactccaactatttaggcagcaatcagtacttccctgtagctccccttgtccccatctgcaagataatataagtaaagaagcaatgaaatgtagatgctaggggcaggagttcatagtcgtataatgtgaatcctggccccactacttaccagctctcatgaactgaatgtttgtttaccccatccccgaagttgatatgttgaagccctactcccgttgttactgtacttgaagatagggcatttatggaggtaattaaggttagataaaggcgtaagagtggggctctgatccagtagggttagtgtccttaagagacaggagagagctctctgtctctctctctgccgtatgaggacacagtgagaagatggatgtctgcatgccagaaagaggttcctcacggggaaccaaattggctggcacattgatctgggattgctagtctccagaaatgtgagaaaataaatttctgttgtttaagccactccatttatggtattttagtatggcatcctcagatgactaaaacactagctgtgtgatgctggcaagttattaaatctctccaggcctcagatttctccttcctaagatgggataatgctgcccacaagattgtgggcagttgaatgggatagcatatgtaaagggctgtgcctagcacagtatctagcgtgcagtacagttcctaaacaaagactcttgtttgttactgcttgtactttagcattttatacttagggtttccactcttctccagatgtctgtcttgtgaagtagtgtgtaaaatcacaaagcatggatttcagccctctttcactgggctggaataggccccatctctagcgagtgagccggtggcagcctcacttccatgggcccaacacagctttgtttctctctgctgatcacacaggcagaaataactcttctgaattaaccaaaaaacagttttttgaaaagttaaagttcatggttaatgttatatcattcataatgtaatataatttgatataggatgagagtgaccatattacttattgtaactgtattattcctaaaagtataaggtcatgtttaactgaaattatataatattttgacccacaaattgattttattatattgctagccctagaaaaattgtttcattcaaaaaacatttttaaaaatacgtttttaaataaaacaacatgtgcacattacagcaaaataaaagttatatctttatgctaatcttctgaacattaagattaataagcagaatacttagtcttgatatttattcatgcactttattagtctcttatttatatctgtatctaatatttttctgaagaatatatagatttttcaatatggtcttgtttttctttttttttcttttttttttccagacagagtcttgctctctcaccccggctggagtgcaatggcacaatctgggctcacctcaacctccgcctcctgggttcaagcgattctcctgcctcagcctcctgagtagctggggttacaggcatgtgccacc

SEQ ID NO: 722775 - DNA, 2826 bp, Homo sapiens
gttgtgggatgacatattaaaagcaccaaaagaaaatgtaaaagcagattgggtgcagtggctcacacctgtaatcccagcactttgggagaccgaagtgggaggatcacttgagcccaggagtttgaggctgcagtgagctgtgatcgcaccactgcactcaagcctaagtgacagagtgagtccctgtctctttaaaaacaaagaaaatgtaaaagcacctgattattagcaggtattaatgtcttttaattgtttgcttgatattaaccttaataaagttaaaataataacaggaacataaagaaactctttgtttctttgttgtatcttcccatatagttctttatatatggaaatgtaagaattttctttaaaggagatcaaaaattaaaactttctagtgaaaagcttaggattcaagttaaaagtcttaagaaagaattcttggtctggcccaggccatcccagtggcacatgcctgtagtcctagctacttgggaggctgaagcaggaggatcccttgatcccaggagttccagcccagcctaggcaacataatgagaccttcatctctaaacataaaaataaagaaagaatccatgcactaccctgatttccacaatgctaatgaatttccaattctttcagaaaaataataaataaccagcaatctaaaagtctattttctgttaagaagtgataaagcagactttatttatataaggaaaattcagattggattgacttttaaaaaactaaagtattttgacagggtgcagtggctcacgcttgtaattccagcacttggaaaggcagagatgggagtattgcttggtcccaggagtttgagaccaacctgggcaatgtggcaaaaccctgtctctaccaaaaaaaaaaaaaattagccagctgtggtggtgtgcacctgtagacccagctactcaggaagctgaggtgggatgattgcttgaacccaggaggctgagattgcaatgagccgagatcacaccactgcactccagcctgggtgacagagcaagacaagaccctgtctcaaaaacaaacaacaaaaactaaagtattttattaagataataggttaaaatttttaacattttttatacttggagttttccaagccttatttccatagtccccaaattgaactatatcactacaaattaagtgccatctgttgtgatagtttactactatcacaatggagttacataactcttaccgataataggagttatacagtgtatagtaaaaaaaattcagagcaggtgactccaactatttaggcagcaatcagtacttccctgtagctccccttgtccccatctgcaagataatataagtaaagaagcaatgaaatgtagatgctaggggcaggagttcatagtcgtataatgtgaatcctggccccactacttaccagctctyatgaactgaatgtttgtttaccccatccccgaagttgatatgttgaagccctactcccgttgttactgtacttgaagatagggcatttatggaggtaattaaggttagataaaggcgtaagagtggggctctgatccagtagggttagtgtccttaagagacaggagagagctctctgtctctctctctgccgtatgaggacacagtgagaagatggatgtctgcatgccagaaagaggttcctcacggggaaccaaattggctggcacattgatctgggattgctagtctccagaaatgtgagaaaataaatttctgttgtttaagccactccatttatggtattttagtatggcatcctcagatgactaaaacactagctgtgtgatgctggcaagttattaaatctctccaggcctcagatttctccttcctaagatgggataatgctgcccacaagattgtgggcagttgaatgggatagcatatgtaaagggctgtgcctagcacagtatctagcgtgcagtacagttcctaaacaaagactcttgtttgttactgcttgtactttagcattttatacttagggtttccactcttctccagatgtctgtcttgtgaagtagtgtgtaaaatcacaaagcatggatttcagccctctttcactgggctggaataggccccatctctagcgagtgagccggtggcagcctcacttccatgggcccaacacagctttgtttctctctgctgatcacacaggcagaaataactcttctgaattaaccaaaaaacagttttttgaaaagttaaagttcatggttaatgttatatcattcataatgtaatataatttgatataggatgagagtgaccatattacttattgtaactgtattattcctaaaagtataaggtcatgtttaactgaaattatataatattttgacccacaaattgattttattatattgctagccctagaaaaattgtttcattcaaaaaacatttttaaaaatacgtttttaaataaaacaacatgtgcacattacagcaaaataaaagttatatctttatgctaatcttctgaacattaagattaataagcagaatacttagtcttgatatttattcatgcactttattagtctcttatttatatctgtatctaatatttttctgaagaatatatagatttttcaatatggtcttgtttttctttttttttcttttttttttccagacagagtcttgctctctcaccccggctggagtgcaatggcacaatctgggctcacctcaacctccgcctcctgggttcaagcgattctcctgcctcagcctcctgagtagctggggttacaggcatgtgccacc

SEQ ID NO: 722776 - DNA, 1747 bp, Homo sapiens
taaaaccccaattctgaaataactgttactaaaaggttagaatcaaggccctatggctgaggagaaggaaactagaaattacaaactttgtgcttttaggatgatggagttcagagtttctttgccatcatgtagtatagtttacccatagaggaaatccttcaaaaaccttcattagaaaactgccacagtaagaagtcctgcttcttaaagcagctgcttattcagctgttaagttctactcctatggaagctattttactgaacctaaatctgtttctgtatttgtttccttcatatgacggtcaatacatcttcccttctagcattaaatgtcctcccagatctctcattcttccctcttctgctctcatttgtactgttagacttcctccctctttttttttttttttttttttaaagagatggggatctcactatgttggccggggtggtctggaactccagggctcaatcagtccttccacctaagcctccaaagtgctggaattactagtgtgagccaccgtgtccgggcccctcatttttgttcctactcttgactcttcatcacagtgtctttccttacatcttcctcagtgccttcacaatgtaaatagaaatgaaacccacaaataatagcaagacaacttttctttactcctgttctctgtgcttttatcaaaaatgtaatattttaaacaaatccatggctatttctgtgcagctgtgaccagtagggaaaactccagctgctgatgactgtgctttgtcatatatttggagtaatcccattattattaaaataatttgaaaattatttttgccccaagacacaaaagctgaaatactcttttcacaaagtattattggtaggttagtagtgatttataaatatataattaggatttatttttctcagtgtttcttcattgcttggcccctttctaaccttcattgactgaaagcagatgtttatatcaccatctctgattttgcagaattgatctgtccttacactgcatttagcattgattgtgtatggaacataaattgcttttctgatgcatatgtattccatagctctttgaatttgtgactgtgtactataacctatttaattgaaaagaatgtgctaaaatttagtcattgtccattctgctaacaaaagcagttaaaacatgctagagaaatatatcagaattttaagaaagaggccggatttggtggctcatgcctgtaatcccagtgcttttgagaggctgaggcaagaggatcacctgaggtcaggagttcaagatccggctgaccaacatggtgaaaccctgtctctactaaaagtaaaaaaagttagtcgggcatggaagcgcatgccggctactcaggaggctgaggcacgagaattgtttgaacctgggaggctgaagttacagtgagttgagatcaggccattgcactccagcctaggcaacaagagcaaaagtgtgtctcaaaaaaaaaaaaaaaaaaaaaaaaaaggctgggcacggtggctcacgcctgtaatcccaacactttgggaggctgaggtgggctgatcacgaggtcaggagattgagaccatcctggctaacatggtgaaaccccgtctgtactaaaatacaaaaaattagccaggtgtggtgstgcgtgcctgtagttccagctacttgggaggctgaggcaggggaattgcttgaacccaggaggcagaggttgcagtgcacca

SEQ ID NO: 722777 - DNA, 1146 bp, Homo sapiens
cactctgacacccagtctggagtgcagtagtgtgatcacggctcactgcagcctcaacttccagggctcaagtgattgccccacctcagcctcctgagtagctgggaccacatgtgcactccactatgcccagttgattttatttattttcttgtagagacaaggtctcactatgttgccaaggctggtctcaaactcctgggcttaagcaatcctcccacctcaccctcccaaagtgctgggattacaggcttgagccaccgcacctggcctcaaaactcttctctttattaaagtacrtacccttggacccaaaaattccactacaaaatttatctacagaaatgctcacacaaggatataaaattttggttaaatttaagtattgacagagagaaggaatgagttaaagagcactattgtacaacatagtgactatagttaataacagtgtattgtattcttgaaaattgagaggaaaatagattttaggtgttttcaccacaaaaaaatgataagtatgtgagatattgcacatgttcattagcttgatttagccattccacaatgtatacatatttccaaaccatacagtgtatatgataaatgcatactttttgtccattaaaaataaccaaaaaatgctcacatatttacacaaagatatatgaacagtgatgtcccctgaagtgtaattctgatgggaaatacttgtatctgttatttgctgcatatcaaataagcccaaaatttaatgactgaaaacaacagctacttaattagtttataattccacatgttaggaattttgactgggttaaactgaacagttctggccttcactgtgttcatataaatgtggtcagctgctaggtcaactgggtgctagcacatgtggaggcttgcttctgctcaacacggtctttcctattctacaaggaacactggggtttgttcacacacttgacagcagcctcccaaaaacgaaagtgaaagctaggcctcaagaggtcaatgcttaaactggtacacatggcttctgccacagtctgttggtcaaagcaagtcacaaggccactcctgattcaaggtttaaagaaataatctcagcctcttgattcaagaagctacaatatcacattgcaa

SEQ ID NO: 722778 - DNA, 616 bp, Homo sapiens
tggtgaataccaggagtcgtggggaggaaacaatgaggagttatcatttaatgggtacagagtttcagtttayggtgattaaaacttctggagatggatggtggtgacggttgcataacaaagtgaatgtacttaaggtggctgaattatatacttaaaatggttaaaatggtaaattttaccttatgtatatttacaacaatgaaaaagctatacaaataaaaaataataattacacaggagtgacagtgttcacaggtggggtcatcagcacaggtggtgccataggtgggtgtctgagcccaggataactgaggaaggcttccatgcagggtggggacagaagcagcagcagcctgatgcaggtgtctgggctcctgcagagcaaagaaggcacccgcacagcagaaggatcagctacagcagtggaggttggttacatactgggtgattgatcccatcagtaaacatactaaagataatgagcagcaggtttctcactgccacagaagaaacttaaatatgttagaaaagaggaaacaagaatgaactttgtgttgttagcttgtaactggaggcatcaatgtgaactcatggcttgcgataggtaagtaag

SEQ ID NO: 722779 - DNA, 633 bp, Homo sapiens
ccagcctgggtgataagaaaaagaaatagaaatgaagcaccagtcatcatggctttggtgtttgaactatatgccagattaaccttaattggtgctaccttcttaatatgcacaacaaaactaaatgaaacacaataatcaacattctyactatattagtacttgaaaaagggacttatccctttaattttaaaactttcattcaaacttttaaatttaaaagtttattttaaagagtcatttagtcattttctttagatcattcaagtgtctccttacagatcatacataagccacacaacagaaatggaagacagatagatatatttaaaggtaaagagacaggtgatgcttttaactggaaaaccatcaaagtaaagctaaaatatgcctttgcaaataaatacaagtaaatgtaaagtaggatttggtttaccaaaattatacttaacatttttgttttgactggatatgctctttaaagggaagtgtctgtatgttcatttgcctaaagaagaaagagaaaagaagaaactcctgtcgctggcctattgatttgaagcatagtttgaaactaatttgtagggaaaggggtatctccaagtaattcacaacagtgtctgttcctagcca

SEQ ID NO: 722780 - DNA, 1111 bp, Homo sapiens
ttcacctgataatttccatggcaactggtgtgaggaaaaagtaattggtttgaaagataattatttcactctcttatctagagaaatgtatgtgatttctaaagattgaaacagaaaaggtatattgcctatgatgagcagttaaaagtttttatatgtgaatcgttataatctctgcaaaatttcattaatccaaaattttcagagtgagataaactgtatgccccgattcgtaccctttggtaaggaaagtttcaagtgtcttcctgctgcataacccaacacttcaaacataaacatatctatcaaaggaatgaccagatagccagtttacaaacctgctgacctgttcttaaggaagaattttgtgaacaggagttagtctaatgttaaacctcaaattgacttccttttaccatccagaaaatcctaacactgactcttgaaaccaatgaatatgtagtaaaggaatgtgtgcattttactattatgttcagaaaaacataatttataagtaaaaagtactgcaaccatcaatgcctgataaaggaaaaataccttaaaattgtttttatttttgccattgctcactaatttgaatgagattgataaggatgaatttctttctctctctctctctctctttcttcctttctttttttgagacaaggtctcaaaaaactatgtttcccagactggtctcgaactcctgggctcaaacagtcctcctgcattggcctcccaaatgctggaattacaggtgtgagtcaccaacgcccagccctaggatgaatttctttttaattggcatgttatttaggtgctttcagaaatatatttatagattttcaaaatgagagaaactttggaagtcatctagcttataaatgtatctagcttagaaaatactgtaaaaatgagttccatgttgttaagtacatagtccttaaaaaaggtaaattgcagctttaatttatttagactctttataaatatgctctgtgaatttacaagacaggatagaaaatagagaattgcccaaactagcttatcagacaacccattttmtgattcatatctgttaaaattttctagaaacacattttaagaa

SEQ ID NO: 722781 - DNA, 599 bp, Homo sapiens
cttcagaataaaaatataataaagtaatacgcatacttgactattcaaagtcyggttaagattatcctcatccaacacctgaacaattcagatcctctggtcattttaactctgatgctaaaactaccttcttactattgttcaccttgcttttaatacttcccatactttttcattattattaatttatacactgaatgctttatatttttctcatatttactgtttcctaagtatgattattttttccccactctttatcattccctcttatatctcactactttctttttgtatataatttccttcttcatgaagtacatccttgaataattctttcaggatgggtctgtaaatgataaactctctgttttcacttatctttaaaaagtcttttttacattcacatttgaatgatagtgtctctaagtaaaatatcctgggttagaaatgcagtatactatgtggcttaaagattttgaagtcatactacttaggcttaaatccctaatgcatcagtaaataagaaacatataatgtgagcaagctaattaactactctgctttctctgaatctataaaatgcgaacaatgatagc

SEQ ID NO: 722782 - DNA, 855 bp, Homo sapiens
tgctcattcattccataaatctattcaaagcatctatttcatgcaagcaatgtgttcagttcattccttctctttctttaggaactcctatctcttccagagcactccattctccagatcttcttttgcatatttttatatctcttttcatgctctgcagattttttcctagttcattttctctttctctgttagttacctgtagcatccaattctacattttacctatactaccattgtttactccttcctgccccttcctgctgtaatgagctcttctgaaatagatataatgtctttcttccacatttaagaaatagtttataagtattttctaaatcctgttttgattcttgtttcatttcatggtttattgattcatacttcccatccccaccccaccctgcacccaggttcttaattcatctttcttctctcgtgcctgacaaacattttcaatggttccagtcatttattcccctttactcattcttccttgagtttctcatgatgatatggctgctatttctgaaacctttgcttcagactgttttattcacatttaaataggccttgaaattggaaggttcacaggctctcactcagacttcctcctggaggtccaaaaactttatttcttgagcacatcatgtcctaaataacacacacytgtattggattggccattcagaattagatattacattaaatattactttccttatatctatcaaggtaaagtcccattaccactgagaggggtaagttaatttattgataacttgcttgccatttactcctgctggttggcagtttaaagagcacatgcttcctgcatctcatttatgtagctta

SEQ ID NO: 722783 - DNA, 1338 bp, Homo sapiens
tgctgctggaaatgtaatacagtggagaaaatggtctttaccagaattgttgagagcaagcgggacacragaatgataataataatatttatcaatgcacagtgattataatatacactgatagttttgttgataaactttctccttagttcagccaaaaccgggctcttgtcacatgatcaggaaaagattaggcttgtggacacagaatggtgaggaaaacagaatttattgggtgaaaaggaaaaaggaaaagcaactctcagcaaagtgagagagtcctcctatcaggtttcccgcctcacacgttgaatcccaggtcaccacatagcaacgggagaggccaggctcctccccactgaacttcctgaggctccaccccattctcccagtgctcaggtgggcgttattcagaaagaatcagtcaggaaagggtggcttcatccaggaagtgtagtcaggtttttcagccttcaggctgttttaggtttaaatatggagttttgctggggacccttggctgcctcctgtctccactggttttgtgccagaagcttctctaacaactttgtatatgaattcatataaacacttctggcccattgaggtagatgctattatcagtccccattttacagataaggagaatcagtccagaaaagttaaggaacttgccagagtcacaccagtaataaataggctgctggactctcctaggactttgtattgtctcctggtagggggaaaacccccaagagcacttaagtgacaagagctggtatctcagtgaccttccaggcctcttagttgctgggtgaggtatgcaagtttagggcagcagttgaactactcaggttaatagagtgagcagtgctgagctggcagtctgcctgccctcctcccacgcagcactcagcctatcctccaaatgaatgttgggcaaatatttagagaatatcgttttgaaagggggccaggttattagcctgcccagggcgcctacgcatcttggcccagccttgctcccaagcctggcctgctgtctgtgctcctaatatgtgaaacaactcacatagcatggaggattaatctgcttttgggggagaaatgcaatctggtgtttctcaggactaaacttctgtggattggatgccacatgcccggtgccagagggtccgccaatggtgctcgtggccacgtcacctcccccacaatcccacgtgcttctcaagtctggaaagcacagggtacactcccgggaagagaaaataaagcaagtgagattttaaaagatgaataagatggaggtaagaatccgtttgaagagatgctaatgca

SEQ ID NO: 722784 - DNA, 1338 bp, Homo sapiens
tgctgctggaaatgtaatacagtggagaaaatggtctttaccagaattgttgagagcaagcgggacacgagaatgataataataatatttatcaatgcacagtgattataatatacactgatagttttgttgataaactttctccttagttcagccaaaaccgggctcttgtcacatgatcaggaaaagattaggcttgtggacacagaatggtgaggaaaacagaatttattgggtgaaaaggaaaaaggaaaagcaactctcagcaaagtgagagagtcctcctatcaggtttcccgcctcacacgttgaatcccaggtcaccacatagcaacgggagaggccaggctcctccccactgaacttcctgaggctccaccccattctcccagtgctcaggtgggcgttattcagaaagaatcagtcaggaaagggtggcttcatccaggaagtgtagtcaggtttttcagccttcaggctgttttaggtttaaatatggagttttgctggggacccttggctgcctcctgtctccactggttttgtgccagaagcttctctaacaactttgtatatgaattcatataaacacttctggcccattgaggtagatgctattatcagtccccattttacagataaggagaatcagtccagaaaagttaaggaacttgccagagtcacaccagtaataaataggctgctggactctcctaggactttgtattgtctcctggtagggggaaaacccccaagagcacttaagtgacaagagctggtatctcagtgaccttccaggcctcttagttgctgggtgaggtatgcaagtttagggcagcagttgaactactcaggttaatagagtgagcagtgctgagctggcagtctgcctgccctcctcccacgcagcactcagcctatcctccaaatgaatgttgggcaaatatttagagaatatcgttttgaaagggggccaggttattagcctgcccagggcgcctacgcatcttggcccagccttgctcccaagcctggcctgctgtctgtgctcctaatatgtgaaacaactcacatagcatggaggattaatctgcttttgggggagaaatgcaatctggtgtttctcaggactaaacttctgtggattggatgccacatgyccggtgccagagggtccgccaatggtgctcgtggccacgtcacctcccccacaatcccacgtgcttctcaagtctggaaagcacagggtacactcccgggaagagaaaataaagcaagtgagattttaaaagatgaataagatggaggtaagaatccgtttgaagagatgctaatgca

SEQ ID NO: 722785 - DNA, 1440 bp, Homo sapiens
atgtagattaactaccaggcctaaacagtaatacaaatagaggaaaacaaaattaacgtgattaaatacacttggaggctatttagtcaacagtcagattgcagacatttgcagctgcagctccaaaagctggttctcttctcagctgtcactaattaatgcgattttcctaataacagttttctgatagacagacagcatcaaatcaaaacaacttcatttttatgctgatgaggcctaactactgcaacaagagcccaacagatgcaaatggcaatgttgctaactgcaggcttgcatgtggtcttaatcacacacaagttgaccatcagtgctggaagtttattgcacaaatacatgggatgtgggagagcttggctagttacatcgtcacatcagccttggtagtactgggtcacagtgggatataccacagctctaggagaaaagtgctctagacaattgtccattgctccggacctacacctgtgtaagtgactcatcttcccttaatttgactgacacttatttttcccaaaagacagaattcaagcaggccggttcacatcattcaatattcagaacccttgctgggcagggtcagcaggaaggcaaccccaaaatggccagcatccctcaagtctaatatggatgactttggctcaggcattgatccctggtgtaatcaattgcagttaatcggtttctccaaagcatgttacataaatcataaatatttatggatcaagaaactggtttacatttcctaagaagggtactagacacatggaaggccaggatttactaccttttctactgacaaccagtacaatagcatcgcaaactgggccaatcagtggcatttgacctctggccatgaggaacttctggtcatctctaggggagcttgaacagagaagaatccaaattggcaggagagtgaattgtagattttcaagaccatgtcagcccagagaaacactgtacatattgatgcctttggatggagaggcattaaatacagtgcaaaatgttattaccaaaagattgttgccaaatatcctccgaggataagaattctgctagttgactttcttgaaatgcatctcactttataatagaaacatccttcacatggagatatccagaaagctagggaaatgtacatcttaatctcatggcccagactcatccatttacaaacaaagcagtgaccaggacaaagaccctggaaaaagtttgggcccaccacactgtgagggtccagctccagggaggtctgttgtgctgcaccatggaggtggcaactacctggttttgctcttgttcccttacacagatgaggagatagagacttccccctccttccctctttttttcctctcttctcggtgatttctacctatcctaytttgtaaaggttttaagtgttttcaaggg

SEQ ID NO: 722786 - DNA, 342 bp, Homo sapiens
ccccccttcctcccctttccctccccttcccctccccttcccgttccctaccctctcctccccttctctctctctctctctctctttctctttatctctctycctcccctcccctcccctcccctctcgtcttctctcctcttctctcgtcggggctcatgagtgagttacttttgagagatgctattttgatagtggcaggaccagcaacaaacctgtaccatctcagcattcaggaacaatggtgtccacatgtctttttgaggttgtacagggcattcttaaggcacatttgaatagtcccacaggctgagaggagttcctctgatcttaaatacagca

SEQ ID NO: 722787 - DNA, 210 bp, Homo sapiens
ctattaggtcacctcattagccactttttacatttcttcttmttagttgctttttaaaaaatctcaagagagaataatgttaacaggattgtggaataggatttttcagatttcatccccttatataaacaccaattttgacaaaaaacacagacaagagtgccttatgggaggctaggagtccaccagggagatctcagcaccttattg

SEQ ID NO: 722788 - DNA, 598 bp, Homo sapiens
aagaaaaagcaatacactattattttgccaaatgatagttcaagcaataaattctgtagtttcttaaggtaggcttcacaaaataggtggaattgtaatggtcctttaaggagagagaggatataaatatgctttaaaaaccaacaggaaggactgaaggcccagaaaaagtcagtagagacacggatgcataaaaagcaaaggawgagtgagaaggagagtggcatcattagactgaagatttacaaaggagttctgaaagattcagatagacaagcagaatgttgccagaacaagcggaatggcctttaacctttgggcactgaatgaacttttcagatttggggtcaggaaagtatgttaggcaaatgaatctggagcatagcacaagaagaattggaatggattaaatttgttagagatggcatgcctttgcaatagtcctggcttgagaaggtaaaatattgacctagagtgaggaaaggcaaaaaatggagaagatagaaaaggaagaattgactggacatggtggttactttacggatttgtgaacaaggaaagagtaaacaatgactgagttttcaagtgtgggtaacaa

SEQ ID NO: 722789 - DNA, 624 bp, Homo sapiens
tcattaacacagggctgtgggtggtgataatggagtgagttgtgtctcaaaggtcacaaactcaccattcttactgaagattaatcgttttcytgaaggaaagtttcttcatttgctgtatgttcttaatttccagggactttaatatagtttgttttatcattttaatcatttaaatttctgtttttctggagataatttctattgatttccccattcagtcattgcagaacttcccaattttttcgttaatcggttgttcgcccttgctcaaagtaatcacttaaagagctttttaaaaagtaatcgcttgaagagctttaaaaattactgattcctgtgtttactaaacagtaaacagtatactttgatctaattaatctgaattgttatctggtcaacagggctaataaaaattctctgggttattctaaattgtaacctggttaagaactaacttcttcaatccaatccatagtgggcccatattcttcagccatttctggagatcacaaaatttgatctttatgacatactacaagaaagctgttgaatgggtccttctatcttatacaagtcatgcatcagcacagcagagaaatttctgacaagtacctctttatt

SEQ ID NO: 722790 - DNA, 624 bp, Homo sapiens
tcattaacacagggctgtgggtggtgataatggagtgagttgtgtctcaaaggtcacaaactcaccattcttactgaagattaatcgttttcttgaaggaaagtttcttcatttgctgtatgttcttaatttccagggactttaatatagtttgttttatcattttaatcatttaaatttctgtttttctggagataatttctattgatttccccattcagtcattgcagaacttcccaattttttcgttaatcggttgttcrcccttgctcaaagtaatcacttaaagagctttttaaaaagtaatcgcttgaagagctttaaaaattactgattcctgtgtttactaaacagtaaacagtatactttgatctaattaatctgaattgttatctggtcaacagggctaataaaaattctctgggttattctaaattgtaacctggttaagaactaacttcttcaatccaatccatagtgggcccatattcttcagccatttctggagatcacaaaatttgatctttatgacatactacaagaaagctgttgaatgggtccttctatcttatacaagtcatgcatcagcacagcagagaaatttctgacaagtacctctttatt

SEQ ID NO: 722791 - DNA, 624 bp, Homo sapiens
tcattaacacagggctgtgggtggtgataatggagtgagttgtgtctcaaaggtcacaaactcaccattcttactgaagattaatcgttttcttgaaggaaagtttcttcatttgctgtatgttcttaatttccagggactttaatatagtttgttttatcattttaatcatttaaatttctgtttttctggagataatttctattgatttccccattcagtcattgcagaacttcccaattttttcgttaatcggttgttcgcccttgctcaaagtaatcacttaaagagctttttaaaaagtaatcgcttgaagagctttaaaaattactgattcctgtgtttactaaacagtaaacagtatactttgatctaattaatctgaattgttatctggtcaacagggctaataaaaattctctgggttattctaaattgtaaccyggttaagaactaacttcttcaatccaatccatagtgggcccatattcttcagccatttctggagatcacaaaatttgatctttatgacatactacaagaaagctgttgaatgggtccttctatcttatacaagtcatgcatcagcacagcagagaaatttctgacaagtacctctttatt

SEQ ID NO: 722792 - DNA, 709 bp, Homo sapiens
taagggacaggttactgtatccagttcctaaggtacttccccagggtcagcagtggcttcccaggatgaagtcagcagtttgtcccgggctctctgagcggtgctttcccacagatcagtgatgctgttggaaaaggacgacttacggatgcagaggtggaaggggggtaccagcagctgaaccctcaatcaggtccaggcagatgtattcccgatagaacaggctgtcaccactgaccagctcagacttagaaatgtgcctgtctaggttttcagagcaacccctttcatcactatctgtgaggaggattcgaactgaaagaagccagaaacagcagtagcagcgtctccactgggatgctccattcataggggagccagagccgcatccattcatggtggggtcagggagtcctttgcgggcattggttctcgtttctcagcaagctgcacttcccggggggctgcatggctgcatcgttcagaatgaggatgtctattaagaagccgtcgccagagctattattagcacagccatccyttggaaatttcgcagaatacgcctgaatgtacgaacagttactctgctaacagggtactggagaaaaaggcaccaagtcgctcgttacgcacaggcagcccacgcagctttctcggtgcagcaccgggaatcttttctgaattcaacgtgcaccaacatttgagcagc

SEQ ID NO: 722793 - DNA, 709 bp, Homo sapiens
taagggacaggttactgtatccagttcctaaggtacttccccagggtcagcagtggcttcccaggatgaagtcagcagtttgtcccgggctctctgagcggtgctttcccacagatcagtgatgctgttggaaaaggacgacttacggatgcagaggtggaaggggggtaccagcagctgaaccctcaatcaggtccaggcagatgtattcccgatagaacaggctgtcaccactgaccagctcagacttagaaatgtgcctgtctaggttttcagagcaacccctttcatcactatctgtgaggaggattcgaactgaaagaagccagaaacagcagtagcagcgtctccactgggatgctccattcataggggagccagagccgcatccattcatggtggggtcagggagtcctttgcgggcattggttctcgtttctcagcaagctgcacttcccggggggctgcatggctgcatcgttcagaatgaggatgtctattaagaagccgtcgccagagctattattagcacagccatcccttggaaatttcgcagaatacgcctgaatgtacgaacagttactctgctaacagggtactggagaaaaaggcaccaagtcgctcgttacrcacaggcagcccacgcagctttctcggtgcagcaccgggaatcttttctgaattcaacgtgcaccaacatttgagcagc

SEQ ID NO: 722794 - DNA, 2210 bp, Homo sapiens
cccggcctatctgtgctttttttttttttaagtgactttaaaatttaaaaacccagaattttaggtacttttgtattatgaggaactcactatactaggaagcaacttatgagtgtgtaaatatttgatctagcagcaactttccactgatcctggcaggtgacagctctcagtgaacagcgctcatcacctaaagtgagaggctgtctattctcattgtgaatgtccctcagagtcactaggagccattgggcaggccaggaacttactgcctacttcctcgtctgtcaggtggaggtgttgacacaagccttgaaccctcaacaaataagacaacagccacatggtgcctgtaagtattgtaagaatcggcggttgtggcatttcattttgtctgatctgggacccgccgtgggtttccctttgaactgaacattgcaactttctaggtatagacttttggcaagttacttratgttcctgagcctcgatttctggatctatacaattggaattaacaagacctgctgtgcagtcttgctgcagattatagataatgtacataatatgcacatcaccgcccaacagataatagatattattattattactgttattattagctgatcatagtttaggttataaccatttccaaaagaatttcctttgtaagaacacacttagacaactcaggtgcattttctatttttctctacagactaccttctgatgtaaaatataattttagttctaactcctaaaaaatggaatgaaatgggttctccatcatttttcggcagtgttgtcactgacttgctgagtgacgtagggctgcaagggcctgagaaggtagaaggaaccagaagttgacctatgggcgtggataatactgcgccacacagttgaggatgagacacagcaacacctcaggggtaaatgctgaagttcagagcacgcacctttagatgtgactgacgggcattcccatgggaaggcaaacagtgcaccctcaattgctgaaaggttgtgggctatttaaatgcatttgaattcactcctaagttattcacacacgagcagggcgaacatctcggcaaggagcatacacttggtgcactcagaggacagggatggaattggaatgtagggcacagttatttaggacaagactgtttcctatgattaacttacaagatgtaattcacccggggtctcattaaagctcacagcagttacctatgaggctcaaaccaaggattgacatctaacatagtggagaagacggtattgtatacagacaaaagctgccagatttcacgcccttagtggatgctgataatggaaataataccatagcatatattttatttaacatgtactctgtgccaaaaactccctctttatacattacacaatgcaaccctcatagcatgcctatgagtaggaatctgagatgaagaaaaggttagaactcattagcctaaagttacaccactagtaagctgttggttggtggttcaaacctcaggagtcagctaccatagcctgtactgctgaccactgtgttattgcactctgtgtctttgggcaggaaagtggattaaacaccagtttcagcctgctatatagacagataaaaaaaggcccttctggaagattcaggctgacctgttcaaagtcacacagggagaaggagcagaatcagagatgtgactgtgattgccatgagggttacgttgaaaatcaacagaatccataagtagctgcattctaatacacaccaagaaggatgccaaggtcccagactgggggctgcagaggctcagcctatgcctcatcatggggctcggccctgttgacccagaacatttccaggtgtctgcagagctctgctcgggtgccatgattctgatttcaaggggtggcagaaatgttctgtggctgaacatgatttttggcgcttaaacttccaattctttcctcaaggttcccctccgctcctccagaaaccaatctgagacttcgcactgcaagccctttatcaacccatgcctccttttgctcaaaattaagccatgacggaaaaaacggaatgcactttggaggtcttaaaaattgacttggatacaaatctgcttccttctaggtacagacttttggcaagttacttagtgtttctgagcctccatttccgaatctatacaatggaa

SEQ ID NO: 722795 - DNA, 957 bp, Homo sapiens
tttcctgtctcagcctcctgagtagctgggattacaggtgtctgccaccatgacaggctaattttttgtatttttagtagagacgggttttcaccatgttggccaggctgttctcaaactcctgacctcaggtgatccgccttggcctcccaaagtgctaggattacaggcatgagtcaccatgcccagcccctctctgttttatcatttgtcaaatggagatactatgaatactttcttctttggttgttgtgaggattaaataaaacataaagtgcaattaagttcttagcatacttcccagagcatagaaagttctcaattaactttcagtttttcttattttgtgctgatgttattatttccatcattatatgttttaacttcatgctataattcaatttggttcaccaagtactgtgcaatcaaagatattctagttctagtagaagacatcaaacaaatgtaagtgtacttttccaatttggaaaaatatggtatttgagaaactgctaaatagaacctaagctaaatatagtaaagtggtgagtggtcaggaataagacagttatcatacaaggtgttatggaagtaatcaagcttgtgatgaaatggaaaagccctctaactkgagtgacagtgaggtgatagccttaacaatgcatttgctttgtcatacaaaataacataaagaattttaaataagtattggctatcacaccaaagaattggtgaatagagactgtagatactcaggcagaagagttatatgaggagattggcagtagacaggtaggctaaataggaaggggaaagtctggagggggaaatatcagctatagaggaatttagaaagtcacttctgatctgctgagagcccaggactgtgttaataacagaaggaattaagatggacttccatctgctctagaggaatgactccactggacaagttca

SEQ ID NO: 722796 - DNA, 2034 bp, Homo sapiens
attattgtttagaaaataaacttacttttataattttttataaaaatgtatggccaaatgagaagcccagaataaataaaggccaaagtttgtaggacagtttagcagaaaatttactctgttatctaaaatttttattgatttatgctgtaatatcccccaattcttccctgagtactgctcattttattgatcttcatctgtaaaataattgcttgcagtatattgttgaatcctgtactgccagactttttatatggtgggatgcctactgggttaagtcagtgtcaaatccaggaamttcacatcattagtacctttgagtagagtaacgtatttgaaatattaagtcatgtgtaaaacactatcatgcattttttccattttgcttccccatgccacactagctcaggtgccctgtcttcttccatactgactgagaatagctatattttgtgagggctatggcagagtcaaatggggggaaataaagtatcttcctagctttgctttccaaaagcctaaagtcctaagatgacctggtgaactgagactactcctaacctcagaaatgagagaaataataaaagagagtggtgccttgagtccctagacagaaaagactcccccactaaagaagggagagagagatggaggagacatagtgagggcgtaggtatcagagatgagggctgaacaggtgtggaagggtgacatggggctcccatttatgggctctgtgtcctgtttctaggcaaagccctggagtgtcaccaagattgcagacaaaaaacatgaatagagaatctaggcagttgggtgtcagcaccatggtgatttcagtgcctccacccagcatgggatcccatgaccacacagaccactcatgaagccacacaaacagaagtgagggatgtcaggggtgacatgtgtgaactgagaactagataggatggacgccaaagcagatatttgtgaagataaatggcaagtagagtccactcagctaagaaggagtagagaggattcttcaactgaacaggattaaatgatgaaaaactaaaaatagccatcaaatccaggcacaaaataaagaactgtaaccggaattataaaaaattttaaatagaattaataattaaataagaataattttcaaagaattacatgtatatgtatgtgtacaacaaaaacacacacacatgcatatcttgcagagcatatttcatacacctggttattagagcccaagccattctgttggaggcattcaaaaaatggctttttctaagaaaaatcaaagaatgtactaatgagaaaagtctcaaaattctcaagaaaattctgtatgactttcagtaactcagataagtttttagtcatggagaaagacactaacattaacatattctgggtctttttctactattatttatatttcacacattaagtaggatagatgtgtttaagtattaatctatgacctgtattataaaagctgtgtcttcattacaaacacctaactttaaaattgtcattaacaaactagtcaggtttttgaaattatctgacataaacataataagaacctttaggttgactgtaaatatattagctatattagagattaaatatggctatttttatgaggtctataatatttagtccttaactttgaaaaagttttatagaacattagaacatcatcttcaaattggcaaatatgataggtcactaactgaacatgtctaatttggctaataaaggaatatattgttcattttttcagaatgatagttactatttcagaccaattagatgtacttactattctcttcctcccctccaatatattgtccccacagacccttatttaggagaggtttgctgagggaaatatttacacctaagatcgtaagggtacaagtatacacaattgaaaattgttgccaggcgcggtggctcacgcctgtaatcccagcactttgggaggtcgaggtgggcagatcacgaggtcaggagatcaagaccatc

SEQ ID NO: 722797 - DNA, 678 bp, Homo sapiens
tccaactaaaagatattggcaatacaattaaatgaccaaaaatataaattatgtttacttacctccttcagtaacttccagtcacagcacctggtccaaaatattgtaatcagtttttaattaattaacacatcaaacctgggaaaatgattaacatccctttatgtctactataagtaagtcatatacatactgctagcttctttcccatttattatttaagttttccaacaacgttgtgagagatacattattatactcattawaaaaataagaaaattgagattttggaagtctaagataacttggtacatccataaagttagttaaattatgaattcttgatatgtttgattctgtacaaataagctatttttatttctatttatgagagaaaaagatagtacaatttaattaaaaaccataatatgccaggagcaagatggtggataggaggcagggctactgtgcatctcccatttggacggacagaacagagtgtagaggctctcattgtgaacttttcttccaagaaccactgcaggaatggaccaggaaaatcaaaagaattcacagatcctttgaaaggaatagcatgccactgcaaacttcacaagacaaacaaaaaactgtgagtccctgaagtgtgagaggaggaaaagtttgcctctgaacaca

SEQ ID NO: 722798 - DNA, 1411 bp, Homo sapiens
tgagctgcgtagttgtcgggtatttgccgaggtctagtggagtggggggccatggagtctagtgttacacaggagaacctgaaatagcaaggactgattacaatagataaaactatcaccagggcatttcctgatactctggaaaactgaaaaagaaacactgctgctaaaacgcactcactgtgaataacaataatattttttagaaaagtaagtaaaaacccatccagagtctgtgaatatcaaaagacaagtcttggggagctgaaaggaagggcaaaatgagaaataagaactataccctaaagactgcagagaagaataaagaaaccccaaacctagctctgaatgcattaccaacagtatattctgacttcagcaaattaaatatataagacattaaaaagacattagtcaaaatttgtgccagtaagccttcatctgactttggtttaaaattcaatttaacatcttctcagttaattaatcctgtgatttccaagaaacaggacaacatagtttattctgtaaagaatcacaggcatattgtgttagggaatcactcagcagcagcgagaccacaattaactcctataaatgggcaaagcaaatagctgcaagcaaatttattaaaaaccagctgttaattagcagcaatagttccagcaaaatagactgcagcaaaaaatgtactaaaaaaaaaaagcaatggcgattcactgccatggtaactctgtttatactttttgagaagttaatgagaagaccccttgatatcattcattgaaaatgagaataaatggaattggtgagaatggatgattgtccctgttataaaggcttattaattgtctacccagggttaacattttagtaggggaatgaaaatggtaaggcgaaggtataatgaatggttctgcaaagagcaaggcagaaaaatcaatcaaactattatgattcagataggaaataaaggttccacctggcatttcaccaccaaggatggtgaagggcagatccaaaaattatttaggaagaaaatttgacaggtctctcaatgaccagctgaatggggaggaactgggtacacacagatatgaagatgagaacagtaggccaggcacggtgrctcactcctgtaatcccagtactttgggaggccgaggcaggtggatcacttgaggtcaggagttcaggaccagcccggccaacatggtgaaatcccgtctctactaaaaatacaaaaaaaattagccgggcatggtggtgtgcacctgtaatcccagctactcaggagactgaggcaggagaatcacttgaacccaggaggcagaggttgcagtgagccgagatcacgccactgcactccagcctgggtgacagagtaagaccctgtctcaaaaaaaaaaaa

SEQ ID NO: 722799 - DNA, 1411 bp, Homo sapiens
tgagctgcgtagttgtcgggtatttgccgaggtctagtggagtggggggccatggagtctagtgttacacaggagaacctgaaatagcaaggactgattacaatagataaaactatcaccagggcatttcctgatactctggaaaactgaaaaagaaacactgctgctaaaacgcactcactgtgaataacaataatattttttagaaaagtaagtaaaaacccatccagagtctgtgaatatcaaaagacaagtcttggggagctgaaaggaagggcaaaatgagaaataagaactataccctaaagactgcagagaagaataaagaaaccccaaacctagctctgaatgcattaccaacagtatattctgacttcagcaaattaaatatataagacattaaaaagacattagtcaaaatttgtgccagtaagccttcatctgactttggtttaaaattcaatttaacatcttctcagttaattaatcctgtgatttccaagaaacaggacaacatagtttattctgtaaagaatcacaggcatattgtgttagggaatcactcagcagcagcgagaccacaattaactcctataaatgggcaaagcaaatagctgcaagcaaatttattaaaaaccagctgttaattagcagcaatagttccagcaaaatagactgcagcaaaaaatgtactaaaaaaaaaaagcaatggcgattcactgccatggtaactctgtttatactttttgagaagttaatgagaagaccccttgatatcattcattgaaaatgagaataaatggaattggtgagaatggatgattgtccctgttataaaggcttattaattgtctacccagggttaacattttagtaggggaatgaaaatggtaaggcgaaggtataatgaatggttctgcaaagagcaaggcagaaaaatcaatcaaactattatgattcagataggaaataaaggttccacctggcatttcaccaccaaggatggtgaagggcagatccaaaaattatttaggaagaaaatttgacaggtctctcaatgaccagctgaatggggaggaactgggtacacacagatatgaagatgagaacagtaggccaggcacggtggctcactcctgtaatcccagtactttgggaggccgaggcaggtggatcacttgaggtcaggagttcaggaccagcccggccaacatggtgaaatcccgtctctactaaaaatacaaaaaaaattagccgggcatggtggtgtgcacctgtaatcccagctactcaggagactgaggcaggagaatcacttgaacccaggaggcagaggttgcagtgagccragatcacgccactgcactccagcctgggtgacagagtaagaccctgtctcaaaaaaaaaaaa

SEQ ID NO: 722800 - DNA, 1425 bp, Homo sapiens
tgcatggactcactaagttaagtctcaagtggtccttgccaaactgcagccagtattcagcggtgctactccttcactgctttcttatcataaacagtgtgctaaggtgaagttgtggaaacaggtcttcctcaaaggagggagagaaagaaagtcctatgaattggagacctcgtctagtcaggtgcctcccaaaatcagcaaaaaaaccctcacacatagaaaagctccctgtattttatttgcagggctatgtgaactcttgacatcatggagaaaaaaaaatatgaaacagcttaagtgcagggaagggataggtgccttggggcaaaaagcctattgctgtatgcaaatggtttccttcaacagggggaaaaaaacctcttaattgctacatcctctccacttctaagaataaacagaaactgcattgttctgaatcacattttagatgactgggccaactgcctatcctacccagtaatgtatctgtagcctgcaatgacaccctcaacattataaaaaaagagataggtgccatcacagcccccaaagaaagaaggaaactgccatagaaaagactaaattggaacaaagccaatattcccaacccttgagagcaacaggggcagtggcagggtcctctccagcaccctgtcttctgtagctgtgtgttcactcttaactggctaatcagaggttcagtgcttcatcagccttcagaaaaagtctgaggacaagaaggcttggaaaaaaagtgaagagtctaggtccacatttactcacccttcagggatcccagatgagtgcccagaaatgacacaggatttttctcagtcactttgctagccagacacccccaactgaggccttgcttgggcacactacctgctgcaggaggcagcccacacactcagccttcccaggccatgcctggtttgcacactggctcagcctgcacctgggccaggcatacccctacccacctgtgttatagcttgtacacacatttggtagttcccaagttgttgttccatatccaagaagaatgaggacacactgataattgaagagtgagaagggcagagaataattttattgggtgacagagcagctctcagtggtgaggggacacaagggtggtcctccaccsaagtcaggtggtttctctcaatgtgtctgagtccagggcttttataggcacagaatggggatgagtgggccataggtggcattggaaaagataccatttgatgggttaaaaagcgtttctcaggaagaaccagttgggaaagagtgggcaaatggaaacagaagtcctcactccaggttgtgggtttcagactgttttttggcttgaagatggagtttcaccagggacccacttctgtctgcctaggatttgtctgcctcctgcctctatca

SEQ ID NO: 722801 - DNA, 1425 bp, Homo sapiens
tgcatggactcactaagttaagtctcaagtggtccttgccaaactgcagccagtattcagcggtgctactccttcactgctttcttatcataaacagtgtgctaaggtgaagttgtggaaacaggtcttcctcaaaggagggagagaaagaaagtcctatgaattggagacctcgtctagtcaggtgcctcccaaaatcagcaaaaaaaccctcacacatagaaaagctccctgtattttatttgcagggctatgtgaactcttgacatcatggagaaaaaaaaatatgaaacagcttaagtgcagggaagggataggtgccttggggcaaaaagcctattgctgtatgcaaatggtttccttcaacagggggaaaaaaacctcttaattgctacatcctctccacttctaagaataaacagaaactgcattgttctgaatcacattttagatgactgggccaactgcctatcctacccagtaatgtatctgtagcctgcaatgacaccctcaacattataaaaaaagagataggtgccatcacagcccccaaagaaagaaggaaactgccatagaaaagactaaattggaacaaagccaatattcccaacccttgagagcaacaggggcagtggcagggtcctctccagcaccctgtcttctgtagctgtgtgttcactcttaactggctaatcagaggttcagtgcttcatcagccttcagaaaaagtctgaggacaagaaggcttggaaaaaaagtgaagagtctaggtccacatttactcacccttcagggatcccagatgagtgcccagaaatgacacaggatttttctcagtcactttgctagccagacacccccaactgaggccttgcttgggcacactacctgctgcaggaggcagcccacacactcagccttcccaggccatgcctggtttgcacactggctcagcctgcacctgggccaggcatacccctacccacctgtgttatagcttgtacacacatttggtagttcccaagttgttgttccatatccaagaagaatgaggacacactgataattgaagagtgagaagggcagagaataattttattgggtgacagagcagctctcagtggtgaggggacacaagggtggtcctccaccgaagtcaggtggtttctctcaatgtgtctgagtccagggcttttataggcacagaatggggatgagtgggccataggtggcattggaaaagataccatttgatkggttaaaaagcgtttctcaggaagaaccagttgggaaagagtgggcaaatggaaacagaagtcctcactccaggttgtgggtttcagactgttttttggcttgaagatggagtttcaccagggacccacttctgtctgcctaggatttgtctgcctcctgcctctatca

SEQ ID NO: 722802 - DNA, 3308 bp, Homo sapiens
gaaagttataatgtcaaggaatgaaattacagaaaataattaattaagattgaagatttagggacattttctctggggaagtgaaatttttattgaggcttgacagatggataagagataactgtgaggcagatagcagaaaaagagcttgttgatttggacgaagcaaaagcagcaagagcagagcaagtagagtgtcattactgtgtggaaaaagatgaagagttgagtgagaacgaaataattaatacgtggtttgacaaagtaaggagtttggattttatataaatttaagtaaagaggagtgttggagatatgatttgcaatttattaaatttaatcttcctactgcaggagaagactttgacagtaatccttgaaggtgaaagaataatttgctgggttaggggtagttgggtcagatggaaataagcagatttggaggtagaatggacacatggctgattgattgtgtataggcttaactaaagaattaaatatcaagaatgagcctcactgctctgatccatgcaattatcctgaatttcagttttgagcatattttgacctataagcttgaaattcataggagaggttgtagtcaaatagaatttgagaatttggggcatggtatttaaagctgtaggaaagaatatttacacagagaatgtagaatgggaagttaagaaaaaacctggttgaaacttaatatacattaaaaattagacatcaatttaccaggaaggagtgaaatgagacagaaaaggaaaaaagcaaaagtatggaaagaatataaggaaagtgcaatgtcattgaaatgaagaaaatatgaatgtatggcagaggcaggagtcagcatctttaatgattcagaaagttcttggggggtgtgggggaagcgagttctaaatgatactgtgtttgtgaagctggagctcaatggtgaacacagcaaaaacaatctgagggtgatagatgggtaaaaaattatatggtagggaactgaacagtgaaattaaagtgcaactttgtggcagcacatgcatacgttgttctagaaagcctaactataaaagtggcagagatacaggttcataaaagaagataggaaagcagacctgtggtgccttcctctatatcagacaggaaaaaactggtatgcaggacaaaggagtcaattagaaatttgagcttcagagattcagtcttccccaggaaggcatgttcctctgtgcctgtgtcttgcctgtatcttttgaaccttagtgccttgggtaaaacacatgatttctgtgagtttgccttgaccattcagtcctgtgtgttacatatagaggcaaattagggctcagaaaagttaataatgctatttaaggtagacaggtcatagcatgattgaaattggatttaaatctaagattttctaactccaaaacctgtgatattaacaaatactgtgcagtctttcccaatagcccaaaagaaatgaaaagtaataatagcatattctttattcattytgaatatatagatagccctttttcaacaggatttgtagggcttacattttaagtataaacaaaatatgaaagacagagcatataaccaatataaatgagctcagactaagataaaacatagtttttatcaattgacatgtatttggatccagggattctgatcacatggtattttagttaaaaaacaacaactgagtgctacatatcacaagtatctgatttaacacgtattactaaagctgttttaacttgaaaaattaaataaatacttaaattagagataaattcatcgtctgaacaagggaaggccgtctagataatactcaaagcatggtaagttgcgtttctcataatgctctatacgagtcctatacattgtacaaacctaatacttgcttgtcaaatggaaaagtccaagtgtgaaataaaagggggcaggaaaaaaatttgacttgtgtggtaatcttacaaacctcttaccttacctgaataaattacaacagttattgaacaaatataattaatatttgttgttagatggtgtcttaaatctgcatgattaaacaaacgaatgagaaaaagtatggcaacataattaaagtaaaattactcatttgtaggaaaataaagttgagtttgatataaagacacaggtaattactgtattataattaatatatggtgagtgacaattgcttttagaaaacaggtagaagaaatgtaaattaactgtatgtttagtaactcaagtagagtatgcaatgtggtcattgcttaacctatgcagtcattaatatcgactccaaatgtagagccattctcagattaaactgaaagacaatcatcataaatttctttttttaatcttttatttttatttttatttttagttttgtaccctaaaacttaaagtataataaaaaaacgtcataaatttcttatagatattagatgagatgaatgtattgacagtgatgaatgtaaaagataatattaattagcttatttttaaagcataaagtaatattatgaggtatctaaatatagagaaaacacaaaataattatctgcttcattaaacaagaaagtgtttattggtaaaggatgatagagttcctagggaaatattttaaaatgaagaaaagtggccgggtcccgttcactgcttggaaccccagcactttgggaggccgaggtggatggatcacctgagtttgagaccagcctgaccaacatggtgaaactctgtgtctactaaaaatacaaaaattagccggttgtggtggcaggcacctgtaatcccagctacttgggaggccgaggcacgagaattgcctgaatccaggaggcagaggttgcagtgagccaagatagagccactgtactccagcctgagcaacagagtgagattctgtctctctcacacacacacacacacatatacacacacacaaaaaggaagaaagggaagggcagtaaattctgagatcgaatttctcaaagttataattctttgaggggccaattgcagtggctcaggcctgtaatcccagtgctttgggaggctgaggcaggattgcttcaaaatcagcttgtgcaacatagagagaccttgtcttcacaaaaagtacaaaattggccaggcacggtgtcgcgtatctgtagtcccagctatgtggcaggctgaggcaggaggatccttgggccccgtaattggagactgtggtggggtataatcacgccactgctgtcaagcctgggcaacagagtgagaccttgtctcttaaa

SEQ ID NO: 722803 - DNA, 638 bp, Homo sapiens
ggtgcaatgcagcctttcaagctatctttcaggaaatgcttttagagagtgcaatgcagcctttcaacacacaacttttgaggatgctaggaagctcttgttcctatatcaacagttcataycctttctcaacttgggggcactatcattttagtcaacatccacttcatatttatgaagtgatccaatatgacaggcacaaattttaggagtcaatagttagcagtaaaatacagaaaaaggaaaaacaaaatcaaacaaaaatccccacaatcctaacgcttacatttctaatggagtaagaccaacaatatgcaacatatatcagtaaaatgtgttcctagttgtcatgattgtcactgctccataagttcacagagagttccaatagacagtaatagggtcgtcaggttaggtctcattttgaaagtgtcatatgtgtaaaatctgaaggaaatgaagaagaaactattcagattttcttggaggataagagaaaacataattgcaagtgcaatggtctgaggctggagaaggtctagcaagttcagtaatagcaagaagaaaataatctaggaggcaagacaatgaatggcctcatgggagactaggcttttactctgagtgagattggaagc

SEQ ID NO: 722804 - DNA, 1183 bp, Homo sapiens
ggtaaagttcatgtttatttttttcccatatgcatataaagttcttcaaacactatttgttgaaaacattttacttcctctttgaattatcttggtacctttgttaaaattcagttgactatatatatatatayatatataaaataaatatattatatatatttttaatatttgaattaaatataattatttaaataaatttttaattaattacataaatatttaaatatatttatatataaataaatttatatataaatatatatataaaaagaaaatatggaagaaaaaatagggtcctatatatacatacatatatgaagaatttttattttaacaatgactttgtaagttagtttttattttatcaaaattttacatgtgcttatttttaaaagtcaaatagttatacaagaattgtaataatactgctgcactctgcataaaacctctcactcctaatcttctcttcagaagcgataactttacaatagtttcatagctaattcttttgctatttgcctctatatatcattcagtaatttgtcaaagacataaaaattagaattataaaaataaaaattaagtagatatttaaatgtaaaaattcaatgatagggtcgaaagatagagttgaggaaatcttcagtaaatcctaaatggcatagtaatgtaaaattacaaagaagtataaaataaaagaaattctaatatatgaagaataaaagtcccaggaagagaagagagagaaaacagaagacagtaagtcatcaaataatagttctagtgaaatttgcagaagtacatatgagtttccaggttagaaggactcatcaaaagtctaagacaacagatgaaaatatatccataccagggcacttagtaataatattttagaaaactagaaaagatgtaatccttaagtttccaaaaagaacaaaagtttttatataagtgagtataagaataccattaaatttccactttagggcaaggtttgggaaactaagtaatatactttgtgtggcgacttttgtgctaaaatggaagagttgaggagttttgacagagaacatacagcccgcaatgcctgaagtatttactgtctggtcctttactgaaaaagtttgccaacacttgccttagaaatactagtgttacaagcaatagattaattacttca

SEQ ID NO: 722805 - DNA, 1793 bp, Homo sapiens
gttttatcatcttctaagcccataaagatgggccaccaatttggatgtgctaagttggaatgattttaccaacagggaaacagagaatatacacaagaaggaaagtctgtctgtatcttaccatttcccagtgaaggtgcacacacaattccatgtggtcaggtggtccagtgagtgaggctggcagcccaagtccaatgccctatatcgagtgagtgtgttggtgactacatgttgaaccagacagggcctgctcttgctcaaactgagtgggtgaggatgtacgtgtcgtgtagtcttctgcgagctaaaaacaagacctattattgaattcaagagcaggggaagcatcctcaagtctgagacaaagaacatttatcaaatcaatgccagaagcaacaaagcagtccctgtgaccaggtccacctatctccagagctgaccttcctcctcaaacaaaaataggcaactcccaactccaagccttaggggaactttcccatcaatgaagaggtggttccaagagcagaatgtccttgccttctacaaacagagagaggctaatgaaaggcttttttttttttttttaattcattgctcacagctggagttgcggggaattatttcagccagggacttcttttggaaactatctgaagagctgaccggaacaccaagaaatttaagcaatgctactccatctttccggactatttcatggggaatatactcccaccctgacctgaaggaggtgcrtttggtttccagcttgttcacagattctcaccatctctgaggcttttctcgacaccatcaataaaccaagtgccctgcgctccaggagctgacggtacactggaggagataaaaaggtaaaataactacatggtgaggccattacagacaaagactgtaagcactagagccattcagaggtatatgaaagatactcatgaattaaagcaactggggaaggctgccagaggggcaggtttggaactggaaattgaaggtgttcctggagtgctaggataatggaaaaggtatgctaggagaaggggcttggcatgtacagatgcagacaggatagtggcatttacacattgtgggtaaacatgtacagtatgggaaagaatctgtgtaggagaagtatgagcgagaaggatggggcagtaagtaggactaaatggtaaagggccttgaaatccaagctaagaggtgtggattcaattcactgaattgaattagtttttaaagcatctgagcaggtacatttaaggaaaatatgacaaatatgaatcaggcagtgggatggtcagagtggtgtaggcctgtgctggagaatgagcaatggctcaagaagtctgggagatctggcttctacatctgcaaggtgaggagtctactgaccaggactcctctgaaaatctccgcccctgtatgcttaacaatcttcactgcaggggagtaagcccttaggatatgacgcctccagggagactcttccaggtcaaggtacgggataaggaccagcctgtttaatgcacttagggaacacagaagagccaaggagtaaagctcagcagccgctccctgccctcctcctctgccccaaccctacaggagacattgaagtaagctggtccagcagccagcagatgcaggccaggctccaggatgaatattggacagacagagaggacaatggtgactgtctctagcagagaggcaagtaacatgaagttgcaaagactctccaagcaaattcactctgagtttctacttgttaaact

SEQ ID NO: 722806 - DNA, 1065 bp, Homo sapiens
agaagcccccaaacccagacctcttgggcttcttaaggagacttcattggacagacacgattgacgaccatgcagaaatgtgatcgaacaaaaaggtatgatccaatagtgactgagtaagtgtggacacccaaacaagtcctgcctattccgaccgttattggcctttccgtgcaggatttcttcctctcgggaatggggcaggaccccttctgaatagagggtcttaagtcccacaatcagaaagatgagggaggattagagtcctgccttgggctggtgaggtggtgaaggagggcaggggaagttcagaggagattgtttcctggggtgtctgaggcctaaagcgccccaacattataacaagagactgtgatgagggcgacgagagtgctaagccaggaaccctggacaaaacccagaatttatacctcgtcatatcacaaggaccaaaaaaattaaaaattaaaaaaaggctcttaaaatgcaggcaatacagtaaaatgttttaatgtaggaagcactaaagtctttgttccaacaaaattaactcagagaacaaattattttacatatgtatacagatcaatcaacaaaagtacacattataacaattgctaaacactgtccataaagaaaacatttcaaatgagaagcgccatcgcggttttctccttctgggycacccagtggaatgagggccctcgccaggggctcttcccagacgtctcttcacaccaaccggcttccttctgatggccccattttcctttaaaaccagttctcatcaaatagggtgttttatgcaccctggcaaatgatcattttgacaaggattaaaactgtaagctaaacagatgacacaaatgacaattgggaataatttttagtggggacagaggctaaatactaccccctccccttttctacttctaaccaatatcttgagcattcagtgggacaatacagtcttgctgggtctcttgaaatcctctagcaagaagccagccaggagaagacccagaagtcccacacctgtggggccaggatggctgcttggttgct

SEQ ID NO: 722807 - DNA, 697 bp, Homo sapiens
ctcgctttttggggtttcttctctaatgctgaaagtcatcgtaaatactgaaaaatagtcagctgtaaatggaagaaagtttactagaattagtgccacttcgggcccctcaaataagagcaactctgtaaatataacgtaagtaatgattaaagatggaagtcgtttatgagaaaaaagtcaaaagatcacacagtaggtacaactaagaaaatgaatcagcagcacgttatttctgttaattaaaaaacgactttaatactgggatctacaattaagactaggttatatcatgtkggaatagtggagaaattatctaatcatgttcaacattgatagaattgctgttagaatacaaggatgtcttgtattcaggacaccataagacagaaatctgcacatcagcagtgtccacatcctctgggccttctattccccacaccttgcacctccatttttcccaggcctgtattcgccagaatggcgtccgctcgcttcgttcacacttagctgtgttcttgttaaaggttgttcccatctgttgagttgctgtttatcacatttcagtctctggcatcagagacttcctttatgaaaagtcagaaagttcaaagaaacatggaaacagaatctgacatccacatgagtctctttgaggctttgaaaacatttatgatgatagaaatgggctgtctta

SEQ ID NO: 722808 - DNA, 630 bp, Homo sapiens
tgttctcaactcataagtaggagctaagctatggggatgcaaaggcataagaatgacacaatggactttaaggacttgaggggaaaggttggaaagggggtgaaggataaaagactacaaatatggtgcagtgtatcctgcttgggtgaagggtgcaccaaaatctcacaaatcaccactaaagaacttactcatgtaaccaaataccacctgctccccaatagcctatggaaataaaaaaaaaaatttttaaatttaacaaaagatcatragtaaaccagaaaaaaaagaaatagtgatatctaaggtacacacttaagttttagaacaaagaacaaatagatggctagaattaggattagatcttatcatcatactacttgtgaaaagggtatgagtaaaaatcagtgtctcactataaaatatcaagccttgtgaagactaaattagaagatttatgaaacgctattttccgcaaatttccaaatactgtttgacttctacagcaaacaagaaagaaagcaaatctcttaaattactgccaaaaaaatataataataagaagaagaaacaaggaataaaatggatgatagaagaatctctgtctttctcatcaccatgatttatggg

SEQ ID NO: 722809 - DNA, 590 bp, Homo sapiens
aaataaggaggactgaaattgttccatttgggcttgagggtgattggctgtcttgctaaaagatatagataggccattaaatgtatgtgacggttgggggatgcgtatgtgcttatgtgtgctaaatgcctatgctacagcctgggaaggaaattataatttatatatttgagttctcagaaataaaggtttctgagacttagcatcaataaaatatttgttctgtattttggggtcctaattcctggatgttgaacttgttgagcaatcttgagagttacatgggtggtaatagtagttttagcctttctacattttgagcagttttaatttagtatcatgctcaattgccataccataagctaaaatttaatgttcatggattgcattcccagccctatcatgagattatttcttacatgtgtactagatatcatataggtctctrgaatgtgtgagacttcctttcttccttctttcctttattattctttcctatccttttccttccttctatccttccttccttcctgcctgcctcgttccggccttcctgccttcctgcctgccttcctgccttttccctttat

SEQ ID NO: 722810 - DNA, 1560 bp, Homo sapiens
acatcatatgctatggattgtattgtgccagctccacccaaaatttatgtgttaatgccctaaccctcaatatgactgtatgtagatagggagatttcaaagtaaataaggttaaatgaaatcatcactgtgactcataagcttaatcagacatgtcaccagaagcctagaataaagatgggattacaccagcagaaaacacaggcagtttgatctgaaaagtgtggagaaagcaggatggactgaaggaaggctgttggacttagatacaaaaggaccaggccatagaatatttatttggctgtgaacatgttattttttaagaaaagtwaagaatgatcacaactgtgattcagtgattgtcaggactgcctccttcatttcaaaaagtgaggtcattgtctcaattgctcaagccagacagcctctgaccaaagcttcagggccaggaccattgcccaagaggatctgaaaatgggattgctaccctagtggatttggaaggtaaaacatggaaccaaagaggattattcttgagcattaagatctaatggaatttatcttgctggcttctggattagcttgacatctgtcactcttttctttcttctgacttttttgttttggaatgagattgtcttaagcatgtgccactgttgtattttggaaggatgtaacttgtctgattgcataggctcacagatggagagacatttttcctcagaattaaccataccttgagtcccattcatatctgatttagacaatatttaggtgagatttcgacttagatttccgaattgagctggaatcaatgtagtttgcatgtgataacagcacaaattttggttggccagggttagaatgttgtggactgaattgcgaccccctcaaaattcttatgttgtagccctaactcccagtgtgattgtatctagagatggggtctttaagagataattaaagttaaatgaggtaatatgaatgaaaccttaatcctttagaactttgaccttataaaaaagagaaagaggcagctttccctcattctttctaccatgtgagggcacaggagaaaggagactgtctgcaagccagaaaggcagccctgatcagaaactgaacctttctggaccttgatcttggactttccacccgccagaactgggagaaaatgaatttctcatgtttaagcacacggtatatggtattttgttatgattgcccatgtttaccaataaacatcatgttacacatagagatctgcttccacttcagacaaatctaataagcaatgggcaagcagtacttttccattaatccttctgccttctgtgtttcagaaaacagagtgtgccaatataaggctttctcagggcacatattggagatattgtggtgctattttaattgctaagaaaaacactactacaacaaagtttagccattttacacaaccatttaccctaaggaattaatcaaggatatatgcaaatatccataggtattaatttagatattaattttcactgaatcacaatttatactacctcaaatttg

SEQ ID NO: 722811 - DNA, 614 bp, Homo sapiens
tgctgctttaaatgtttatgtgtatacaaaagaacctaaaaaagggtggaaaatataaataattggagctttgggttcaattttaattaatttaataattaattttaaataatttggttgtggagacgtttgttaaatgtacaaaatgtacatacaataactataagaatactagtaggagtataatatatgatgaaatgataaataactttaaaaatttagcattaaagaataagaacattatgatcagcagtatacattgataaaatgaattttcttctaatttatcatcttgaaataaaaatattaatcaatcttcccacagcttctctttgtttctttgcttgtatttataaaataagaggcagtaaactagaagatgaagcaaacaataatgaaaacaggagttgagggtggctgtacacttctgaattgtggsaacaagtacacacaaataacagcctgaaatgctcacaaccttggatgtttgcttttgtttatgaactatatagggtgcttattttctgcttttcatgatggcaataaccaatcttttcccaccatatttatggtgcttttccttcctttttttttaaagaatattttatgcttgg

SEQ ID NO: 722812 - DNA, 1174 bp, Homo sapiens
cctcgcccgtttacgagttgagtcttcttcttttcttcgggatccagatgaaatgccttgttctccctgacatagctcagtcggggataaacacttcctcctcttttaagacttagcacatctgccttgaattatacatgcgagcagcagaggctcctgtaggatacagattatgacttatttatctttatatttcccccagtaactctctccagcccagcacttaagacagtgtctggcacaaagaaggtgctcaataattatttattaaaattggctaattcctgcctctcctttttgatatgtttagtgaaaattttcaattcagggataaatgatacaatcttggtgagaaattggagctttctgccttatgcccgaggctaaaatcatcccacatccctttcatcacgtctttctgtctccctgtcttgagcagccatccctcaccaccccccagccccgttctgcagctctgacatgggcttctgcaccattcctacctccttcagctctgagtgcacacacacagatcattcacacaccctgggcagggttttatgtgatgcctcagagcagtgttcccagatccggatgctaaaatgacttgagttgcattctcatgcatttcacaccttctgggagaattagtggagggctagagaaacgattcctaacccctaccatgccttgaaytatcccaaaggaggttggaagttttcaaaacaaagttaattgcaattcatggtaatcacacatgtatttaatgctacacaacactttgaggctaagataaatgttatgaaaatcgaagtgtcagaactctaggaagactgggatacagggcaactgaattatttttctctaaaaaagaaaaaaaaaggctctggaaatcgtgtgactttacacacttgaaagtcacataagcctgtgtgctgtggcaaagaccccagggaatgtggctgcctctgacaccctccagcgtcgagagcctggggcagccttcctgagcctgggtttcctcgactctcaggttcttctctctccgaaatcccatgccacaccattggtttagatttgcatattatgatggtggtattcaatcacatttgcatttacttagtacctactgcatgccaggtttctggaagcactgatgacatgggtagtttat

SEQ ID NO: 722813 - DNA, 656 bp, Homo sapiens
atttttagtgtagtaaacatgcagtgatggaggtaaagggaaaaaactaataataactaattgcttggctccctactgagctttcctcctcaagatactttattgtatgacaagctacgatagggaaatacaaaatgtaaaataatgtgatttgagttacagttatctattaatattgtaaagccttagaaaaatctcttaatctcttggggcctcactttcctcatctttgaaactagggtaatgactgtatgtacagtactgaggtcataggggtgcaaggctcaaatgacataatgttcctgaaaaccttttaaatgtgctataatgcaaaagttattttcattaacaccattagcatcaaagtgtaaattattgtgaatttcacaagtctatttgaattwtacacttattccatttgcaccagaaaccatcttcagttcaccattttaaaaagtcaacctagtcttaaatgagtactatacaaaggatcttgattcacaaacataacggctgctgttcttcatctgaaagtcatagtcataccctaaagttaagatcagtatgtgatccacagtgtcaagtcctctgtagcctaaatattggaggcttttcagaatatgttgtatttactctttcagaccacattattttta

SEQ ID NO: 722814 - DNA, 637 bp, Homo sapiens
gggagaagatgactatctacaagccaactaggagggagcctagagcagattcttcctagcatcttcagaaggaacacgttcctgctgaaataccttgatttcagacttctggcctccagaacagtgagaatgtgtttccttgatgttgccacttgatatctcatggatcttgaacttaagacaatcaacaaactttgtttgtttgtttttttgaggcaggttcttgctctgtgacccatgctagagtgcagcctcaatctcctaggttcaagggatcctcatgtttcaacctcccatgtagctaggaccacctaggtgtgtgtgccaccatactagctaattttttgaccctttgtggagatggggttctcacttctttgccctggctggtcttgaactcctggtctcaagcagtccttccacctcagcctcccaaagtgtggggattacgggtgttaggctaccacacccagccaacaaactcttgatcccttcattcttaaagtacactccaggtctgctttctgcgctctacccwacatttgttcattcctgtctttctcatttcattaaatgatattgccatccactcagtagctagaagccaaggtgtcatacttgatacctttcttttcct

SEQ ID NO: 722815 - DNA, 634 bp, Homo sapiens
ggaaataggcaaaaaaatcccaagagctcagcttttgacagtagggagctgcacttctttctggacaaagagtcagactaaatttagcgacaaattctaaattggtgtgagactttcctatttccttgaagcataatgctctattgattgcaagctgagtcatatattgagcctgcttctcacactgtcagctggaagtgtaattcttgaatgactcccagcagacatttatagatttttcagtctgttgagttataaaagatagccaaagtcttttttttttctgaagaccttcaaataaatcttgatcttaacagctaagtcattgagcttaattatayacaacacactgggagtaatctgcataaaagcgagagttgagggagtgaagttagaaaaataatcaagtgagtctgtaaagaaacaaagaacagaggactgacaactggagttccaccttccagtttgctcctgtttaagacgtagaagaaagaaaaaagtaactattcaaggtgaagagagggcaaagatgggaataggaaccaggttagggtaccaggacaggaatcaaagaaagagaatacttcaagaaagagtgtatggcagagtaaaatatgttggggagacccagaag

SEQ ID NO: 722816 - DNA, 632 bp, Homo sapiens
ttctaacctaccaaacatcatagcttagmgtagcctacctaaaacatgctcagaatacttacattagctttcagttaggcaaaatcatctaatacaaagcttattttttaataaagtattgagtatttcatgtaatctactaaatactgaatgaaaaactggatggttttatgggtactcaaagtacagattctagagtgcatatggcttttggaccatcataaagtcaaaaaaatcttaagtcagggaccatctctagttggagctaggcctttagggaggtaataaaaattaaattaggtcataagggtggggccctaatcccataagattaatgtctttatagaaagtggcaccagagagctctctccatttgagaacacagcaagcagacagacatctgcaagccagagagagagccctcacccaaaactgaccatgctggcaccctcttttggacctcccaacctacataactttgaaaaaataaacttctgttgtgtaagccacccaatctagtattttattatggcagcccaagctaatacaatggttttatttgttgatacattttataaagtttacagactgagatattatattcatttttgaagaaacttgtccagagttaa

SEQ ID NO: 722817 - DNA, 625 bp, Homo sapiens
ctgagacaaaaccttggatgacccaccctagttaggaccctcttctaggaaacacaggtggtgagggaaaggtctgggtccctggaggtacctctgaagaagggaattctgtgaacctagaaaatttaatctttcccctagaccaaagagagtggggattcctgcagttctgtccacgttgtctcctggggctgtgtatctgctgaggttcgctggagattctgtaggggagggtcaggattgacaaagattatttgctggccaaactttagccaagctcctaacacttctcttaggcccatttgtacactcctttgaaaaatccagttttagcaaagaaccctgctaagttggtttagcaagacccgcccacacttgatgtgtgatcaccctcaagatctgaccaggttccacatcctccaccatcccctaggtgacgtctgatcaccctggcctatcttcagcaagaatcctgttaggttggtttagccagaatatccctgtttcccctgatgtttactctttttatttatttatttattttgattttcttttttttttagacagagtctcgctctgctgcccaggctggagygcagtggcgtgatctcagctcactgcaacc

SEQ ID NO: 722818 - DNA, 1147 bp, Homo sapiens
aaagctcggttaatagttttcttaaaataatcagtagaccacatcctagctaaacataatgggaaaatagacaatatttctctctctttgttgcatttttcaagctagattttcttttttacatcccctgcctggtcaaaagcatctggaaaagcagccaagccagtgcccactgtttcccttttgttctcacaaaatagaattgcaaactgagattatgcatacaacctcctgagagtgcaactgtccatccctgaagctgtctctcagcactgagccagcccagtcggcaccactgggcaccaggctctgccagggaagggtttcaatacaaacatcaggcaatgtgggctgccaacccaggcttcatcactaagtgctgtccacgtgttctgtagagacttctatggagggggctattttcttctagaaatattgctggtaaaaaagagtcaataccaggactttagtatccttgtgtagctcatgtctatttcaatgctcttggatttcttcctcccaattgttattgtctctcctagaagcttcctacattgaaccttgatgacagaaaattgtaatggaaagaaaaatctctggcctgagagctctaagacctgggttctttttaatgtatctacgaacacattctattgctaggccrtttatctggcagtatgatctgtcctagggaaattttattcttaattaaaaacattggttttaacctcaaggaacttccaatctaatttaaagagacaaggcgtatgtaattgttccttagttaaaaaattaatatttgcaaaatgactgttggtggtctaagggttgcttttgtctaccaagttaattcaatttcagtgatttttttaatttattgtttacccttactgaattgccttgttttaatctttgtggtacagccattgccagctgtagactttcagtgctgaaggtacttggagttcagctctttctttttgcagacaagggcactcagatccagagacatcaatgctcttgcaagtgtataagacacatcctcttccaaatgtataaaaaactcacctgcatctaataagtcatagttactgactgaacaaggatgcaaaatactgaattgctttcgggcagccatgtctacaaa

SEQ ID NO: 722819 - DNA, 632 bp, Homo sapiens
ttgctgacctcactccaatgaaggtctgcctcagggagagattccatgtatttagcgaggtcaggaccagaccgtggcatccacattcacctctctacactttagaaaaatgtattggtgccacagggcaccagtaaaaccaaatctttgttagacracagattcatttctgtgtgaaaccattcaccggagagtaacatttcacttttttctccttcagaaatttttttctcaatgcttctgatagaaaatcagctaaatcattatttttaaaattcttactgccccgttccgtgtttcatgctattaaattattgtaattacttcagattacatactgacattgcacacaaaatccatatactgaaggcaaagttgtttaaaacacaaatagataaaagatttaccaggcatctgacttcccacatagtgaatggaaactttgctttgtaattctcggaagcccctatatttttcataaatgacttaacaaatttaattaacttttttccttgttagccatctgtcagaagagaggactttggggatataacattaatatatttgggcattgaaaaactgctgcaagggaacaatactgtacatatttaaggccagtatccaaatattct

SEQ ID NO: 722820 - DNA, 761 bp, Homo sapiens
gcatctctagacaaggtgagaatcaagcttaccttggattttagaggggaatttcttgaaatatcagagccattcataactgaggacataactggaatatttggtctcaatttaaaagtccccttgaaatgacaagttaacaaactaaccccttatgccttggttcttttaggcgaaagctctccagtaaatcaaagaagtggaaatcaatatttaacctgggacgttctggatcagactccaaatcaaaactgagtagaaatgggagtgtatttgtgagaggacagaggctctcgggtaagaatcaacagcaattgttttatgatacaaatatttgtttcctaactctgcttattaagtctttggtttgatcatatcaaacacactagctctgaaagagaaacttataaattaactrggggaagaggagtcttttttcaaaacattttagacttaccaaaaaaattgcaaaaatagtacacagagaacctgtatacccttcatgcagcttctcccaatgttaacatcttatataagttatcaaagccaaaaattaatattgatacaatactcctaatgaatttgcagatcttattcacatttggccagctgtcccactactgttctttttctggtctaggatccaatccaggatctcacgctacatttggttgtcatgtttccttaacctctgccaatctaggacaattcctccatctttttgaccgtgataacttggaagagtactggccatttgttta

SEQ ID NO: 722821 - DNA, 623 bp, Homo sapiens
tttctcatacttaaaatgcttaggatttactaatttctacttagtttatatttatttaaacccaccatataagaagaaattattactaaccaggtactagattaaaaatttttttcacataaatcaataaagaacccaccaggaaagtagaaaccacttcaggaatttacaacagaaattgattcaaggaattagtcacacgagtgactggaagaactgagagccaacatagaagagtgagataagccagagagcagcaagaaaccactgtcacccttatgatacacagacacacagaccaatagaacagaatagagaacccagaaacaaatccacacacctacagcgaactgatttttcacaaaggtgccaagaacaascactggggtaaaaatggtctcttcaataaatggtgctgggaaaactggatatccatatgaagaaaaatgaaactaaacccctatctctcaccatatacaaaaattaaacaaaatagatgtaacacttaaatctaagacctcaaactatgaaactactacaagaaaacatttggaaaactctccaggactttggtctcggcaaaaatgtcttgagtagtactctataagtacaggcgaccaaag

SEQ ID NO: 722822 - DNA, 1657 bp, Homo sapiens
tccctccttcttccccaacccctgacggcagacttgggaatttgaatatgagccaaataattaaaaaaataacagcaggatatttctacatctccatgaatgaacatgactctgtgtggttactgcagctgcaggtatgcatttacatctacattaactattgcatcatggacttcatgaagccaagcccccaaattaatctccacctccttctctggcattcaggatataaactcaccagaaacattccaaatgcagaagtggttctcatctttttttgcagcttaagatctgccttggtatttgaagagatataaactagatcaatttctttcacaggatcaactaaacaggttgtacttttttattattaatatcaatacttagattttagatatataaaatatagaatgaaaattatgtattacaaagctcttaaaaataaaatatacaaagaccaaagtcttgattgatactttagttaattaatgatgtgaagcatttaaaaccttttaaaataatttgttgttaaaaataatattttacatttatgtagtattttgttgcttattgctttaatgtaaaattacagtaccattgctatcttaaaagtgctgaatgctggacgtgttctccattttaccaatgagaaaataaagcaagsagggtagaaggaggtagaatagagattgacttttagttttgtgttcctgtgataaggggtcttgcaaataggggcattactttcatgtaagaaacttcagataaatatgacagaaatccaaagtccttggtaaataattaatatgtaggtcattgacatatattgccttttaaatctgtgaatccttacttagtagaaactagagagcttcttgatctaataattgaacttaacaaatatttctgaacatctactttgtgtcatagtgctggagattgggatagaaacatgtacaaaagtcacttttgcctcatacaggtaaatctaagaaagtagggactatgagaacccctatgtatctatatccaccatagtattctagcactgactacagggcctaggaaaagggtaggcattcacatagggagtatttgctggataaaaggcaggttggaagatgcaggaggggagtatgcagaaagaaaggaagaaagagaggaaggagagcgggaaggaaaaacactttctgagtttaattgaatttataagtcacaattttaacaacttttttgatgtttatttctgaacaactgacctacatactcagaataaaaaattgacaatttctaactgaaatagatcttttgagaaaatggggatcacataggaagtaaatccatacattgtaatatgagacaatttaccaaaaggaatagaatgagaaaagatattttattacatgccacctactttgcctctcagaccaaaattgactatgaaggagtagctggaagtcagccaaccacttaatgataaatctaccactcccagctgactataagccaattcttataaacttggctgaacaccaagaaagtaattcacatgagtaagcaaaccaataggcaggacaaatcgtggtgcattttatacacatttcttctagtgaaagatctattttctgagactaaggagaaggcttggggaacaagt

SEQ ID NO: 722823 - DNA, 1494 bp, Homo sapiens
gagaataactgtttcatgtgctcacaggtccatgagttgtcaataccagttaccaactttaaacataaaaggttgaaccaagctgaatggcttcaaaatgaaaagttaaagcagtgactttaaatgccatcacctacagagacaccaataagaataggtgtggcactgcacatgtactctgacatctggtatcagataaaagacaggctggaactatgtgcacaggaggcatgatcaactgcatcccattttaaacccactgctaatgccctggtgactagcaaagctatgcatatgtaaaatattttccaaaagcaagttctcaatttcaatttaacctcgtacataaggtattccttcagatgtaatgaatttatgtttgcaaagaactctgggtgcacactgaagttcaggttcattccttctatgttggaggaaatatgggaaggttagagtcagtcaataccattctttttgttttgttttgttttgtttttttgagacggagtctcgctctgtcacccaggctggagtgcagtggcacaatctccgctcactgcaacctccgcctcccaggttcaagtgattcttccacctcagctgcccgaatagctgggactacaggtgcgtgccagcacgcccagctaagtttttgtatttttagtagagaggagatttcaccatgttggccaggctggtctcaaactcctaacctcaggtgatctgcccacctcagcctcccaaagtgctgggattacaggtatgagccaccaagcctggccccattcttacttgtcatgtctcaggcataatccattgcacttgccaagaaattgcctttacattgcctcctgaaagacctaattaagactattctttctcgcttttagatgttatgccctcttatctgttttaaaatgcacattttgcacgacagtactttccgtagctcctgagacccttaccatcagcttcttytacttcaaagtatctgtagttgaaatggatagtaggagcatgaggattcttggggtggataacagagctcacgcccatagcacaaaatggcaatttacctggaaagtaaaatatgagtcatgagctatattcagttaccttgaatgccttgatacaatttcactctaatatgatttccaagtcaattttcaaaagctgctttttaatttgtcacttaaaaacataattttaaaaaagtatttgtcaacgtgcggcatatgaacccgaatggcttttttcagaagcaatatttattttataaataaaacttgtgggcaaaataaggtttgcagggactattagagactatcaagactgtctgatttaccatctttagtcttcagaacttttcctctgcttctcatttgttttgcagcttcctctgaaagatttccatgaacaacagaaatgctcaccccagccttttcgaaaacacacccatcttgaagtacacagctgatgccgccacctcctgtg

SEQ ID NO: 722824 - DNA, 590 bp, Homo sapiens
gtagtcccacccrttgcaatgaggaggcttggccccgctcactctacttacccagttgagagggtctttactcagagagtttgatacatgtcccctggagtttgggaaacctatagaagaatatatgactccccgttgaggggtccaaaaggtgaaagggcttgattagacagcgctgaaatactgagaccccaaggtgagctgagagagacctgcattccctctgtccagctatccattaatccttcatgattcttgtgggttaaaagccttcctaagagaaggagctggcctggggccctaataaaagagaactctttctttttaaaaaagtttttagagacaaaatctcactctgtcacccaggctaagatcatagctcactgcaacctcaaattttgggctcaagcgatcctcctgccttagcctccccagtagcagggacaacaggcatgtgccaccgtgcctattttttaaattttttatagagacaaagtcttgccatgttgctcaggctggtcttaaacttctggcctcaagtgatcctcctgcctcagcctcccaaagtgctgggattacagacatgagcc

SEQ ID NO: 722825 - DNA, 679 bp, Homo sapiens
cctgccaaaaatgtcaaaatggttaaaacatttaattaaaacagaatcacagattattgtggaataatagtcattcacttaatcagagtgaaaagagattccaaaagcaaatacagaacattacatggattaaaaaaaaaaaccttaattctttcaaagctcctaagtaatgaaaaacctaataaagacaacatgaagcatgagaaattattttgataaaacaaaaaatctttgtttcctaggccagctatcaaaagataaaaaccttctacatatttaaaaaccccttgtgattgcttctccctatgggaaacccatttcaataacctggaagttgagcctgatgaaaaggtacttgaattcaactaaacactggaagagtgtgtatccaaggttatgagtgtaccatattatagaaaagataaacaagaaaacaagtaccttgagcaggcggatatgtggctcttagraaaagtaaaagaatgtggaatttattggttaaacagcaattcagacacatcaagaaaagacaaaattacagaatcaaattatactggaagaaaatattattcccctagattctcctaggccttaaagacaaacatttttagtgttaggccacaatagcagagtcagaactggagagagagccagagagagagcgagcgagagagcgaga

SEQ ID NO: 722826 - DNA, 631 bp, Homo sapiens
ttagtacattagaaaaagctcatttgyatatacttcttgaatttttcatgtgcacaaagacccactgaaagtatacacgaaaaactaacactggtcgggcgtgatgacttatgcttgtaatcccaacactttgagaggacgaggcagacagatcacttgaggtcaggagttcgagaccagcctgggcaacatggtgaaactccatctctactaaaaatacaaaaatcagccaggcgtggcggtacacatatgtaatcccagctacttgggaggctgaggcaggagaatcgcttgaacccaagaggcagaggttgcaatgagccaggattgtgccattgcactccagcgtgggtgacagagcaagactccatctcaaaaaaaaacaaaccaacaaaaaaaaaacacaaagattacatgtggtacatgggcttttggtataggcaaacaaccttgggtcagaatgggatgagttttcaaggtatattgtttatattattttaattttgtaccatgtaaatatattacctagtatagaaaaaaatttaaagcaaatttccccaaatgcattaatgggccttattttttcctttgcctagtttaattatttgattagagtctcagtattctctca

SEQ ID NO: 722827 - DNA, 2537 bp, Homo sapiens
  misc_feature 816, 817, 818, 819, 820, 821, 822, 823, 824, 825, 826, 827,828, 829, 830, 831, 832, 833, 834, 835, 836, 837, 838, 839,840, 841, 842, 843, 844, 845, 846, 847, 848, 849, 850, 851,852, 853, 854, 855, 856, 857, 858, 859, 860, 861, 862: n = A,T,C or G
  misc_feature 863, 864, 865, 866, 867, 868, 869, 870, 871, 872, 873, 874,875, 876, 877, 878, 879, 880, 881, 882, 883, 884, 885, 886,887, 888, 889, 890, 891, 892, 893, 894, 895, 896, 897, 898,899, 900, 901, 902, 903, 904, 905, 906, 907, 908, 909: n = A,T,C or G
  misc_feature 910, 911, 912, 913, 914, 915, 959: n = A,T,C or G
cccaactataacctttgttttacaaaagaattgatgaaaataaaaacaacatatctcacagcacgcgtgataatattttcatacgtatgtgataatggagcaacatttgatagagatgaaatgaaaatttctaaatttgacaaaagcgaacaacaaaaattacaccgtagaaaagcgtgggtgacggcagtgacgccctgtctcaagaagtaaacatccgagagatttaaaagtggggagtgaaaccaaggatagcataacattgttaatactagccattgtttcagtgggaaaaggcaaaaataagcggtgtgtctcctagattctcacatgaattgttcaggatatgagatgttgcctctatttccagttacgcattgtatggtggaattgcagttagcacatttggtgccaaaattttaatgctgacgaaaatggacatgttccctgaactaagagggacataatttgggtgtgtctccaggctctctggcttaccaggattgaagatccaggctctagggattttcccaaaatgtcttagacagtaagcaccggggcagaattgaggcccggcgccaaggtctcgaggtgtaaagaaacagccgtggccgcagagccactgaaattaggatgattttaaggaggacggtggaatgagaggactgtgatgtttggccccgtttcttctcccttgtcttttcatgggccaggtgtgctccatcagaaggctttctgtgcctgatgtaaagtgtcctgggtgatgaaagggcactgccttagagaggtgctccaaaggaaggaaggagccaccannnnnnnnnnnnnnnnnnnnnnnnnnnnnnnnnnnnnnnnnnnnnnnnnnnnnnnnnnnnnnnnnnnnnnnnnnnnnnnnnnnnnnnnnnnnnnnnnnnnaatgcatgtgttcctggatttgggcagggtggaaaatgacttgnagctttgctccatgccgctctggaagccatctcaaggtatttcacagctcacctcaagactaagagataaggacccctgccctgtctcaggagaaggaagcagacaggagcctggcaagatggtcctggaaggagggagatttgtgtctgtcccagcagtgggtattgggagaagccggtggatgattttacactcaaaagtctccatccctttgatccatgttagcatagcaggcttctcctcctgtcatttgaacttccaaggagaggtttgaatccactgttcatatttcccactcaaaaatataaatggaactagaggcacagttccatgcctctagacasctgcttaagcctgttgtcaggccttgaattgccagcttctcgtgtcctgggactccaatgcagggctgcagggagagagaagggtcaggctcagacatgagacccatcactacaggaggctcccctggtccccgagtgggtctgcatggtgcagaaaagcaagagagaagcataaattcaatgtagcagagcgaactggcttccttcctatggtaggatcctgggtacagcatggaaactgaatatgacaagtgggaaagactcgatgagcaagcacagggaggccagcagagagcaaagctcaggtcccaggccctgggcatggattcagccaccggttttggtctaaaagcaagacggagacatccaaaccaaagccaggtggcccgtaaaggggcgatgggcaccagacaggaaggaggtcaagagcctccctgacgctgagcctggtgctcccaggcctccctaggtactaggctgactgtcctgaagcctagtctgatccccgcattgactgcctaaaccccatcacaagctgctcactgtcctcctggttagccccaaacttcccaataggtccccaagaccccttgtacagaagcccccgctaaactccccagccagaactgctgccttgttcatctccaaccagcccaaagtattttttcttgttgttgttttttgaaacagggactcctctgttgctcaggctggagtgcagtggcactgttaccgcttattgcagcctctacctcctgggctcaagtgctcctcccaccttagcctcccaaatacctgggaccaccggcatgcaccattgcacactgctagtttttttaggtgttgagccaccacttccagccccaaggtattttaaattcctgaactcacatgctttttattttccagttttgtaccctctggttcctacacctggggcgttgctcacattttcccctgttcaccctttagcttgcagctctgactacactttctccgggaagctgacactcaggcccgaatgtggctggctgccgctccctgtgactcctccactgctgggcccacctggagctggagtctgtcaccatgcaactgcctcctgtgtctgctgtcctctacagactcctgtgccacccagagcctgtgacctgtgcaccatttattttcctgaatatttagctcgatgcctatgtttgtcgcaacaaggaggacaaggcgggagcaatgaaa

SEQ ID NO: 722828 - DNA, 1107 bp, Homo sapiens
  misc_feature 1007, 1008, 1009, 1010, 1011, 1012, 1013, 1014, 1015, 1016,1017, 1018, 1019, 1020, 1021, 1022, 1023, 1024, 1025, 1026,1027, 1028, 1029, 1030, 1031, 1032, 1033, 1034, 1035, 1036,1037, 1038, 1039, 1040, 1041, 1042, 1043, 1044, 1045: n = A,T,C or G
  misc_feature 1046, 1047, 1048, 1049, 1050, 1051, 1052, 1053, 1054, 1055,1056, 1057, 1058, 1059, 1060, 1061, 1062, 1063, 1064, 1065,1066, 1067, 1068, 1069, 1070, 1071, 1072, 1073, 1074, 1075,1076, 1077, 1078, 1079, 1080, 1081, 1082, 1083, 1084: n = A,T,C or G
  misc_feature 1085, 1086, 1087, 1088, 1089, 1090, 1091, 1092, 1093, 1094,1095, 1096, 1097, 1098, 1099, 1100, 1101, 1102, 1103, 1104,1105, 1106: n = A,T,C or G
agctcgatgcctatgtttgtggaaagaaggaggaaaaggagggaggaatgaaactgggaggaaggaaggaagaaatgaaggaaggaagttaagaactagcccagtggctggcacccggaagagtgacagatcagccccaccagaatgtggggagagtcaaagggactctgtcctcccttcctgcctcccagttgactcagcgcctagatcctgggtgggggagcccatggagggaagcatcagctgccaggccgggtagaggggcagcaatggggggaccaggtgacaaagagactctcagcctctctgtaggattgaccaggcatgtggtagtgcctggaagtggggaaagttgctacagctgaagaagtcttggaaggcagcatttcggcatcattgtgcttctccatccttcttcctctaaaggggggtgtctttctatccaattcctcccacaagactcaygtgtcctcctccaggtgaggaaagcctggcagactctagcatgactgggagtaaaggtggctgggcaatctcagcaccaggaatgcacattcacaccacgagacagggcaaaggctaggtcccttcccggcagggggatgcgccacctcgggcttcctggaattctcatctgcctgaccagctgatggcagagtcatggtgactcaggactgaatattcagctgcgatgttcgatgctaggtgtggtgcacgtcacaggtgagcaaaaccaaaggaactggaaaagcttcacatttgagtttaccattgacactgagttgttttacagggaggagcctgaggtgcagacggtatcagctacaggccaggttgtgtctctaagccagatgagtgtcctcatccttaaggagtcatcttcctctaatcctctggttctcatccccatctcagctgcttttgaaaattaaatattatgccaaggcacctcctgcagtgatgtgacttccttgtctggggtggatctttagctgttattattaagnnnnnnnnnnnnnnnnnnnnnnnnnnnnnnnnnnnnnnnnnnnnnnnnnnnnnnnnnnnnnnnnnnnnnnnnnnnnnnnnnnnnnnnnnnnnnnnnnnnnc

SEQ ID NO: 722829 - DNA, 1107 bp, Homo sapiens
  misc_feature 1007, 1008, 1009, 1010, 1011, 1012, 1013, 1014, 1015, 1016,1017, 1018, 1019, 1020, 1021, 1022, 1023, 1024, 1025, 1026,1027, 1028, 1029, 1030, 1031, 1032, 1033, 1034, 1035, 1036,1037, 1038, 1039, 1040, 1041, 1042, 1043, 1044, 1045: n = A,T,C or G
  misc_feature 1046, 1047, 1048, 1049, 1050, 1051, 1052, 1053, 1054, 1055,1056, 1057, 1058, 1059, 1060, 1061, 1062, 1063, 1064, 1065,1066, 1067, 1068, 1069, 1070, 1071, 1072, 1073, 1074, 1075,1076, 1077, 1078, 1079, 1080, 1081, 1082, 1083, 1084: n = A,T,C or G
  misc_feature 1085, 1086, 1087, 1088, 1089, 1090, 1091, 1092, 1093, 1094,1095, 1096, 1097, 1098, 1099, 1100, 1101, 1102, 1103, 1104,1105, 1106: n = A,T,C or G
agctcgatgcctatgtttgtggaaagaaggaggaaaaggagggaggaatgaaactgggaggaaggaaggaagaaatgaaggaaggaagttaagaactagcccagtggctggcacccggaagagtgacagatcagccccaccagaatgtggggagagtcaaagggactctgtcctcccttcctgcctcccagttgactcagcgcctagatcctgggtgggggagcccatggagggaagcatcagctgccaggccgggtagaggggcagcaatggggggaccaggtgacaaagagactctcagcctctctgtaggattgaccaggcatgtggtagtgcctggaagtggggaaagttgctacagctgaagaagtcttggaaggcagcatttcggcatcattgtgcttctccatccttcttcctctaaaggggggtgtctttctatccaattcctcccacaagactcatgtgtcctcctccagstgaggaaagcctggcagactctagcatgactgggagtaaaggtggctgggcaatctcagcaccaggaatgcacattcacaccacgagacagggcaaaggctaggtcccttcccggcagggggatgcgccacctcgggcttcctggaattctcatctgcctgaccagctgatggcagagtcatggtgactcaggactgaatattcagctgcgatgttcgatgctaggtgtggtgcacgtcacaggtgagcaaaaccaaaggaactggaaaagcttcacatttgagtttaccattgacactgagttgttttacagggaggagcctgaggtgcagacggtatcagctacaggccaggttgtgtctctaagccagatgagtgtcctcatccttaaggagtcatcttcctctaatcctctggttctcatccccatctcagctgcttttgaaaattaaatattatgccaaggcacctcctgcagtgatgtgacttccttgtctggggtggatctttagctgttattattaagnnnnnnnnnnnnnnnnnnnnnnnnnnnnnnnnnnnnnnnnnnnnnnnnnnnnnnnnnnnnnnnnnnnnnnnnnnnnnnnnnnnnnnnnnnnnnnnnnnnnc

SEQ ID NO: 722830 - DNA, 1107 bp, Homo sapiens
  misc_feature 1007, 1008, 1009, 1010, 1011, 1012, 1013, 1014, 1015, 1016,1017, 1018, 1019, 1020, 1021, 1022, 1023, 1024, 1025, 1026,1027, 1028, 1029, 1030, 1031, 1032, 1033, 1034, 1035, 1036,1037, 1038, 1039, 1040, 1041, 1042, 1043, 1044, 1045: n = A,T,C or G
  misc_feature 1046, 1047, 1048, 1049, 1050, 1051, 1052, 1053, 1054, 1055,1056, 1057, 1058, 1059, 1060, 1061, 1062, 1063, 1064, 1065,1066, 1067, 1068, 1069, 1070, 1071, 1072, 1073, 1074, 1075,1076, 1077, 1078, 1079, 1080, 1081, 1082, 1083, 1084: n = A,T,C or G
  misc_feature 1085, 1086, 1087, 1088, 1089, 1090, 1091, 1092, 1093, 1094,1095, 1096, 1097, 1098, 1099, 1100, 1101, 1102, 1103, 1104,1105, 1106: n = A,T,C or G
agctcgatgcctatgtttgtggaaagaaggaggaaaaggagggaggaatgaaactgggaggaaggaaggaagaaatgaaggaaggaagttaagaactagcccagtggctggcacccggaagagtgacagatcagccccaccagaatgtggggagagtcaaagggactctgtcctcccttcctgcctcccagttgactcagcgcctagatcctgggtgggggagcccatggagggaagcatcagctgccaggccgggtagaggggcagcaatggggggaccaggtgacaaagagactctcagcctctctgtaggattgaccaggcatgtggtagtgcctggaagtggggaaagttgctacagctgaagaagtcttggaaggcagcatttcggcatcattgtgcttctccatccttcttcctctaaaggggggtgtctttctatccaattcctcccacaagactcatgtgtcctcctccaggtgaggaaagcctggcagactctagcatgactgggagtaaaggtggctgggcaatctcagcaccaggaatgcacattcacaccacgagacagggcaaaggctaggtcccttcccggcagggggatgcgccacctcgggcttcctggaattctcatctgcctgaccagctgatggcagagtcayggtgactcaggactgaatattcagctgcgatgttcgatgctaggtgtggtgcacgtcacaggtgagcaaaaccaaaggaactggaaaagcttcacatttgagtttaccattgacactgagttgttttacagggaggagcctgaggtgcagacggtatcagctacaggccaggttgtgtctctaagccagatgagtgtcctcatccttaaggagtcatcttcctctaatcctctggttctcatccccatctcagctgcttttgaaaattaaatattatgccaaggcacctcctgcagtgatgtgacttccttgtctggggtggatctttagctgttattattaagnnnnnnnnnnnnnnnnnnnnnnnnnnnnnnnnnnnnnnnnnnnnnnnnnnnnnnnnnnnnnnnnnnnnnnnnnnnnnnnnnnnnnnnnnnnnnnnnnnnnc

SEQ ID NO: 722831 - DNA, 1107 bp, Homo sapiens
  misc_feature 1007, 1008, 1009, 1010, 1011, 1012, 1013, 1014, 1015, 1016,1017, 1018, 1019, 1020, 1021, 1022, 1023, 1024, 1025, 1026,1027, 1028, 1029, 1030, 1031, 1032, 1033, 1034, 1035, 1036,1037, 1038, 1039, 1040, 1041, 1042, 1043, 1044, 1045: n = A,T,C or G
  misc_feature 1046, 1047, 1048, 1049, 1050, 1051, 1052, 1053, 1054, 1055,1056, 1057, 1058, 1059, 1060, 1061, 1062, 1063, 1064, 1065,1066, 1067, 1068, 1069, 1070, 1071, 1072, 1073, 1074, 1075,1076, 1077, 1078, 1079, 1080, 1081, 1082, 1083, 1084: n = A,T,C or G
  misc_feature 1085, 1086, 1087, 1088, 1089, 1090, 1091, 1092, 1093, 1094,1095, 1096, 1097, 1098, 1099, 1100, 1101, 1102, 1103, 1104,1105, 1106: n = A,T,C or G
agctcgatgcctatgtttgtggaaagaaggaggaaaaggagggaggaatgaaactgggaggaaggaaggaagaaatgaaggaaggaagttaagaactagcccagtggctggcacccggaagagtgacagatcagccccaccagaatgtggggagagtcaaagggactctgtcctcccttcctgcctcccagttgactcagcgcctagatcctgggtgggggagcccatggagggaagcatcagctgccaggccgggtagaggggcagcaatggggggaccaggtgacaaagagactctcagcctctctgtaggattgaccaggcatgtggtagtgcctggaagtggggaaagttgctacagctgaagaagtcttggaaggcagcatttcggcatcattgtgcttctccatccttcttcctctaaaggggggtgtctttctatccaattcctcccacaagactcatgtgtcctcctccaggtgaggaaagcctggcagactctagcatgactgggagtaaaggtggctgggcaatctcagcaccaggaatgcacattcacaccacgagacagggcaaaggctaggtcccttcccggcagggggatgcgccacctcgggcttcctggaattctcatctgcctgaccagctgatggcagagtcatggtgactcaggactgaatattcagctgcgatgttcgatgctaggtgtggtgcacgtcacaggtgagcaaaaccaaaggaactggaaaagcttcacatttgagtttaccattgwcactgagttgttttacagggaggagcctgaggtgcagacggtatcagctacaggccaggttgtgtctctaagccagatgagtgtcctcatccttaaggagtcatcttcctctaatcctctggttctcatccccatctcagctgcttttgaaaattaaatattatgccaaggcacctcctgcagtgatgtgacttccttgtctggggtggatctttagctgttattattaagnnnnnnnnnnnnnnnnnnnnnnnnnnnnnnnnnnnnnnnnnnnnnnnnnnnnnnnnnnnnnnnnnnnnnnnnnnnnnnnnnnnnnnnnnnnnnnnnnnnnc

SEQ ID NO: 722832 - DNA, 597 bp, Homo sapiens
acttattgtcttaactttctaaattttttaaatttagcatgttttacatttctacaaaaatataataaacatttttctcttttgaactggatgttatattcatatcttgtgcagtttacctattaagatgattttctttttcttagtgatttgtcataacttttcacatatttggaaacttaaccattcagtaaatatattttaagcacctatactgtggcaaggatgaagctggatatataaaaatgaataaattagaaaatcagaacacattttccartgaaaagtgtatgaaatggaagctatattattttgggccatagtgtgagttaaatggttttttgttacactaaactaagtatattactattcatatattgctagcttactgatacggtttggttgtgttcccacccaaatctcatcttgaattgtaatccccataatccccacgtgttgtgggagggaccaagtgggaggtaattgaatcgtgggggcagtttcccccatgctgttcttgtggtagtgagtgagttctcacaagatctgatggttttataagcatctggcatttcccctgctggcactctctctctc

SEQ ID NO: 722833 - DNA, 2575 bp, Homo sapiens
gtggcttgtgtgtgtgatttgcattatgtttgtgttggatggtgtttgctatgtaataaagtagttagaacacaagatctgtggtctggatttgattcttgcctatactatttactagcagtgtaatcctgggctactttttgaacttcttgctttaattttctcttctataaaatgagaataatagtaatatccatttcaaagatatattgtgaggggaagataaaagacgtaaagctggcagcacaatcgataactttaagtgttgattaaaatttagccactatttatgtttttgttatcattgttgctgttattatagtatcagattttatacttcagtgggttttttctttctctccctcaaaattttccacattactcatagtaatagagttcttagctggatactgtaatttgactggggacagacatatgtacaaattacataagtgaggaaggtgtcacaaacaaatgctcattaagtttggctgtagaaaatttttaatgcttctccaagataatattacctaaaatatttctgtagactggtaactatataaccaagctttataattatggtccagaaaggagtcacatagccaggaaatggtggtgtgttggaaacagtattgttctgggacttgaggcctgggctgtagtccaaattctgccactgtgtttgtctagactccagtttccttattgtaaaattgtgaggttgtattagatgctcacttatgccccctttaaggttatataattttaacatattaatacctacatttcacatattttgaatctacagtttaattatccttaggtttttcagctcatattagaatggtaagagactgaagataaggttacaggaagtatagagtcatggtaagatagaggcacaattttttcacccagaaaaatcttacaagatgctttaggttgtaactaaactakttttttttctagaattgactttaattttactacagtaaaatggaaactttagattgtattatattaagatactacatagatagacattattattatagtttagtggaaagattgctggccctatcggaatatctgggttttaaccccagttttgccactagataacttaagtaaatcctaaacaggtttttttttgtttgctttttccatatgtaataatttggactgtaataatgtaacacctcactcagagtatgcacttgaaaaattaattcttacttaactggtctgtctactgtgtaggatttgcattaatattgtgaaaacactttaggggaaaataatttaaaatatatgaatagacatataacttttcttactttgattatttttgcaaatttgttctatttaatcttaaagggattgtttctttgttttcaaagtatagaccattgagaaagagggaaagctccccagtatattttatgaagttagcacaaccttaaacctgttaaagcaaatttaaacctagtaaagatagtataaatacacaaactgtgtacatgcacacatgtatacacacacacacacacacacacactcctatgtgctaaagtttcaaataaaatactagcaaatgaattcagcattgtatttaaaaattatatatattgactagaaaggctttatcccaggaatataaagatgactctacactacaaaatctgtacataattcattatagcaacatattagaggtaaatttataactaagccagtaggtatttctcaaaaagaaggaaaatcatttgataaaaatctaacaacttcattcatagggaagtgcagagtaaagcaacagtgagatgacatgcaggactggcagcatgtgaagaaataggcaatcataccttgatgctagtgtgaagtgttactgctttttgggaaaaaaacaacaatagcttctgaaataaaaatgcacattatcatttgaatattcctgtttctgggagtctttcctacacaaaataatatattaatattagtgtatactataatgttaatatatactaatatagtaaattaggacttatatgcagggatatttgtttcatagtttgtaataactaaaaattaggaacaacatgaatgttgatcaccgaaggagtgactgagtaaattattctacactacactgtggaatatagtgtaaccattgagcaggagggataatattgttgagtatggaatggcaaattatagattactgtgtataatgtaatccattttttaataaaaagggagaagccttatatatgttaaatgtgtgcatgagccgtgagaaatgtgtgggagtattgagttaagagggggtgggataggtgaagtgagaatatcatttttatttcatatgcttctgtagtgtttgatttattgtgaagagcatttatttttgtataaccacatttaatgaaggaaaaatgctaaataaattcaaagtatgagcatgtgggttccaaagatgctgcatttggccagccagagacatggaaaatgtaaaagtattatgctacaccttctattgtggagatatttgttataatttccatccacaact

SEQ ID NO: 722834 - DNA, 2575 bp, Homo sapiens
gtggcttgtgtgtgtgatttgcattatgtttgtgttggatggtgtttgctatgtaataaagtagttagaacacaagatctgtggtctggatttgattcttgcctatactatttactagcagtgtaatcctgggctactttttgaacttcttgctttaattttctcttctataaaatgagaataatagtaatatccatttcaaagatatattgtgaggggaagataaaagacgtaaagctggcagcacaatcgataactttaagtgttgattaaaatttagccactatttatgtttttgttatcattgttgctgttattatagtatcagattttatacttcagtgggttttttctttctctccctcaaaattttccacattactcatagtaatagagttcttagctggatactgtaatttgactggggacagacatatgtacaaattacataagtgaggaaggtgtcacaaacaaatgctcattaagtttggctgtagaaaatttttaatgcttctccaagataatattacctaaaatatttctgtagactggtaactatataaccaagctttataattatggtccagaaaggagtcacatagccaggaaatggtggtgtgttggaaacagtattgttctgggacttgaggcctgggctgtagtccaaattctgccactgtgtttgtctagactccagtttccttattgtaaaattgtgaggttgtattagatgctcacttatgccccctttaaggttatataattttaacatattaatacctacatttcacatattttgaatctacagtttaattatccttaggtttttcagctcatattagaatggtaagagactgaagataaggttacaggaagtatagagtcatggtaagatagaggcacaattttttcacccagaaaaatcttacaagatgctttaggttgtaactaaactatttttttttctagaattgactttaattttactacagtaaaatggaaactttrgattgtattatattaagatactacatagatagacattattattatagtttagtggaaagattgctggccctatcggaatatctgggttttaaccccagttttgccactagataacttaagtaaatcctaaacaggtttttttttgtttgctttttccatatgtaataatttggactgtaataatgtaacacctcactcagagtatgcacttgaaaaattaattcttacttaactggtctgtctactgtgtaggatttgcattaatattgtgaaaacactttaggggaaaataatttaaaatatatgaatagacatataacttttcttactttgattatttttgcaaatttgttctatttaatcttaaagggattgtttctttgttttcaaagtatagaccattgagaaagagggaaagctccccagtatattttatgaagttagcacaaccttaaacctgttaaagcaaatttaaacctagtaaagatagtataaatacacaaactgtgtacatgcacacatgtatacacacacacacacacacacacactcctatgtgctaaagtttcaaataaaatactagcaaatgaattcagcattgtatttaaaaattatatatattgactagaaaggctttatcccaggaatataaagatgactctacactacaaaatctgtacataattcattatagcaacatattagaggtaaatttataactaagccagtaggtatttctcaaaaagaaggaaaatcatttgataaaaatctaacaacttcattcatagggaagtgcagagtaaagcaacagtgagatgacatgcaggactggcagcatgtgaagaaataggcaatcataccttgatgctagtgtgaagtgttactgctttttgggaaaaaaacaacaatagcttctgaaataaaaatgcacattatcatttgaatattcctgtttctgggagtctttcctacacaaaataatatattaatattagtgtatactataatgttaatatatactaatatagtaaattaggacttatatgcagggatatttgtttcatagtttgtaataactaaaaattaggaacaacatgaatgttgatcaccgaaggagtgactgagtaaattattctacactacactgtggaatatagtgtaaccattgagcaggagggataatattgttgagtatggaatggcaaattatagattactgtgtataatgtaatccattttttaataaaaagggagaagccttatatatgttaaatgtgtgcatgagccgtgagaaatgtgtgggagtattgagttaagagggggtgggataggtgaagtgagaatatcatttttatttcatatgcttctgtagtgtttgatttattgtgaagagcatttatttttgtataaccacatttaatgaaggaaaaatgctaaataaattcaaagtatgagcatgtgggttccaaagatgctgcatttggccagccagagacatggaaaatgtaaaagtattatgctacaccttctattgtggagatatttgttataatttccatccacaact

SEQ ID NO: 722835 - DNA, 612 bp, Homo sapiens
ggtctgctggtctctcagagtcctcaaatcaaagagctttctttttccctgtaccacaagaatactctcttgaggtcgtgaactagaagcattgtagtatccatctagtttgtcttccatccctcagggatcagcgttccttgttggctaatgtccaatgtcttaaaatcyattgttttaaatatttttatttctaggctttttttttttgtctgtatcaggtgggagggtaaaacctgctctcattactccatactgattgaaagtggaagtgttcctactcttttgtatagtaaaatttaaataaatgattttaaatggaattatatatacagttgatataaagaaaaaggcacaaatcataggtgtagaactcaacaatttttttacagttaacatgcttgtataaccaccatcaaaattaagtcttactatactactggcccccaagaaagaccccttttcaaccctgtaagtcaccaccacacccagaattaactaactgctatactgactttcagtgatcatttggatgtgtttttttttctttgtaggaaatgcttgttccaaaatttcccagcatttctgttgaatctcctctttttaaaaaat

SEQ ID NO: 722836 - DNA, 612 bp, Homo sapiens
ggtctgctggtctctcagagtcctcaaatcaaagagctttctttttccctgtaccacaagaatactctcttgaggtcgtgaactagaagcattgtagtatccatctagtttgtcttccatccctcagggatcagcgttccttgttggctaatgtccaatgtcttaaaatctattgttttaaatatttttatttctaggctttttttttttgtctgtatcaggtgggwgggtaaaacctgctctcattactccatactgattgaaagtggaagtgttcctactcttttgtatagtaaaatttaaataaatgattttaaatggaattatatatacagttgatataaagaaaaaggcacaaatcataggtgtagaactcaacaatttttttacagttaacatgcttgtataaccaccatcaaaattaagtcttactatactactggcccccaagaaagaccccttttcaaccctgtaagtcaccaccacacccagaattaactaactgctatactgactttcagtgatcatttggatgtgtttttttttctttgtaggaaatgcttgttccaaaatttcccagcatttctgttgaatctcctctttttaaaaaat

SEQ ID NO: 722837 - DNA, 612 bp, Homo sapiens
ggtctgctggtctctcagagtcctcaaatcaaagagctttctttttccctgtaccacaagaatactctcttgaggtcgtgaactagaagcattgtagtatccatctagtttgtcttccatccctcagggatcagcgttccttgttggctaatgtccaatgtcttaaaatctattgttttaaatatttttatttctaggctttttttttttgtctgtatcaggtgggagggtaaaacctgctctcattactccatactgattgaaagtggaagtgttcctactcttttgtawagtaaaatttaaataaatgattttaaatggaattatatatacagttgatataaagaaaaaggcacaaatcataggtgtagaactcaacaatttttttacagttaacatgcttgtataaccaccatcaaaattaagtcttactatactactggcccccaagaaagaccccttttcaaccctgtaagtcaccaccacacccagaattaactaactgctatactgactttcagtgatcatttggatgtgtttttttttctttgtaggaaatgcttgttccaaaatttcccagcatttctgttgaatctcctctttttaaaaaat

SEQ ID NO: 722838 - DNA, 612 bp, Homo sapiens
ggtctgctggtctctcagagtcctcaaatcaaagagctttctttttccctgtaccacaagaatactctcttgaggtcgtgaactagaagcattgtagtatccatctagtttgtcttccatccctcagggatcagcgttccttgttggctaatgtccaatgtcttaaaatctattgttttaaatatttttatttctaggctttttttttttgtctgtatcaggtgggagggtaaaacctgctctcattactccatactgattgaaagtggaagtgttcctactcttttgtatagtaaaatttaaataaatgattttaaatggaattatatatacagytgatataaagaaaaaggcacaaatcataggtgtagaactcaacaatttttttacagttaacatgcttgtataaccaccatcaaaattaagtcttactatactactggcccccaagaaagaccccttttcaaccctgtaagtcaccaccacacccagaattaactaactgctatactgactttcagtgatcatttggatgtgtttttttttctttgtaggaaatgcttgttccaaaatttcccagcatttctgttgaatctcctctttttaaaaaat

SEQ ID NO: 722839 - DNA, 612 bp, Homo sapiens
ggtctgctggtctctcagagtcctcaaatcaaagagctttctttttccctgtaccacaagaatactctcttgaggtcgtgaactagaagcattgtagtatccatctagtttgtcttccatccctcagggatcagcgttccttgttggctaatgtccaatgtcttaaaatctattgttttaaatatttttatttctaggctttttttttttgtctgtatcaggtgggagggtaaaacctgctctcattactccatactgattgaaagtggaagtgttcctactcttttgtatagtaaaatttaaataaatgattttaaatggaattatatatacagttgatataaagaaaaaggcacaaatcataggtgtagaactcaacaatttttttacagttaacatgcttgtataaccaccatcaaaattaagwcttactatactactggcccccaagaaagaccccttttcaaccctgtaagtcaccaccacacccagaattaactaactgctatactgactttcagtgatcatttggatgtgtttttttttctttgtaggaaatgcttgttccaaaatttcccagcatttctgttgaatctcctctttttaaaaaat

SEQ ID NO: 722840 - DNA, 594 bp, Homo sapiens
aggtaagatacatgggtatagaccaagacagccctaatgttcctctcagcttaactcttcttgctgccrccagctccctggtttccctattcttagagcatttacttcagaagacttgcctttgcggctctttctctgccccttggagagggaaatctgctccaaatcctcctgccagtgctaaaaacctgacctgtctttctcaaggacctgggagacattcatttgaaatgtagacatccaggaacatgggctgccctatctccccatctctgtgggagggaagttgcctaacttcagcgggagtcttgctccaaatgttaaaactccctcttgtcataaagatacgagaaagttcacttttcctttggggaaagctgattcaccaagacggatggcctacaattccctgaccccaggtcttcacatgtgcgcgcgcgcgcacacacacacacacacacacacacacacacactttcttcagaggagctgtgctcaaactgagttctggtctctttaccgtattgcagtagctttgaatgaagccttccttaactttgcccagtgcaatttggttttgacagttccgttcaa

SEQ ID NO: 722841 - DNA, 629 bp, Homo sapiens
ccccgaattcctggcggagatggatttgaggtttcctcccatgtcctccttcggtggccttacgattaaagctctttctctgctgcaaccccgtgcctccaggtgttgatttgctgcatattttgggtaagggacccattatggttacacagggaggcagtgccccccaccatcctcttcgcattctgctgctgaacagatgcttcctacacggctggtaatgtgggccctcctgtttcaaggtccccaattcagaagtctcattttcycagagtgtgctgtcatgggaccatgttcttccctttgctcttggagaatagacaaagccactcagcccagccacagcctgagtcttgccctacctccctctccagcctcaactcattccaggctccagttcagcatctgtctctagccacactgattttccttgagtttcctgtgtttgctgttgtctctcctgccagcaacatatcggggtgaggccatagcttctttacttatgtcatttttttgtatgtttcttatttgcttcaattcaaacatcttgtctcaaatggaatgcagaaggagagatgagattcctgctgtcttctattaaagaaaacattatgcataattgcaaaaat

SEQ ID NO: 722842 - DNA, 587 bp, Homo sapiens
tgactgtaaaactatacttcattttatacagtcaaggtcaaaagaataaatcaagttcgaataaaattttttctgaaatccatatgcaccaagaaactctaaaaattcctggggtaaaaagaactctttctagcctggctttgtatttcctctctgttcctaactgttcagaaacatacccaaacgattcaatatcatcacaggctactcatttccacatttctacctttcaaatagtttataccgtgaaatcacaraggcactgattgtcattctcaaaagacagaatcactttactatcacatcaaaagcatttgaatagttcctctagttatgaagaaggttaaatctaaaatgttgaaactgttgcattattattgtgaaatgaaacagcaatcacaccagatagttagattggcacagatttgtgcatgcccagaaaactaaagactaatgcttagactatactccatatctcttatacgtgatttatgtttattttccatgttcagatctccatgtgtcctagctttccattaaaaaacaataggagagtccttctgaagctaatttaacacctgtgaatt

SEQ ID NO: 722843 - DNA, 661 bp, Homo sapiens
ctcaggaagagccaaatggatcaggtgcctagagtaaggtatgtggaagggtggggagcttctatgccctctttgggtgcaccatcttttcagcacctcaatgtgttcaccaacgtggaagctccctgaacttcattgtttagactttatatggaggttccattacatgggcatagttggttaagttattgttcactggttaagccagtttccaacccctttctcctccccagagatctgagttggggtggtctgaagattccaaccctataatccgtatggttggttttctatgacaagcagctccccactcttaggggctttccaaaagtcacctcattaacataaacgtgaggttgaaaggggcttggtatgartcacaaaacacactcctttctcctttattgctctggagatatttcagaagctggggacaaaaccaaacattatgctgaagatgccataggagcatcataggttccagagctctggccaggagctagggatgaagaccaaaatatgtatttctttctttttttttgagacgcagtctcgctctatcacccaggctggagtgcagtggcccaatctcggctcactgcaagctccgcctcccgggttcaggccattctcctgcctcagcctcccgagtagctgggac

SEQ ID NO: 722844 - DNA, 825 bp, Homo sapiens
gatttttaaacttcattatcttgatcgtctgtgattagagtaaattgtggactaactgctggtcacatttaagtattaaaattgaaaacataaaagaacagaaaaacataaacacacctcaatatgcaaggatattcacctctctacttagattcctaaaattaaaaaaagtctaagtatgtcaaattgcataactattataatcaaatttctatctattttaaataaacaattaaattaaaaagaactaagatatttaatttacctccattgaatgagaattgttagctgtaaattcagcttgcagtggcctctctatcttaaccaaataatacatctgtattatttccagaatatcaataaagctaaaatcaccgagtttatttcttttctactgtggacaactgggccacgatattatgagttcttaattttgaatggccactgagcaggaataattcaaagacaaatttcagctgttgctagagatagtttcattattttcagaagctctttatccataacattctctagtgtcttcatatagtttaagttttaccctctgatttatgagcaacaataaaatactgctataaactaattttattgctataacctgtgatatgacaatatggagcgacagcartatcatcctgtccttcacatacaaagctgacattactgagtcaccaatattatggtgtatttttaagtcacattcacatattcatatcctgacctttttgtttaagagcttgtctactttttactttgagaaaattattttaattatctgaatatgtgctttttctttaaaattggaag

SEQ ID NO: 722845 - DNA, 744 bp, Homo sapiens
ttttccagaagaccacctcagttacctcagttattccaagactaacaagcaagtctctaagtcagttatttctggttgctaccttctgatggtcatttttccttttttcagaaatatgtacaacagctccctgaatgcaactgttatgatgcaaaacaaactgcatgattaggaaattgagcaaattcaggtgcctttctgtaaattactgactgctttctctctaatctcttaatctactcagatctctktgaattatttctctctctacagcttttgcgtcgctctcagatgctgtgccacccaggcattaaataaatgtgcagttatcttgtctccttgataattaacagagatgttaagggctagtaccaattcagtggcatgggctggaaaccttccattacctggtatgtcattgtttatgctctattaagcagttttcatttcaccttatgggcccatataacatccaagctagtggtttctcaaattacaggtggtactacagattttattaaatagcctcttctttttgttttcagaatcatctttatatatattgcagacaatctggaaaattaaattgggcaatatatatgtcttaaggttttcagttttctctctttctctctctcaattatatccattgttttacaagatagaataatggcagtgtttctcattttcaagataatatattttattgttcttgtttatctttttcccagattatcattggtg

SEQ ID NO: 722846 - DNA, 744 bp, Homo sapiens
ttttccagaagaccacctcagttacctcagttattccaagactaacaagcaagtctctaagtcagttatttctggttgctaccttctgatggtcatttttccttttttcagaaatatgtacaacagctccctgaatgcaactgttatgatgcaaaacaaactgcatgattaggaaattgagcaaattcaggtgcctttctgtaaattactgactgctttctctctaatctcttaatctactcagatctctttgaattatttctctctctacagcttttgcgtcgctctcagatgctgtgccacccaggcattaaataratgtgcagttatcttgtctccttgataattaacagagatgttaagggctagtaccaattcagtggcatgggctggaaaccttccattacctggtatgtcattgtttatgctctattaagcagttttcatttcaccttatgggcccatataacatccaagctagtggtttctcaaattacaggtggtactacagattttattaaatagcctcttctttttgttttcagaatcatctttatatatattgcagacaatctggaaaattaaattgggcaatatatatgtcttaaggttttcagttttctctctttctctctctcaattatatccattgttttacaagatagaataatggcagtgtttctcattttcaagataatatattttattgttcttgtttatctttttcccagattatcattggtg

SEQ ID NO: 722847 - DNA, 625 bp, Homo sapiens
aggcaactcaagtttcaataacattctcctttgagatattgagaaaattgagttaaaattgtttttgggtgcatgaatttaccatattgttgcttcgattcttcattcacagtaacatattttttaagcaacaaaacaatactgtgcaaagtttttgttaatttccccttagtggtcaattgtcaattttgtgtaaatgaacaattttttgagggttgactctattaaaatcttcctgttttacccttgtgaagaaactgtttaaaaaacagataatatataaaattgtaagtatcattcttgggtgaagrtgaagcataaaactatagtaataattctttgttaattttttcagcagtcattatttgaattcttctatgttacttaacttttcaattggtgtagcttttataagaaacatgcagatcacattgatcatatataatatttaaaaatatacttcattcactactttttgtctatcaaatgtgatataatcacattaataattttcaaaacaggatgatgttagtcatacgggaaatcttttggaattctggcactgtatattgagaattcttataaaaattgagactatgatgaaatattgtgttttatttaaaaa

SEQ ID NO: 722848 - DNA, 922 bp, Homo sapiens
gcaaagagagatgaaataatgaagtcttaagatatcaagaatttgaaagaaaaggcaggtcatctttgaaggttagtgacatagcattcatcttctgttgtcaccttttccgtcattccctgtatgcctgatggacagctttcactcaggttcagagaacagcatgcaaagattagctaccaattaatctttatgaagtgagctccatttctagccagactgagcttatgttttagcagaaagcatttttgggaaatgtttatgttagagtttgcccttcttgacaaggtgagacataaatgtctacttcatagrcatgaattaagatgggaagatatttgggggaaacatttacttaaacgctaaataataaaggtacacaaagggcaaattatactagatttctttcccacttgttttctatgtctcatgcaattcaccttgattcccttcagtttctgtttaatgtagaaagtggtattttcattattttaagcttctagcacaatgaaagaatttctctttttcatgaactggatcataaatgaaagggaggaagagtgtcctatatcatatttattgttcaacaaaacactgctccacggcttaaattcagtttaaaaaagagaatttattgaacatctaacacatacataaaaggcagtaaagacaaatgagaagagggcaggatattgaagtatacagactttaatgctgagttttgtatcttagtaagttactccaccttacagaggctcaatttcccctgatttaggaaggcgatgctaatgggtattgcctaggtgtaagtataaaaatgttgtatttaagagaatcccacaagcttggtataaggcagaaaataaatagatgtgacatgaataagtagtttattacatttgtatgctacctgcagactaga

SEQ ID NO: 722849 - DNA, 1481 bp, Homo sapiens
ttgtgccacatttctttatccagtctatcatcgatgggcatttggtttggtttggctttgaaactgcaatccctcttcccaaaaatccccacttttcccactttctgaatgaagctcacacagcaggttggcatttaagacatgctactatctggaaaaaacccctcaattttaccacatatctatagcctatagatcaactggattattattattaatcaatttttaagcccacctcattgaatatatgagactatcaagattagaagatgggatggcrttctctaggaaaactgtcctctgtttcaaatgacacaccaatttcaagatcttcctgattccatcagttacttcctttttccatcaactgtctgtgtgtttcttctttccttgcattgaagatatttacatttctgatttacaacaatatgttataatcatttttttttttccgagacagggtctaactctgttgcccaggctggagtgcagtggtaagatctcggctcactgctacctccacctcctgggttcaagcaattctcctagcctcagcctcccgagtagtggggactatggagcatgccaccatttctggtctgatatatgtattttagtagagacagagagagatggggttttgccatttaggctaggctggtctcgaactcctgacctcaggtgatccgcctgcctcagcctcccaaagtgctgggattacaggtgtgagccaccaaggctgccctcttataatcattgtgatatgcatatttccttcaaaatttatgttaatggaactgaattgcttgtaaatcatgaatgaatggcttgtaaaatcatcccacaatgaaatattcattggaattttttttctgtactaactcacagctgggtaagagaagtagaaacagtcaattacatggatattttatatgcatattatcaaataaaattatattttttaaaaatagcatatttgatatcacatatacatatattaagccaggataactttaagaaaattttatttcagtttctttagataccagttatcattactctttatctcatttatctgaagaaaatgcacatgaggcataggaatctctcctccctattacaggggaagcaagcaagaaacacattttgttcttgtgaaagacttaatgggaggaaaaaacagaggatggaaagccctaatctgacctgcaaacaaaaaagtcctttgaaaataatgcagtaagtaatttcctcccctctattggcaatgccatctcaatctctaagaatttcctattcactccttgacctttccaatgaggtcatcaccaaaggaaatgtcttacttcaagagtaacaacagactttaaagatcttaaacaatttcagagtatagaccttgttagatcctgttctcttgaaggggaagagtaagcaagagttttttgccaaagaaataacttttcaatgaatttcaaagc

SEQ ID NO: 722850 - DNA, 2450 bp, Homo sapiens
gtgtttaggattgtatttttaaattatgtgactaccctatgaaagtagaagcttacaattaagtatcatatttgcaaatatcactcaataatgtttaggccatttaaatgttactagatttgtcttttgtctttcagttggtggttataggtgaggtctcctgcagttccttgcaggaaagcattttaaagcaggatacgtcttgttcaacaaattttaaatgcagtcctgtctgaaggcaggctgatgaagcagatgatgttctctggttcctggcagcctgtggaatagaggatgatgttgacattgcagttagagtcaatcttttttggcaggagctgaaacaaatcactggccagatggccaaattggaccgaggcaaaacatttattagcatccaatttgatcattcatgtgactggatagtactgcacaccctataatcattcctacttggtcttcagtgaatcaaactgaaggatattttttcctgacccattttatttcacacctaatagctagatgtccttgtaatgcatatgacctagttagttagatgtaggctctttttctggagcaagagaagaggaaactagaaccttttctttctttctttcttttttagttgaaaggccaagcttggagaagcaaacagctgtcagctttgagtaatacaaatcatttttatgtatggttccttagcagtctctagagaagtttatattgatgagattaaaattcaaatatgtactctttgtccagcatcttaacttctaggaattcatccaaagggtgaattatgtatgtgcacagagatttaaccacaaacatgttcatggtagtattattattaatagaggaaaagtaaatgtctatttaattcacttatttaagaatacacgttgagctagtgctttgagtcacatattattctatttgctaatcaatgttagattgaaacaaatgttaatgataactcatggagtgaaatactatacaggcattagcagtgctgtataagaatagtcaatgacatggcaagatgctgatgacatattagtgaaaacttaggcaataaaaaatgacataccttttgatgtttactttgtaagtgttctataatgaagtcataggagtattctaatagtagaaacaaaataatagaccgtatttccaaacaacacacagaaagcctctcaagctgttaacctcgcacttaatataaacatggtgatggattttctaagggaaaggattgattcaacaagtatttattgagcttctactatttgctgctttttacagaatgccagcacacaattgtgatgctttccaggaatattgggtatgaccaatcgcacagggataggagtggcttaaagactgctatrgagtctctgtattcctacacagatattaacatattctgtagtctctaaggcaaagagttgtgtattaccccactccatttcacaaaaaattggtctatcttgggtatcatgtgataattttgccacatcttttctgccttccttcactgtattcaaacttgatttcatggttgtaaacattttggtggtgtggattttttccagactgtgtctttttcaaggtttcagacattgctagctttgattcctgtgaggtaactccaacagccccctgagtgacactagtagtactgtatgctgatagttaaaaggagctagggatgggggagtgaaaattttaaaagtccaagcaatataggctttgaggggttggccatcaaaagtcagtaacaaatatctggattattcagtctatgtctgggtatcacagatgaaaaacgaaggtctaagctgaagctggccagagcatgactttggagctatgggcaataatgatgatcaagatcatctgcatcttggaaatgtaccagaaacatggcttcttaaagaacaagggccgatagaagaagcaagacgatagtcatggaagaggataattttaccatctccaaatatggatattatgaatcaccaaggaaattatatttaattaacaatttaatttagctagctcctctaatattttctggggtgctatttccatgtaatcaatctgcctacataaaaggtaaagacaaaaaaatccttcactagaaactagttgaaggagaaatgcttctctgaattccatgttgtccattttagtatatgtggcattagattttccttgagcctccctataatttcatagaaaaagtatcgacctcaagagtgccaaggaagttaaaatgaatttcttcttatggaatgaagcaaactctttctgattttgttactcttatctgtattagtgagcttagggtttggcttctcttggcattctaaactactgagcaattgcctcaagttctacctgcctgcagcgataaagctgacaaatgtgtttgagacttcggagta

SEQ ID NO: 722851 - DNA, 612 bp, Homo sapiens
  misc_feature 460, 461, 462: n = A,T,C or G
tgaagtttatgtagcaaaaggattacttttgagataaaacaaaaatcaataaaagttattattctttaacatactggctgggtgaggcagctcacacctgtaatcccaatactttgggaggtcaaggcaggtggattacttgagtctaggagttcaagaccagcctgggcagcatagcaaaacaccgtctctataaaacaaacaaacaaacaaaatagccaggtgtggtggcgcgaacctgtggtyccagctacttgggaggctgaagcaggaggaacacctgaacccaggaatttgaggctgcagtgagccatgattgtccactgcactccagcctgggtgacagagcaagaccttgtctcaataaaattaggatagaatagaatagaagacttcaatggcttcctatgcacagaggccgactgtcatttcttcacactatgcaaagcaggcctctgannngcctgccgccccatccctggtctcagcagccggccccctcactgcccatggtggccctctgggtggggtcggggtctggctctctgcaccttgcccccgccatcctttctgggtggaagtccgctccccgtccctgccgccttgtctctg

SEQ ID NO: 722852 - DNA, 612 bp, Homo sapiens
  misc_feature 460, 461, 462: n = A,T,C or G
tgaagtttatgtagcaaaaggattacttttgagataaaacaaaaatcaataaaagttattattctttaacatactggctgggtgaggcagctcacacctgtaatcccaatactttgggaggtcaaggcaggtggattacttgagtctaggagttcaagaccagcctgggcagcatagcaaaacaccgtctctataaaacaaacaaacaaacaaaatagccaggtgtggtggcgcgaacctgtggtcccagctacttgggaggctgaagcaggaggaacacctgaacccaggaatttgaggctgcagtgagccatgattgtccactgcactccagcctgggtgacagagcaagaccttgtctcaataaaattaggatagaatagaatagaagacttcaatggcttcctatgcacagaggccgactgtcatttcttcacactatgcaaagcaggcctctgannngcctgccgccccrtccctggtctcagcagccggccccctcactgcccatggtggccctctgggtggggtcggggtctggctctctgcaccttgcccccgccatcctttctgggtggaagtccgctccccgtccctgccgccttgtctctg

SEQ ID NO: 722853 - DNA, 612 bp, Homo sapiens
  misc_feature 460, 461, 462: n = A,T,C or G
tgaagtttatgtagcaaaaggattacttttgagataaaacaaaaatcaataaaagttattattctttaacatactggctgggtgaggcagctcacacctgtaatcccaatactttgggaggtcaaggcaggtggattacttgagtctaggagttcaagaccagcctgggcagcatagcaaaacaccgtctctataaaacaaacaaacaaacaaaatagccaggtgtggtggcgcgaacctgtggtcccagctacttgggaggctgaagcaggaggaacacctgaacccaggaatttgaggctgcagtgagccatgattgtccactgcactccagcctgggtgacagagcaagaccttgtctcaataaaattaggatagaatagaatagaagacttcaatggcttcctatgcacagaggccgactgtcatttcttcacactatgcaaagcaggcctctgannngcctgccgccccatccctggtctcagcagccggccccctcactgcccatggtggccctctgggtgggstcggggtctggctctctgcaccttgcccccgccatcctttctgggtggaagtccgctccccgtccctgccgccttgtctctg

SEQ ID NO: 722854 - DNA, 897 bp, Homo sapiens
tttcagagtttcagacacacttacattcgtgtgatatatcccacaacttatattacgaataggtacagattctgaatagttaaatttaaaatatttttagaatttcaaatctaacctttggattatgtttttttggtatccacagggatgacagatttttctgttgttcttgggttttctaatcagcatcacagagtatcacaaggacatgttcagttagtgcatctgattcagattggatagaatgtatcatcttgttggtaaaagactttcaggctgcaaaattactttccaaaaaycatgcaaatctggccattagcaaatgtcaatgaatgaagaataagctcaagtctccctcccttttgctttaacctccatcgctacaaatatacacacacacacacacacccccccagaggcacgtgagctaatgtgtaaacgaggaagacagagactttgatctccatggtgcccactcttcatatagttttattttgctcagtttgaagtagcacaggccctgagccaataggaagccaaaggaaactcagggacagccagagtttccagttcaattcagaacaagctggattaacctggaaacagtgagaaaggctggagacatctgtttctacatttgccccacagtcctgatgctgctactctgagctcaaaagaaaagaaactgtgttaattaaatttatatcttaaaattcggcctatgcacacccactggtgaggaaaataaggtacattctgtgctatgaggtagccagtactagcagataataaccaggaacactagaaagacaactgaacaagaggcagaaaataatcatttagggttaaaataatgcatcacatttgaggagaagggaaacagaaatcagaaaatga

SEQ ID NO: 722855 - DNA, 897 bp, Homo sapiens
tttcagagtttcagacacacttacattcgtgtgatatatcccacaacttatattacgaataggtacagattctgaatagttaaatttaaaatatttttagaatttcaaatctaacctttggattatgtttttttggtatccacagggatgacagatttttctgttgttcttgggttttctaatcagcatcacagagtatcacaaggacatgttcagttagtgcatctgattcagattggatagaatgtatcatcttgttggtaaaagactttcaggctgcaaaattactttccaaaaaccatgcaaatctggccattagcaaatgtcaatgaatgaagaataagctcaagtctccctcccttttgctttaacctccatcgctacaaatayacacacacacacacacacccccccagaggcacgtgagctaatgtgtaaacgaggaagacagagactttgatctccatggtgcccactcttcatatagttttattttgctcagtttgaagtagcacaggccctgagccaataggaagccaaaggaaactcagggacagccagagtttccagttcaattcagaacaagctggattaacctggaaacagtgagaaaggctggagacatctgtttctacatttgccccacagtcctgatgctgctactctgagctcaaaagaaaagaaactgtgttaattaaatttatatcttaaaattcggcctatgcacacccactggtgaggaaaataaggtacattctgtgctatgaggtagccagtactagcagataataaccaggaacactagaaagacaactgaacaagaggcagaaaataatcatttagggttaaaataatgcatcacatttgaggagaagggaaacagaaatcagaaaatga

SEQ ID NO: 722856 - DNA, 897 bp, Homo sapiens
tttcagagtttcagacacacttacattcgtgtgatatatcccacaacttatattacgaataggtacagattctgaatagttaaatttaaaatatttttagaatttcaaatctaacctttggattatgtttttttggtatccacagggatgacagatttttctgttgttcttgggttttctaatcagcatcacagagtatcacaaggacatgttcagttagtgcatctgattcagattggatagaatgtatcatcttgttggtaaaagactttcaggctgcaaaattactttccaaaaaccatgcaaatctggccattagcaaatgtcaatgaatgaagaataagctcaagtctccctcccttttgctttaacctccatcgctacaaatatacacacacacacacacacmcccccagaggcacgtgagctaatgtgtaaacgaggaagacagagactttgatctccatggtgcccactcttcatatagttttattttgctcagtttgaagtagcacaggccctgagccaataggaagccaaaggaaactcagggacagccagagtttccagttcaattcagaacaagctggattaacctggaaacagtgagaaaggctggagacatctgtttctacatttgccccacagtcctgatgctgctactctgagctcaaaagaaaagaaactgtgttaattaaatttatatcttaaaattcggcctatgcacacccactggtgaggaaaataaggtacattctgtgctatgaggtagccagtactagcagataataaccaggaacactagaaagacaactgaacaagaggcagaaaataatcatttagggttaaaataatgcatcacatttgaggagaagggaaacagaaatcagaaaatga

SEQ ID NO: 722857 - DNA, 897 bp, Homo sapiens
tttcagagtttcagacacacttacattcgtgtgatatatcccacaacttatattacgaataggtacagattctgaatagttaaatttaaaatatttttagaatttcaaatctaacctttggattatgtttttttggtatccacagggatgacagatttttctgttgttcttgggttttctaatcagcatcacagagtatcacaaggacatgttcagttagtgcatctgattcagattggatagaatgtatcatcttgttggtaaaagactttcaggctgcaaaattactttccaaaaaccatgcaaatctggccattagcaaatgtcaatgaatgaagaataagctcaagtctccctcccttttgctttaacctccatcgctacaaatatacacacacacacacacacccccccagaggcacgtgagctaatgtgtaaacgaggaagacagagactttgatctccatggtgcccactcttcatatagttttattttgctcagtttgaagtagcacaggccctgagccaayaggaagccaaaggaaactcagggacagccagagtttccagttcaattcagaacaagctggattaacctggaaacagtgagaaaggctggagacatctgtttctacatttgccccacagtcctgatgctgctactctgagctcaaaagaaaagaaactgtgttaattaaatttatatcttaaaattcggcctatgcacacccactggtgaggaaaataaggtacattctgtgctatgaggtagccagtactagcagataataaccaggaacactagaaagacaactgaacaagaggcagaaaataatcatttagggttaaaataatgcatcacatttgaggagaagggaaacagaaatcagaaaatga

SEQ ID NO: 722858 - DNA, 543 bp, Homo sapiens
ctatctttaaatggcatatttcatggagggtccagagttaaggtacatgatgacagaatgataacgttaytcaactggtagttaaacaactttggatcaagatcctctccaaaaggaatcagacctgtgatcctgcataaattacataaacattctccatctcagtttaatagtaagaaggcatcaggcttagctaactgtgtgtcagatcatatattaggaaccccttcagcagctctgtaaggaattattcaatatctcgattttgcaaaagaaagaaaatgaagattaagtaaatttcataaggtcacctatcaggtaagacagggagtattggaattctgctggtatctccagatctttttttctttttattttttttttgagatggagtttagctcttgtctcccaggctggagtgcagtgtcgcgatcccagctcactgcaacctccacctcccgggttcaagtgattctcctgcctcagcctcctgagtagctgggattacaggcgcacgccaccacatctgtctaatttttgtac

SEQ ID NO: 722859 - DNA, 1194 bp, Homo sapiens
gaaccaatctcctatgcataccgagggatgactttacagggaaatttaaatgctcaggaagaaagctcttcttcccagtgaaataagtattcactcaccttctatattttaacataattcttgctttctagatcacgcattataagaagagttatcaagaatatcctactatttcaattatttcagcctggagaatacctggcacctcaaacttccaaatcctttgtcttcccaaggaggtatctgaggtgctcagtgaccactgaaagtttcctagggaggacacagatgctgtggagtkagcacagacatgtgtgtcatgtctattttggttcaaatcccagttctattcttaataggtgtctcatcttggtgaaattatttaatctctcttaatcacagctttgacatctaaaaatacaaggataataatggcctacattgctcgatgtttctcaaaatatacagatagtttttataaagttcttggcacatagatggttctctagccaatttagcaatggtataattattggcctcctataattataattattattattactaccgctgttgccaatggtattacatccaacccactgcacagtgcctttataaaacagctcctgcttcatttttctccgcttctatggattccaatcttgctgaggccactgggtcttggctgatttttggttttggtttttgatttttttgagacagggtcttactctgtcacccatgccagggtgcagtggcacaatcaagactcattgcagccttgactgcctgggctaaagcaatcctcccacctcagcctcctaagtagacacatgagcacacaccaccatcctcagctaagttttttattttttatttttggtagaggcaggggtctcactatgttgcccctctcactttgagagactgaggctggaggatcgcttgaggctggtctcaaactccttgaaagaagatgatttcagggagaattaagggactttatatataggccaagaattttggagccccaaatgtaaggagtgggattttctacaagttgggcagagaatcacaatccttatattaaaaaacaacagcaacaacaacaacaaaacacaatcagctgtgtgacagggagagacatgaggaaaggcagaggggtaatattgggaactagaagatattctgcca

SEQ ID NO: 722860 - DNA, 610 bp, Homo sapiens
tccattaacacagatgaaaaaatcttttaaaatattaacaaatgaaacataagcatatatgaaaaggatgctacatgcctatcaggaggataggaatgcaaggctagtttaattttctaaaagtcagagtaactgtatcataatctcaacagacacagcaaaatcatttgacaaaatgtaacctccaattataatgaaaactctcaaaaaattagaatgaaacgcttttcaatcagagaratggcatctacaaaaaccccatttctagtattaaatatagtggttttaattaaaaatcggggaagaaaacaaaatatccactttggctattaaaagtcaatattttcttgaagttctacataaaaaaaatacaataaaaaagaaaaaggaagggaaaaaagtgatagcatataaacaagaaagagaaaacttagtttatagaagacgttactgagtattctgaaattttaagaaatttttaaaaagttatcagacatagcaagtgaacttaagatcacaagatgaaagatcaaaatataaaattcaagtatgttttaatgtaacagcaataaaataatagaaatttaaaaatacaatttaaaagtagcat

SEQ ID NO: 722861 - DNA, 610 bp, Homo sapiens
tccattaacacagatgaaaaaatcttttaaaatattaacaaatgaaacataagcatatatgaaaaggatgctacatgcctatcaggaggataggaatgcaaggctagtttaattttctaaaagtcagagtaactgtatcataatctcaacagacacagcaaaatcatttgacaaaatgtaacctccaattataatgaaaactctcaaaaaattagaatgaaacgcttttcaatcagagagatggcatctacaaaaaccccatttctagtattaaatatagtggttttaattaaaaatcggggaagaaaacaaaatatccactttggctattaaaagtcaatattttcytgaagttctacataaaaaaaatacaataaaaaagaaaaaggaagggaaaaaagtgatagcatataaacaagaaagagaaaacttagtttatagaagacgttactgagtattctgaaattttaagaaatttttaaaaagttatcagacatagcaagtgaacttaagatcacaagatgaaagatcaaaatataaaattcaagtatgttttaatgtaacagcaataaaataatagaaatttaaaaatacaatttaaaagtagcat

SEQ ID NO: 722862 - DNA, 817 bp, Homo sapiens
ggtacatgcaagaagtttgtggatacagagcagcagcaggaaccagacacttcttatcagtggggtgggttggaacttcaggaagcgccttcacarcagtgccatcctaattggagtatagacggatgggcctctctgaaaccagagactaagtttgggtctctatggtccagtaaccttccttgaaattccccctggaacactaggaacctatttcctacatgctaaatctctccagctcttcaaggagcctcaacacagtgtgcctgctattgggcactggggactgaatcaggaagaagaggttgatgatggtgggtgggtaggaaaggccagtgaaaaagatgttgccaaatgtgcaggtgtcaaacctgtaagacttggatattgtaaaaatcctagctgtccaattctatccactttccccgtgagggccagaaagtttgagtgactcaccaaaaaaatacatagcacatccaggattcaaacttgcttcctgtccaagagtaccctgacttttgccccagtcatacccattttgtaattggctctcagttgaggtgggtacccagatgcccagcatagtgagatcatgtcttaggcacagtagctcctatgtgctccccgaattccttccacctgcccgacttgtctagtgacttcagagtaaagcagctgccaaagctggctcctccatccttggagaataggctccaagatgtttgctgagtaaatacctgtctcctgcttgtttgtcctgtgcatagttcttcttggccatcatgtccttagctcctgacatagcctctggtttaca

SEQ ID NO: 722863 - DNA, 940 bp, Homo sapiens
cattttaaaatccatcctttaaaatgtggattacttcctgtaaaggataattcagagagtatctcttctctgcttgacaatctagttatttgttatgctcaaaattaagtataatatcttagccagatatttgaagtctgtcaccctcctgtggttccctccctgtatcttacacttcagtcacactcctgctttttgttagtccttgatctgcattgtgctttccacttctacgcttttacttatcatttatatctggagtagcttgttcccgttcttataaacttgtctacccttctgtgtttcctaatgtggccctattgatgctcttaaaataatgtgatcttttcttatctgagcccatggcattttctcatttttctttggtacttttcttactaagctttgcattatttgttggtttgtctctatctgtcttatctatctacccacccrtctctagcctagaagcttcaaaaatgtagaaaaatatttttctttctgattatttttccccagaacatgcatatactcaaacagagagtcaattaatatttggtggatgaaggaaagtgttttgcttgttttccagtgttcagtttcctttacatttttttagttagtatctggtagagagagaataagatttggagtctgatagatctagatttaaatcctagatatcccacttgctagctgtatgaccttagagaaatcaagtaatctctctgagcttctactctctcatctacaaaatgggagcaattatacttagttgcttattttgagatttgaagtattatgtgaaagacctttgcaaagaagagctcagtaagttttattggttctaccttctctttcttccttctgattttctctattctcatatattaaatttgttatacaactccactgttaatcacattttgttttaatgcta

SEQ ID NO: 722864 - DNA, 626 bp, Homo sapiens
aacatacatttatattttattataaaatgcttttataatttgcctwtgaaactattaagttatgagtaatcattcaattagcttttggctataatttcttggttcttctcatggacactcaggaatttcatgaagaacaaaacccaatttataaattgtattcaaatatacagaaatgtctacaacatttatgaatttttgaacactaaatttatgtttaccaaatttaacaatgcataaagctagaatgctaaatctggcagccacttaattgaacacattaagtttgacttggaagttttattttgcatttaggagccagtaattttctcccagttctaaaatgttttcataggctgtgtatgaatagtgattaacacatagaacaacacttcagtggcctaaaaccagttctgccctttaatcagctatgagaagaagccaaacacctcagctggcagaggcgttagagagagagagtcattccttgtcagagaccagtgaactttggaattgtggtcttgggagccagagagacctgggatcaaatgccagttacaccatcttcaggaagccacttaaccactctgagtctcaacttccttctgtttaaaatggaaattaaa

SEQ ID NO: 722865 - DNA, 627 bp, Homo sapiens
aactgcaacatcagttcttccttgttctgcagcaccctgctgaccttcagactcaaactggcatatcgactctgcagatttttgacttgccagcctccataatcaggtaagccgcttccttatagtaaacctctctctccctctctctctatatatatgtacaaatatatgtatatacgtatgtgygtatatatgtatatctttctacatatgtatgtatgtgtgtatatatatgcatgtatatgtgatgtaggtatgtatacacacacatacacacacacacatcctgttggttctgtttttctggaaaactctgactaatacatatcctctccagagatacctaaagtgtggtcttcagccaggtggctccatctttagtctcttggttcactggagaagaaagtcctatgtccattatcagactccacctccctttgtaaaaaaaaaaaaaagggatgaacatcaccttataaataaataagtgtatttacttataaattgtatacatgtaccactccattactaaatcaaatgtattacatatatttacctataaattaaagaggtaccacttcattaatacagcaaatgcattataaaaagatgaaaaatatataactacag

SEQ ID NO: 722866 - DNA, 589 bp, Homo sapiens
tctgccttagatgctattcccacccatctttacctagctacctcctacttgtctttcaggactctgccttacttccttggggaagccttttctggccttcaagtctaaattatgcccatcttgttttactcgcttataggatgtattattttcctttgtttcactaatcacaatttgtgattattcgctgcatatttcttttatacgtgtccccttgctagacttaacattccatatgttctatatattgtacagcaaaagatatgacaagtgcaatagaattggcgtcaagcatgctggatttggatgcgggcttatgccacttgctaactgtgtcatctscaacattttatttaatcctgtaagtctgagtttgaatacaaaatgaaaagtagtaacatataataggtagagaaccagaatacactgtgggaatcagggattgagggagcatctagaagtaatgaaatcaaaggcatgggccatatttacattatcttgcatcttagtacctggagcaagaaacaagttcaatgtatgtttgatgaatgaagtggtcctcactcatttgagaaatccatgcaaaatt

SEQ ID NO: 722867 - DNA, 782 bp, Homo sapiens
actaaaccataaagcataattgtcaataataactcctatagagcctgtggcaacaatgaaaatccaacaactctgcctcttttgtaaagatgggagcttatctttcaaacagcttgtgctaacacccaggttagcacctaattgtctcctcacaatagaaaaatgaaatggttgccatgacaactcagtgatgagttcaggcgttgaagttttttttttttttttttgacataaatctgctgactttgacttaactgagaccctatatgtgttttgtttttgtaatgctaatttctcctagagttttaaagaaattatcaataaayatttttaaaacctacccttctttagatagtataaaagtgatctacaaaataattaataagaatgtgagtaaattgctgtctttccacaactcagatctctccataatatctaggaccatgtttataatttaggaaaaaaaaattcttagaaaatgttctattgcttcatctgacttctgaaatgaaactatatgaaactttgatataattattaaaaaattgatggatgaattttttaaaataagtaattttaatggcaatttctctattcaagtttagcttatgggatcaccatactttttgtgtgttggtggttggagcaggaagagaaataaaataccgaagtctcctacatagtgtactcagaaatgtctatagggatgtcaggcccacccatccgagtgcctgcagaagtgcctgaaaatgttattctcatttccatgcaactagatgctt

SEQ ID NO: 722868 - DNA, 632 bp, Homo sapiens
tccttttcttgggaactatttatctacctggttgcacaaattggaaccttaagtgttattctttaatacttgtatttccctcactttttatacttcgtatcaggtttgttttctggttggctaatcttacctgtaatataagtaatgcaatatataatatatgtaataagaagtaataataataaaattaataataccggtaatatttctgtaatttgttcccttctcatcccaatgccctcacctgtctcagatatgtttaaccagttaataacacctaaagcacaragaccagtggctaccatttttaagttctaacgttttggccgttatcattgttattattgttctaatggacttgcatcgtgcagaggatgccatggtagcatctcaactggtttcgccacatccattttttgcctccctccaaataattctgcacggagcaaccagaacgatctttgtagaagctgcaaagcagattatgtggtctgatgtaagacatccttcaaagacttcccatggccctatagtatctggcctggctatgttttgaattttttagctagtctctcttgaatatgacttatctatcctggcattcttggggaatccaaacttaattccagtga

SEQ ID NO: 722869 - DNA, 632 bp, Homo sapiens
tccttttcttgggaactatttatctacctggttgcacaaattggaaccttaagtgttattctttaatacttgtatttccctcactttttatacttcgtatcaggtttgttttctggttggctaatcttacctgtaatataagtaatgcaatatataatatatgtaataagaagtaataataataaaattaataataccggtaatatttctgtaatttgttcccttctcatcccaatgccctcacctgtctcagatatgtttaaccagttaataacacctaaagcacaaagaccagtggctaccatttttaagttctaacgttttggccgttatcattgttattattgttctaatggacttgcatcgtgcagaggatgccatggtagcatctcaactggtttcgccacatccattttttgcctccctccaaataattctgcacggagcaaccagaacgatctttgtagaagctgcaaagcagattatgtggtctgatgtaasacatccttcaaagacttcccatggccctatagtatctggcctggctatgttttgaattttttagctagtctctcttgaatatgacttatctatcctggcattcttggggaatccaaacttaattccagtga

SEQ ID NO: 722870 - DNA, 932 bp, Homo sapiens
  misc_feature 417: n = A,T,C or G
gttgttttggccggctgcggtggctcacgcctgtaatcccagcactttgggaggctgaggcgggctgatcacctaaggttgagagttcgagaccagcctgaccaacatggagaaaccccgtctctactaaaaatataaaattcaccgggcttggtggcgcatgctgtaatccagctacttgggaagctgaggcaggagaatcgcttgaacctgggaggcagaggttgcagtgagctgagatagtgccaatgcactggagcctgggcaacaaaagtgaaactctgtctcaaaaaaaataaaaaaaaaaaagtcttgtttaaagttggtaggggaatattgayttggtaagtctgcatgaagaaataatattattagttttcatgtatgtagaaaagtaactacaatttatcgtgatcntaaaaattaactgagccttaagtatcaaaatgaatgttagtttttaaagtgatctttttgggaggctctcttgagtactctttccattggccagagtattttgagattgccaactcaaatagtgacactagtcaactggtttgattatttgagtcatatctcttattttatttttaaagaaaatgttgttttaaccaatttgtttatttactatattagcttctggctctttccaaagaataaaatcatccccaaaaggatcgatactctttgatcttaaatctattaaaaataatacaggtaggcttgaaatatgtctagatgtatggatcctaatattattttaagtaatgacacactttggaatacagtcatggtcacttaataagaacttgctctgagaaatgtgtcattaggcagtttcatcattgtgcaaacatcatacactgtacttacacaacctatgtggtatagtgcactacacaccaaagctatatggtattgcctgttgctcc

SEQ ID NO: 722871 - DNA, 700 bp, Homo sapiens
tttgtgagttgagattccatacttttaaaatttaatttattttgaataagaattcaaatagatgctgagtataaaattcaaaaggtttcaaggagaatgtgatgaaaatttccctccgccttggtctcctgccctgcataacaacttccctgatgtggctacctttactagtttcttttacaacatttcagaggaattatatgtaaaacaaatacagacatgatattttcgtaatatctctttgagatcattccataccartaaatactgaatttgttttaatagctgcatagtataccatcagatggataaaaccaaatttataatcatttatatactgataaacaaatgttattacaaatgacatttcaatggatattattggaacatatgtgtttccacatataagaaatcatatatgtagcttaaattcatagaacaggaattgctaggtcaaagggtatgtgcctatttatcttagatattacaaaccattctctacagagtttgtaccaatttatacgaccaccaatgtaagtgtgcttgaaacttcatattctcaccacagtatattatcaaaattgatctttgccaaaatgaaaggtttagaaatgttctcaggtattacaaagtatggaggagctcttattttttttttcaagaccgccatttgaaaagttttattaaatgtgaaaatgtt

SEQ ID NO: 722872 - DNA, 714 bp, Homo sapiens
ctaataagaaataggacatttctgtttttcttttaaccagtttgccagatcatcctttatattaattctgctttgcagttgacttttaatttacgtctttctcttcttccttaggaaagaaacctattccctgaatctgaggagctcacttaaatgctcacttttctgaagcacagcaccaattcatgtcttttattatatgttagtcactgtcattgtggttaagtacaatgtagcacggatggagcattttttaaagacacacaaaaacacacacacagacacacgtgtcaatggggatttcattgatgaatatggcaggctgttcatggtttcacagctgtgaaaaacgacagccacttgatgcaacgataaatgccggtcatccctgccaaaataaacacatccgcgccgtcaactaagttaaagctaaaacttcactgaattcttatacctggccatatatttatatttgagcaacaatttaaaaataatttatgtttcaccattctgaaaagtaaagtagaataytgggcacaatgagagatccaactgagagggtattgcaaagtgatatttaaatattatatttggccataaacaaactctaaattaaggtttacctttgaaccaaaaacagaaagttatttaaaagcaaaaaaaaaaccaaagtttccgtggggtttcagccttaggtccccttatttaaaccaa

SEQ ID NO: 722873 - DNA, 1705 bp, Homo sapiens
gttccaagtctttggcaccctggaatgcagcctgggtggaccgcacgatgccatttcaggcggatggacaacccctagcacaactcaggggcaaagaaacttctcacaagaatgttgcaagtgtgacatggtccacagtagtgcaagtttctctgagcctggggcacacagaacgttggaaacttttttgagaacaattagtggtcagaattgaaaaaaattttcttttcttgagaaagaggggcagaggacagactattaaatggacggtggtccaggagcagtggctcatacctgtaatcccagcactaggaggctgaggcgggcatatcactggaggtcaggagttcgagaccagcctggccagcatggtgaaaccctgcctctactaaaaatacaaaaatctggccgggcgcagtggctcacgcctgtaatcccarcactttgggaggccaaggtgggtggatcacgaggtcaggagttcaagaccagcctgaccaacagggtaaaaccccgtctctactaaaaatacaaaaatcagctgggcatggtggcgcatgcctgtaatcccagctactcaggaggctgaggcagaagaatcgcttgaacctgggaggtggaggttgcagtgagccaagattgcgccattgcactccagcctgggtgacagagtgagactgcatctcaaaaaaaataaaaaataaaaaataaaaaaatttgccaagtgcagtggcgggtgcctgtagtcccagcaactcgggaggctgaggcaggagaacctcttgaatctgggaggcgcaggttgcagtgagccaagattgcaccactgcactccagcctgggcgacagaacaaaactccgtctcaaaaaaaaaaaaaaatgtggatggtgaacattacttgggtttgaaggggaatttgaacaataatgtcctagaattgtagccatacacactcttaggaacccagcgccctgtaaaccttgatgggatcagacccctggctattcctcctccttcccatgttctacttttccctttcatgctttgggatcctgcccgcccaggccttctgcttttccaaaggatcatttcaaaacctcagcacatgcaatttcctctacctgaagtgtgcaccctacctcctccccatgtttaaccactcctcacctttcctgttaagcacagatgatccttcctccgggaagccttggactacccaccaggctgagtcaggcacctccctgggcttccacagacccctggggtccccatcacagcccccacctccctgcctgtgcttcccccatcccagtcctgacgactctgaccctataattcctccatcacagccctgaccactctgggctgtcatgctttggtgacatttcatctccccctccagatccatgagggcaggacccaggatgtctcagtcaccactgtgtgccctgcattgcctggcccaggctggccttggggagtgtttgccaagtgacaggagtcattgtgactgtgactttgggtacagtgtttgcatctccctgataagataatgggcccagcaatgcccttcacctcctgagcaggtcaccccgccccctcgaccctgggaggatgaaagcaaggggctgggcatacagggaccttgcttctcccgcctctccaggccaggtgcaggggcaggtggtcagaattgaaaaaatt

SEQ ID NO: 722874 - DNA, 1297 bp, Homo sapiens
tggtaggttatcagcagagaccacgtctgtcttgttcaacctgtgtcccaggtcctagcaccatgcctgctaccatttaagtgttcatgtgaagtttgttgttgagaaactaattacctaaaagttagaacttgacctttgcattttatcgaggaggctatgagactcagagggttacacagctagtgagtggcagagcctggacttgaactcagttgtgctgaagccagaatgtgttccttcctgagcattcaaggacagggaaggtgaaactccagctagygggcagcccgtgtgcttgttctagggagactgcaggccgattcctgggagctgggtcttcatggtgacacagtaagaacaactcacctattggctgggcgcagtggctcacgcctgtaatcccagcactttgggaggccgaggtggttggatcacttgaggtcaggagttggagaccagcctggccaatatggtgaaaccctgtctctactaaaaatacaaaaattagctgggtgtggtggctcatgcctgtaatctcagctgctcgggaggctgaggtaggataatcgcttgaacctggtggggcggaggtttcagtgagccgagattggcaccattgccctccagcctgggtgacaaagtgagactctgtctcaaaaaacaaagcaaagcaaaacaaaacaaaacgaaacagaactactcacctatgttgtggatcaactgtgtccccactgtaccaaatccttatttatttaaaaaaatttgttttggacccttttcacaagatggtgccgaaagtgaagaaggaagctcctgcccctcctaaagccgaagccaaagcgaaggctttaaaggccaagaaggcagtgttgaaaggtgtccacagccacaaaaagaagatccacacgtcacccaccttccggcggccgaagacactgcgactccggagacagcccaaatatcctcggaagagcgctcccaggagaaacaagcttgaccactatgctatcatcaagtttccgctgaccactgagtctgccatgaagaagatagaagacaacaacacacttgtgttcattgtggatgttaaagccaacaagcaccagatcaaacaggctgtgaagaagctctatgacattgatgtggccaaggtcaacaccctgattcggcctgatggagagaagaaggtatatgttcgactgactcctgattacgatgctttggatgttgccaacaaaattgggattatctaaactgagtgcagctgcctaattctgaatatatatatatatat

SEQ ID NO: 722875 - DNA, 1178 bp, Homo sapiens
ccagtttagaaaaaaatttttggatctgcattttttaatcttaagtttcattttctttttgtagttgttccatttgctcttttcgttttacatttatatatattttccccttttgagggaaggaaatgtgtgcattgtgaactcctaaaaatctctgcctaagagatatatgggagctgagtgaacaaggaaaaagggatgaactcatattgtttccggaaccaaactgggtctggctgcgttttcttgaggcccgataaggagaagcagacaaactaggaaagaaaggaatttattactgtaaccagacacagggagaaggccagagataattcaaacagaccaactcaaagagttacaattttcttagtgcttacataggttggggttatgtgcctatgtgccgtatatcattcgccttaagtctactggtaactaattttgtttcaactagaaggtcagaggcaaaaaatgctgtctaagtctgattaaaagggtcctagtaccttcaaggcctgtctactgtggtactggagtgactatttctttttctttctttcttttcttttctttttttttttgagacggagtctcactctgtcgcccaggctggagtgcagtggcacaatctcggctcactgcaacctctgcctcctgcgttctagtgattctcctgcctctgcctcctgggtagctgggattacaggcgtgtgccaccatgcctggctaattttgtatttttagtagagatgggggtttcaccatgttggccaggctggttttaaactcctgacctccggtgatctgcctgcctcagcctcccaaaatgctgggattacaggtgtgagtcatcgcgcctggcctggagtgattatttctatcttatctcctttacagcttgacccagagagctgccttagactctccaatgaatctattcaaacagctgcctctgttaccttgacttgtctcagattytgttacccgagatgggtcctggcactaggaatgtaagactgtctctattattttgacttgttccaggttagggagaagcctgtgcaaggctcctactgaccatatgtttcatttctagcttttatgtctgggcacctatttccctagtttggactatttgctcaatttttaaggcagctctgtggaaatctgtttgtgta

SEQ ID NO: 722876 - DNA, 1333 bp, Homo sapiens
gactcctggaaacattactggcaccctagactactgactaaatgtcttctgatactcatgatgatatccataatttcacaggtacaccaaaggatacatgtgcccctaaataagagcccttcctccctaactgtggagcatgctctggggtagaaggaagtcagatgcctgaagatcacataagtgaatagaaaccctgtctataaaaaattagggaaaaggagagctctcattctgttttgcagaatggatgctgccccattcatgattaagaaaatttattaatttaaaagaaaaccagaaaatgtgaaatttatatattataagcttataagatccaggaggaattttagataygatcaaatagagccacctcattttgcagatgaggcccaatgacatccagatcataagtagcctaggatctttcactccaggggaattctgatgagaaaatccttaggctttcttacggtagatcttaacagagggtgctactgcttccttgctccttacatttgttcctgcctttcatagctcaaaggcaaattttcatcaaaaatttgttgatgccattgggtttaaacctttactgtttctatggggatggctttgtaacagcattaccatgcccccaggtggaagctatatcttaaagggcttgaaaatccattcaagacagccgctaaagatagcttttgactccctcacagaagatttttcctcagctatgatatggggaatgggtgagcagatgggagaagtaggaagaagaggagagaatgcttcttgggggtttggaggggtgttcagcatagttccacaatcaaaccagcaggagagcagaactgtgaggcaactctggggaggagttgaggctctaggggaagtctcctgtagagcacaagcaggaaacatccggcctatagcagcattaagaagggctaatgtgtctcaggagggaaggatgccatcaccatagaacctctaaatatgggcacagtaggatcccagaaaagcagtgtttcggggaggatgcgttctgcccaaaacatgtctgttaaggttattttgtagcacatggagcgctgatttgacctcaagtttttgttttttaacaggtggaaaggcaagtttaatctacaattttagtcgccaccaatacactctcttagagcttttcatgacacgtctcataaagaaatgctgatggccgggagcggtggctcacgcctgtaatcccagcactttgggaggccaaggcgggcagattacgagatcaggagatccagagcatcctggctaacacggtgaaaccccgtctctactaaaa

SEQ ID NO: 722877 - DNA, 1333 bp, Homo sapiens
gactcctggaaacattactggcaccctagactactgactaaatgtcttctgatactcatgatgatatccataatttcacaggtacaccaaaggatacatgtgcccctaaataagagcccttcctccctaactgtggagcatgctctggggtagaaggaagtcagatgcctgaagatcacataagtgaatagaaaccctgtctataaaaaattagggaaaaggagagctctcattctgttttgcagaatggatgctgccccattcatgattaagaaaatttattaatttaaaagaaaaccagaaaatgtgaaatttatatattataagcttataagatccaggaggaattttagatacgatcaaatagagccacctcattttgcagatgaggcccaatgacatccagatcataagtagcctaggatctttcactccaggggaattctgatgagaaaatccttaggctttcttacggtagatcttaacagagggtgctactgcttccttgctccttacatttgttcctgcctttcatagctcaaaggcaaattttcatcaaaaatttgttgatgccattgggtttaaacctttactgtttctatggggatggctttgtaacagcattaccatgcccccaggtggaagctatatcttaaagggcttgaaaatccattcaagacagccgctaaagatagcttttgactccctcacagaagatttttcctcagctatgatatggggaatgggtgagcagatgggagaagtaggaagaagaggagagaatgcttcttgggggtttggaggggtgttcagcatagttccacaatcaaaccagcaggagagcagaactgtgaggcaactctggggaggagttgaggctctaggggaagtctcctgtagagcacaagcaggaaacatccggcctatagcagcattaagaagggctaatgtgtctcaggagggaaggatgccatcaccatagaacctctaaatatgggcacagtaggatcccagaaaagcagtgtttcggggaggatgcgttctgcccaaaacatgtctgttaaggttattttgtagcacatggagcgctgatttgacctcaagtttttgttttttaacaggtggaaaggcaagtttaatctacaattttagtcgccaccaatacactctcttagagcttttcatgacacgtctcataaagaaatgctgatggccgggagcggtggctcacgcctgtaatcccagcactttgggaggccaaggmgggcagattacgagatcaggagatccagagcatcctggctaacacggtgaaaccccgtctctactaaaa

SEQ ID NO: 722878 - DNA, 649 bp, Homo sapiens
ctcggcctcctaaagtgctgggattacaggcataagccactgcacccagcctctaaatgctttctatgtatgcagaagcaaggacatcattttgttcttaccctacacaaccttcagctctaaaactttcacagcagttttttttttctcagagatttctttcccagttttagttggtaactgagtagatggtctcctcatayacagagaagaatcaaatctttaaaaaataaactaaatttaatatgctgaaagggatttaggagttaatccaactcagctctctgcagccaactattgagtaatagaaaggcctagggacaggagaattgggacagaattccaatcttgccatgcaaaagctgggaaagccacaaaacacctctgaagcttacctgcatcccattttattagggagatgaacctgtcaaaggttagagcgtgttcctatgaacttctgccttgtctcttcttgagggtttaagccctggcattcaatcagtataggcagttctcttatatcagatccatctaagcaagaccttggaagctctggattttacaaatccatttgaggctaacacgataatggtctactgtgatggaaaatcatgttccacttggcaaaaggagccttctctaagtaaca

SEQ ID NO: 722879 - DNA, 1754 bp, Homo sapiens
catgagatgtatgaaaaggttaagaaggttaagaaatctcatcatctccatagtatttgagagttgtgaactatgttaaaacatataggctatcactgtatatatttttcataattggacatagcaaagagagagccacaaattcagttactttaatttgttttgcttcttctaaggaattagattttataatggagtctggagcagtaaatgcattataaaccttgtgttatttcttttcagttttgaagataagacattaaaaacaaaattaattcagaattaggtatgagactgtccaaaatatctgttctgggatggacacttcttgagttacagaaatgcaatcataagattcattgattgagaagtgtaatggagttaaacgctatgaggagaaattaataatattgtatagttagtccaccaactggtaaaaaaatggttgtttttacagagtagatcatttgtgctgtatgtggcatcataagacttaatggtgatttcagtgaaagatctggagatgcttcaacaaatttagacatagctgaaatcattttaagacaaggaggataggttgtaatcattataataagaaataggctataataggcaatgggtctttgttgtttttaatgtaattgagtaatatccctaggacatggccttactgctaatattcacaaaacgaaagccttatcacaatcaattttcctataatagtttttccttgggagacgtatggagacacctaggattcatacctttcagcagtggatgtacagaatgtaatggcttgttatggctcatttggggtcccagatgacataataaaaatgcataaattcaaaggtttgataacttaatgatcagagtctggtgtctaatatggcctgtataaacagagctgggctgtctaaactaacttgaaaaaggaagaaaacttttaagataggactcaatgtctgagggcttcattctaaactctcagaaaaaagagattagtttttttctgcgtagaaaagagaaagagagattagtttttttctaccgtttgttccccagataagcaactggacagactttgggaataggacaaatattgctatattaacatgtaggtccgatgatctgcagtgattagtgcaaacagcttttccttcttagcataatgtgattaatttctaccttaggagaaacaacaacatacatagatgtgaggatacataattgttacatcttccgttgccttcattattcattacatgtagtattttaaagtaagtgccaacctctcaacctcattgctcagttccatcacagatgcaatgactgaacatagcaattggycgaattatcaatttcccttctaacccgaccatgtttattttcatatttaagttatttattatcaaattaagggtgggtaagtgcaaaggaagtttgcattgggtgaggttcttagccagtacatagagaagtgttagataacacaaactagcttgctacaccggaaaacctccgtttcctattccagggcagcagcagcagcagcagcacatagtccagtaattcttctcttacttcatcagactcacctcacaatgcagagccctgaattttaagaagaacaaaatatattctctctagagaaagaaccaaacatgttgctctccagctgcctgagggtggtcacagcttcaatgtggctaggtagggatgcccctggtgggaatggtcttcctctaagaccc

SEQ ID NO: 722880 - DNA, 1304 bp, Homo sapiens
aacagggacagcatcacttactcaaagcatgaattacagcaaaatggaagctaggaatggaacacagacattgtggccccttgtcacttgctttttccatgaaggatgtaaagtaggattcagtgtttgaaaaaaggagtggtatgttgtaattttaaactaaattatacttttattacttaattatatgttcattagaataaattaggagatataaacacccagaaaacatagaacactcctataatttcataacctagaaatgatagctattcgcatgcaataaaatttttggtgcacatgtaaagctatatttttgtataaatgtggtttataatacatcaagtatttattagcacacttttctttcaactttatatttaggtattttcaactcaggaagcaaatattgaagaataattttaaattattgcctagtttccattacataaatatgcttttttaaaaactcttttttttggtattgtttctacttatacagtattacagataatgtttttattaacatcattaaaggtgtagttttaatggaagtgaagttgctggaataaagaaaaacacatgatactgaatcccttatttccatggagctatttctcaccaaactgtaatttcaacagtagcacatgatgatgctaattttccaatattttaccaattgtaaacattattattttagattagcttccattttgttaagtaaaatattgttttttattattcttttcttttaatttgtgattttatacctttgattattaaaataaataaataaaatgagatgagaaaacatcagatkccatcacacagaataggtatcctttcatacagtaacatgtattttttgaaagtgtgaaaaatactgctttggtccaagctaccttctaactggtctctcttttctcaaggcaatcaattctctatgtccttgctacttgaagtgtgagccagcattgtctgaacttgtactgattctcaggctctaccctaggctgattgaatttgaatctgcattttatcaagatttccaggcgattctatcacatcaaagtttaagaagcacccatctgatgagttgccagaatgattttttaaagtataaataaagagctttctccacttgtcaaacgtgcttcaatggctttctactgctcctggaataaagtgtggtggctttcaggctgtgatataaaaggatctatataatcggaacctcccttggccctttggctttaaattctcttttcctggctctctgtgcagcaaaacttctgattctcttt

SEQ ID NO: 722881 - DNA, 1304 bp, Homo sapiens
aacagggacagcatcacttactcaaagcatgaattacagcaaaatggaagctaggaatggaacacagacattgtggccccttgtcacttgctttttccatgaaggatgtaaagtaggattcagtgtttgaaaaaaggagtggtatgttgtaattttaaactaaattatacttttattacttaattatatgttcattagaataaattaggagatataaacacccagaaaacatagaacactcctataatttcataacctagaaatgatagctattcgcatgcaataaaatttttggtgcacatgtaaagctatatttttgtataaatgtggtttataatacatcaagtatttattagcacacttttctttcaactttatatttaggtattttcaactcaggaagcaaatattgaagaataattttaaattattgcctagtttccattacataaatatgcttttttaaaaactcttttttttggtattgtttctacttatacagtattacagataatgtttttattaacatcattaaaggtgtagttttaatggaagtgaagttgctggaataaagaaaaacacatgatactgaatcccttatttccatggagctatttctcaccaaactgtaatttcaacagtagcacatgatgatgctaattttccaatattttaccaattgtaaacattattattttagattagcttccattttgttaagtaaaatattgttttttattattcttttcttttaatttgtgattttatacctttgattattaaaataaataaataaaatgagatgagaaaacatcagatgccatcacacagaataggtatcctttcatacagtaacatgtattttttgaaagtgtgaaaaatactgctttggtccaagctaccttctaactggtctctcttttctcaaggcaatcaattctctatgtccttgctacttgaagtgtgagccagcattgtctgaacttgtactgattctcaggctctaccctaggctgattgaatttgaatctgcattttatcaagatttccaggcgattctatcacatcaaagtttaagaagcacccatctgatgagttgccagaatgattttttaaagtataaataaagagctttctccacttgtcaaacgtgcttcaatggctttctaytgctcctggaataaagtgtggtggctttcaggctgtgatataaaaggatctatataatcggaacctcccttggccctttggctttaaattctcttttcctggctctctgtgcagcaaaacttctgattctcttt

SEQ ID NO: 722882 - DNA, 1304 bp, Homo sapiens
aacagggacagcatcacttactcaaagcatgaattacagcaaaatggaagctaggaatggaacacagacattgtggccccttgtcacttgctttttccatgaaggatgtaaagtaggattcagtgtttgaaaaaaggagtggtatgttgtaattttaaactaaattatacttttattacttaattatatgttcattagaataaattaggagatataaacacccagaaaacatagaacactcctataatttcataacctagaaatgatagctattcgcatgcaataaaatttttggtgcacatgtaaagctatatttttgtataaatgtggtttataatacatcaagtatttattagcacacttttctttcaactttatatttaggtattttcaactcaggaagcaaatattgaagaataattttaaattattgcctagtttccattacataaatatgcttttttaaaaactcttttttttggtattgtttctacttatacagtattacagataatgtttttattaacatcattaaaggtgtagttttaatggaagtgaagttgctggaataaagaaaaacacatgatactgaatcccttatttccatggagctatttctcaccaaactgtaatttcaacagtagcacatgatgatgctaattttccaatattttaccaattgtaaacattattattttagattagcttccattttgttaagtaaaatattgttttttattattcttttcttttaatttgtgattttatacctttgattattaaaataaataaataaaatgagatgagaaaacatcagatgccatcacacagaataggtatcctttcatacagtaacatgtattttttgaaagtgtgaaaaatactgctttggtccaagctaccttctaactggtctctcttttctcaaggcaatcaattctctatgtccttgctacttgaagtgtgagccagcattgtctgaacttgtactgattctcaggctctaccctaggctgattgaatttgaatctgcattttatcaagatttccaggcgattctatcacatcaaagtttaagaagcacccatctgatgagttgccagaatgattttttaaagtataaataaagagctttctccacttgtcaaacgtgcttcaatggctttctactgctcctggaataaagtgtggtggctttcaggctgtgatataaaaggatctatataatyggaacctcccttggccctttggctttaaattctcttttcctggctctctgtgcagcaaaacttctgattctcttt

SEQ ID NO: 722883 - DNA, 1304 bp, Homo sapiens
aacagggacagcatcacttactcaaagcatgaattacagcaaaatggaagctaggaatggaacacagacattgtggccccttgtcacttgctttttccatgaaggatgtaaagtaggattcagtgtttgaaaaaaggagtggtatgttgtaattttaaactaaattatacttttattacttaattatatgttcattagaataaattaggagatataaacacccagaaaacatagaacactcctataatttcataacctagaaatgatagctattcgcatgcaataaaatttttggtgcacatgtaaagctatatttttgtataaatgtggtttataatacatcaagtatttattagcacacttttctttcaactttatatttaggtattttcaactcaggaagcaaatattgaagaataattttaaattattgcctagtttccattacataaatatgcttttttaaaaactcttttttttggtattgtttctacttatacagtattacagataatgtttttattaacatcattaaaggtgtagttttaatggaagtgaagttgctggaataaagaaaaacacatgatactgaatcccttatttccatggagctatttctcaccaaactgtaatttcaacagtagcacatgatgatgctaattttccaatattttaccaattgtaaacattattattttagattagcttccattttgttaagtaaaatattgttttttattattcttttcttttaatttgtgattttatacctttgattattaaaataaataaataaaatgagatgagaaaacatcagatgccatcacacagaataggtatcctttcatacagtaacatgtattttttgaaagtgtgaaaaatactgctttggtccaagctaccttctaactggtctctcttttctcaaggcaatcaattctctatgtccttgctacttgaagtgtgagccagcattgtctgaacttgtactgattctcaggctctaccctaggctgattgaatttgaatctgcattttatcaagatttccaggcgattctatcacatcaaagtttaagaagcacccatctgatgagttgccagaatgattttttaaagtataaataaagagctttctccacttgtcaaacgtgcttcaatggctttctactgctcctggaataaagtgtggtggctttcaggctgtgatataaaaggatctatataatcggaacctcccttggccctttggctttaaattctcttttcctggctctytgtgcagcaaaacttctgattctcttt

SEQ ID NO: 722884 - DNA, 1652 bp, Homo sapiens
gagtgggtgtcctgaaaggttatccagagattgaagctgcgttgtttgttcctgagtcctgtcaaagtcaggctacaagctgttagatgtagacaggccattgcacaagagcttttatacaggaagcttctggatgaggggctggggagatgaagccatcacagtctgcaaggcagctgaggcttattccagcctctgtgaataaagtcaatgataatgaccattaggctccagcccctgctatttcctaatgatccttatcagggaacctcttcaggtgttccctgaaattagtcaccctcataccccacatctcagagcctatgatcttgcatacgatggatgtcttcactgcagaattgttccagtatccctgggctaaagtttgactgagttcaaataaagcatatcacacacagagagagctggttaagctaatgagctgtccagggttatgtaatcacttggcttacataacttctggacatgatccattgtcataagcatttttttttaaaagaatgaaagcatatattaggcacatattatgtgtgatacaaagaatctctgaaccttacttcttatccctctttattacatgtagtagttgccttctccatgacccctagtacaacctgcttaccatctacatcctttgtgtgtttgccctcatttccatcttctacgacacaataagacacaagttcaacagctcagtgctgttccaaccccagatggwagcattaggagcctttccacctgatttcataattaaagtttccttttctttggaaaagaggaaatttccccatcagaattggacacccttgggagtgaacagtaaattgtcaaatatgtactctcccagaagtagagtggaattcttgatgtttcccaccatcgttattacacaacctccagtctctttcagaatttccaaacagagggaaaaattaggtggacttgaaatagtaactcaatccaacagatttcccacattagtgaaaaatagctttgttttctgttcactgtattaaacaaaatactgccctctagacccaatcgccaatttatagtaagtacaaaggacagcagaacatattaaacccatcacaaatatacagtaagcaaaatctatagtgtgaaaaactctgcaagacaaacaccctgggtctttttttcttcccacaataaactacaaagaatgagtaaggggatctatggattagaagagcctttaaaaaacatatcgccagaactttggctttcccagtgccccatgcttgcaccatgtagaagtgcaagcagacgaaacctcagcatgccaacttggaggaggaccagggtgagcagcaactgaatccagagttcgcagatgcagcctgaatggcgccagtggtgggggcccggggtgctccaatggatcaccaagggaatgatgatgaagcgaatgaggacaaagccacgtggtaaaatggcttcatcaggaggagatggacacctgtgagaaatactgtgcagagttctttagcgtctctgagttcttgaaacataagaaaaattgcactgaaaatccccctgtcctctccaggaatgacagtgagaggccatgacagctctctggagccagactgagccataccagccaccca

SEQ ID NO: 722885 - DNA, 644 bp, Homo sapiens
tttgttatgttttgtgaaggttattagaaaaaagcttatttccagtcatgagtatgctatgtcatcttcagcaagtgagtcattttatttgtccctcatctcagaatcctcatttataatgtgaagatgatatttcccacccaccactactcacaagtttgatacattaattattcaacaaataattatcaaatacctattaggttctgtagggaactttgaataaataaagagttctttccttgttgaatatatttctagtggggaacacatttttattatcagttcctataaaatagagaaggacttaactgggacagtaaagggtattataaaaacaaacagatgtctgttaaaggaagctttctggagtatgtggtgcctcagttcaaaatctggcaatttaataggagttaatcagactgaagaacaaaagcaagtgggggaaggttctccaatttgaggaacagcatacatatataggcaggaagcaaggcagattatagcaattttaagacataatgtataatttgcaagttattaaataatgtkcataagtaactcttattttatgggagactaaataagaaccttgaaatgaatcgtctgtaaatcataatatggtaaggtgaaggatatgggga

SEQ ID NO: 722886 - DNA, 599 bp, Homo sapiens
ctctaattatcgttattacttacgtactctgcttgcagagtatataagataaaatgagacagaaccagtactatagcaatgagatagacccagtgctataaacgactgagctctttttttaaccttctgaraaccccagtgtattgcctttgtccctgaatttaagtacatgttgctgataataggtatgtagggcaggaagaaaaacagacctgggtttgcatccctgcccatctacttactagctgtgtcttaagctatgatgtttcaattgtaaaatgggatgataacatttgcctcacagtgctattgtgaagattatgagagaataggtgtgaacctgcttcatacaatgcctggcatgtgataggcaaaaaccatgattctgatacagctatttatatttacctgaatttacattattcaggtaactttatttcttcattttatattattttttactctgaaggcttcttctgccctctttccctccctcctactctctctctcctccctctctccccaccccgccactttccacaacccaaggaaatctcctgcttcccctttgtttgccatgacattttgtctatacctgc

SEQ ID NO: 722887 - DNA, 599 bp, Homo sapiens
ctctaattatcgttattacttacgtactctgcttgcagagtatataagataaaatgagacagaaccagtactatagcaatgagatagacccagtgctataaacgactgagctctttttttaaccttctgaaaaccccagtgtattgcctttgtccctgartttaagtacatgttgctgataataggtatgtagggcaggaagaaaaacagacctgggtttgcatccctgcccatctacttactagctgtgtcttaagctatgatgtttcaattgtaaaatgggatgataacatttgcctcacagtgctattgtgaagattatgagagaataggtgtgaacctgcttcatacaatgcctggcatgtgataggcaaaaaccatgattctgatacagctatttatatttacctgaatttacattattcaggtaactttatttcttcattttatattattttttactctgaaggcttcttctgccctctttccctccctcctactctctctctcctccctctctccccaccccgccactttccacaacccaaggaaatctcctgcttcccctttgtttgccatgacattttgtctatacctgc

SEQ ID NO: 722888 - DNA, 599 bp, Homo sapiens
ctctaattatcgttattacttacgtactctgcttgcagagtatataagataaaatgagacagaaccagtactatagcaatgagatagacccagtgctataaacgactgagctctttttttaaccttctgaaaaccccagtgtattgcctttgtccctgaatttargtacatgttgctgataataggtatgtagggcaggaagaaaaacagacctgggtttgcatccctgcccatctacttactagctgtgtcttaagctatgatgtttcaattgtaaaatgggatgataacatttgcctcacagtgctattgtgaagattatgagagaataggtgtgaacctgcttcatacaatgcctggcatgtgataggcaaaaaccatgattctgatacagctatttatatttacctgaatttacattattcaggtaactttatttcttcattttatattattttttactctgaaggcttcttctgccctctttccctccctcctactctctctctcctccctctctccccaccccgccactttccacaacccaaggaaatctcctgcttcccctttgtttgccatgacattttgtctatacctgc

SEQ ID NO: 722889 - DNA, 629 bp, Homo sapiens
tggcatctgtgatagatacaagaactatagacaggatgatccagctttacaagggtcccgctctgcagagcctctcttctccaagtggggtccatgcaccagcagcacatgagaactgttagaaatgcagaatctctcggccaggcacagtagctcacacctgtaatcccagtgctttcagaggccgaggcagttcgatcagttgaggtcaggagttcaagaccagcctggccaacatggcaaaatcttgtttctactaaaamtacaaaattagctgggcatggtaacaggtgcctgcctgtaatcccagctactcgggaggctgaggcatgagaatcgcttgaatccaggaggcagaggctgcagtgagccaagatcaatgccgctgcactccagcctggccgacagagcaagactttgtctcaaaaaaaaaaaaaaagagagaaagaaatttcaggccccacccaagacccacttgatctgaggtacattctaccaagatccccaggtaagctacatgcatattgaagtgtggaaacatagccaggcatggagttgcatgcctctagtcccagctactcaggaggctgaggcaggaggatcactggagcccaggagttggaggctgc

SEQ ID NO: 722890 - DNA, 625 bp, Homo sapiens
catttcaaatttgggaggttttatattcaacaagaggatttttgaccaggcgcggtggctcacacctgtaatcccagcactwtgggatcagccgaggtgggcggatcacttgagtccaggaatttgataccagcctgggcgacatggcaagactgtgtctccacctaaaatacaaaagttagccaggtgcctttagtcccagctactccggaggatgaggtgggagaatcacttgagcccacgatgaagaggttgcagtgagccaagatcacgtcactacactccagcctgggcaacagagtgagatcctgtctcaaaaaaaaaaacccaacaaaaaaaaagaggatttctggctttgaagaatggaaaaagctgcagatgaagggccaatcctcgtagctgcagagtggcagccacccgctctgggtggggtttccatttcatcagactccactactgcctcttacccagtcctcactgatctcaatgcccatccccaagaacatcccagtctactctctgctcaaagcctgagagcaaatcaggctctgagcctgatgcaaatcatcacacccccaggacccaccccagattcttacccagaaacactttgtgaaccgagaaa

SEQ ID NO: 722891 - DNA, 404 bp, Homo sapiens
cccatcttggcctcccaaagtgctgggattgcaggcatgagccaccgtgcctggcctggggttttttgttttgttttggtttgatttttggaggggtgggtagagacaaggcttcaccatgttatccagtattctctggtcttgaactcctgggctcaaacaatcagcccaccttggcctcccaaagtgctgggattacaggcatgagccaccatgcccagtccccagtgttctcaatgtactttggcacttgtttcccctttaaccacagagaccagactccaggcccagcaccttcggcagccccaagcatctagctagaatttggtaatactgttttccttgtatttatatttataattgccatctatttatggcaagtgaagatgatttktcactgaaga

SEQ ID NO: 722892 - DNA, 1227 bp, Homo sapiens
gctcaaattttcctctcccttaaagccttctcttatctccttcacgagaagtactttctccctccactgaattcccagaggactctctctgacaccccgttctggcttttgaaattccccatcactgagatgtcagtggaattttaaaaaccatcaagtcagccaggtgcggtggctcaagcctgtaatcccagaactttgggaggccgaggcaggtggatcacaaggtcaggagatcgagagcatactggtcaacatggcgaaaccccatctctaataaaactacaaaaattagccaggcgtggtagcgcacgcctgtagtcccagctactcaggaagctgaggcaggagaatcacttgaacccgggaggcagaagttgcagtgagctgagatcataccactgcactccagcctgagtgacagagccagactccatctcagaaaaaaaaaaaaaaaaaaaaawaaatatatatatatatatatatatctcaagtctaggatcagacttcaagtttcactgagctggaagtggctgccaatgctccccagctctttagcaaaagacatttacacacgatattgtattggaggcatttggggaaaatgaaggaagtggggagcatttacagggtgcagtgactctaacatcaagagctatttgcagaagccgtgggcaatgacagatgccaaaacaagatggagaaatcaacttttatatagactgattcacaagaaaatatggagtgcctctcccaaaccaggaatcaaagatgttggggtgacacaggcagactcctacgatcctctagatggggaccctggacatttgccttgcctatatagagggctggaaacttttgaggctagaaccacacattcacaaagaaccaagcttagttgtttattttttaacttattactaagcataaactgtatttctgtagatcaatcatccccaagcttgggatttttttttttcttcctctgttgtccaggctggagtgcagttggatgatcatagctcactgaagcctcaaactcctgcctcagcctccctagtagctaggactacaggcacacatcaccacatcaggctaatcttttaatttttttgtatgggggggggggtctcactacattgcccaggctggccttgaactcctggcctcaagcaatcctccttcctcagccttccaaaatgctaggattagaggtgtaagcgacca

SEQ ID NO: 722893 - DNA, 1432 bp, Homo sapiens
tagtgatagtgagtttgttcctatgagatttgatggttttataagtgtttggaagttcctccttcattctctctcctaccactgtgtgtggaagatgcttgcttcccctttgcctttgccaggattgggtttcctgaagcctccccagccatgttggaactgtgagtcaattaaacctctttccttgataaattacccagtctcgggtatttcattatagccgtgtgaaaacagactaatacagcttttacagaggtgatgatgttaaatgaagttattagggtgtgctctaatcaatatgaccatcttataaggaccaagtgtccttataagaagagaaaatttggacacagacatgtgaagaggaagatgacatgaagacacaaggagaaaatggccatttgcaagtctttttccaggagagaggcctggaacaggtcctttcctcacagccctcaaaaggaaccaaccacgctcacaccttgatttcagatttctggctttcagaactgtaagaaaataaatttgtttaagccactcagtctgtggtactttgttatggaagtcctagtaaactattacaaaaccccagattgaaattcaattctgtgtgactgtaaaatatatattatttttattataccatgataaggggtaggacaaaaaaaaaaaaacaaaactaggtctcggctgttgttattgagaaggaaaatgcagagaaaagagaagttttaagaaaatgctgcatttatatagattgacttaaagaaaggagaaactttctttctcctagtgctagtactactattaatttactttaattaagtgctgactacacaccataaactgtacttagtattttacaaatattcagtaattacttgcaacaaccctgtgaatgattctcttttaaagagaaaagtactgtctttattttactgatgaagaaactaaagcttagggagaagtaatttgcccaacttaatgggaagatccaatctggggcttaatatctgtcagtctctgacttcagacccyatgttctcaatcattattctactctggctttatttcaacacaatgcttggagtttacatttgcttgtctttccaatccaaccatcagctttgtaagagttgaacggttttgatggtatttgatgatctgctaatggatgctataacacacctcccttgtggtaaattctaccatctttgaaacaaaatggcacctaacataggtttttccaatgattgtcgttcctgcagtttttctagaacttgagttatagaggggacctgttggtagaagaattacatggattgaaattttcaagtcacagaaccaataattaggaagaaggaaagacataagaaaaaagggaaatttgttcagctaacaaagccagtttaatcaagtgtagaatttaaat

SEQ ID NO: 722894 - DNA, 1405 bp, Homo sapiens
tcaggcaaatttaatcagtatgtttctctttctgttgatagtaacgtcttgggtgttttacaatccctctttgatgtctaggatacttaaggagtcttttgcatctagtgtttatttaaaataaaaagtgaaaccacatgtttaggggggagacacagcggtcccttaagatgcgggtctgtgccaaggttgaagggtctcctttcatcccaaacaattaartcaggctgactgaccagagccttctggaaagtggcttcccagcaaaactgtgttacttaatatttgctttccttagatttgatttcattttctttccttttccactctttccccttacccccaactccacacactctggtcacgctgatctatactcctggttccccaaataggccttgtaatatcagccatctgtgcctctgctcacactgttctctctgctcagaaggaggttaccagttgccagcttatgggctggagctggtccacaaatgtgttttatttggactttactatatttttcttttaaatttgagccaacacttaaaaatcacagaatttcgcttgaaattctggatttgtggcttcgtttgaaaaatgggagctctggcaatattgtttccgctttgattcaaggtagctgagctgtggtcctttctaggtggagtatgcatttaactgtgactttgttgaaagagcaaacttggccccattcagtcacttacatgacttgctggacttctttgagttgggttggagacttctgccgggacatgtggctgacacaaaggagaaagagacacaggctttgccctctggggcatattatccaattaaggagacaaggcataaatatttgtcagattaaaactggaagtgattgattgattgattttttttttatttttttgagacagagtctcactttgtcacccaggctggagtgcggcggcgcaatctcggctcactgcaatctccacctcccaggttctcctgcctcagtctcctgagtagctgggactacaggcgcgcaccaccatgcctggctaatttttgtacttttagtagagatggggtttcaccatgttgaataggctggtctcaaactcctggcctccagtgatccaccagcctcggcctcccaaagtgctgggattataggcatgagccacctcacctggcctataagtgatttttaaaaacccacaagcattattgtgctgtaggaatttactagttgaatacaaggaaaaataaatacatgaaattaaggattatgagtttgggggcaagggcaaggataataagtaatgtttattcaatatttactatgtgccaagcagttttccaatgctttatgtagattaatttatttaattcacataactctatgaataggtaa

SEQ ID NO: 722895 - DNA, 1405 bp, Homo sapiens
tcaggcaaatttaatcagtatgtttctctttctgttgatagtaacgtcttgggtgttttacaatccctctttgatgtctaggatacttaaggagtcttttgcatctagtgtttatttaaaataaaaagtgaaaccacatgtttaggggggagacacagcggtcccttaagatgcgggtctgtgccaaggttgaagggtctcctttcatcccaaacaattaagtcaggctgactgaccagagccttctggaaagtggcttcccagcaaaactgtgttacttaatatttgctttccttagatttgatttcattttctttccttttccactctttccccttacccccaactccacacactctggtcacgctgatctatactcctggttccccaaataggccttgtaatatcagccatctgtgcctctgctcacactgttctctctgctcagaaggaggttaccagttgccagcttatgggctggagctggtccacaaatgtgttttatttggactttactatatttttcttttaaatttgagccaacacttaaaaatcacagaatttcscttgaaattctggatttgtggcttcgtttgaaaaatgggagctctggcaatattgtttccgctttgattcaaggtagctgagctgtggtcctttctaggtggagtatgcatttaactgtgactttgttgaaagagcaaacttggccccattcagtcacttacatgacttgctggacttctttgagttgggttggagacttctgccgggacatgtggctgacacaaaggagaaagagacacaggctttgccctctggggcatattatccaattaaggagacaaggcataaatatttgtcagattaaaactggaagtgattgattgattgattttttttttatttttttgagacagagtctcactttgtcacccaggctggagtgcggcggcgcaatctcggctcactgcaatctccacctcccaggttctcctgcctcagtctcctgagtagctgggactacaggcgcgcaccaccatgcctggctaatttttgtacttttagtagagatggggtttcaccatgttgaataggctggtctcaaactcctggcctccagtgatccaccagcctcggcctcccaaagtgctgggattataggcatgagccacctcacctggcctataagtgatttttaaaaacccacaagcattattgtgctgtaggaatttactagttgaatacaaggaaaaataaatacatgaaattaaggattatgagtttgggggcaagggcaaggataataagtaatgtttattcaatatttactatgtgccaagcagttttccaatgctttatgtagattaatttatttaattcacataactctatgaataggtaa

SEQ ID NO: 722896 - DNA, 1405 bp, Homo sapiens
tcaggcaaatttaatcagtatgtttctctttctgttgatagtaacgtcttgggtgttttacaatccctctttgatgtctaggatacttaaggagtcttttgcatctagtgtttatttaaaataaaaagtgaaaccacatgtttaggggggagacacagcggtcccttaagatgcgggtctgtgccaaggttgaagggtctcctttcatcccaaacaattaagtcaggctgactgaccagagccttctggaaagtggcttcccagcaaaactgtgttacttaatatttgctttccttagatttgatttcattttctttccttttccactctttccccttacccccaactccacacactctggtcacgctgatctatactcctggttccccaaataggccttgtaatatcagccatctgtgcctctgctcacactgttctctctgctcagaaggaggttaccagttgccagcttatgggctggagctggtccacaaatgtgttttatttggactttactatatttttcttttaaatttgagccaacacttaaaaatcacagaatttcgcttgaaattctggatttgtggcttcgtttgaaaaatgggagctctggcaatattgtttccgctttgattcaaggtagctgagctgtggtcctttctaggtggagtatgcatttaactgtgactttgttgaaagagcaaacttggccccattcagtcacttacatgacttgctggacttctttgagttgggttggagacttctgccgggacatgtggctgacacaaaggagaaagagacacaggctttgccctctggggcatattatccaattaaggagacaaggcataaatatttgtcagattaaaactggaagtgattgattgattgattttttttttatttttttgagacagagtctcactttgtcacccaggctggagtgcggcggcgcaatctcggctcactgcaatctccacctcccaggttctcctgcctcagtctcctgagtagctgggactacrggcgcgcaccaccatgcctggctaatttttgtacttttagtagagatggggtttcaccatgttgaataggctggtctcaaactcctggcctccagtgatccaccagcctcggcctcccaaagtgctgggattataggcatgagccacctcacctggcctataagtgatttttaaaaacccacaagcattattgtgctgtaggaatttactagttgaatacaaggaaaaataaatacatgaaattaaggattatgagtttgggggcaagggcaaggataataagtaatgtttattcaatatttactatgtgccaagcagttttccaatgctttatgtagattaatttatttaattcacataactctatgaataggtaa

SEQ ID NO: 722897 - DNA, 640 bp, Homo sapiens
ctaagtcgacttgactcataagtagcactgatacaattggaacctgycctgatgaccccgagtccactgctctttccataacctacctgtccagaacacaaacattcccgagttcctatgaaaagcattgcatagtgagaggtgacagcgtgctggcagtcctcacagccctcgctcgctctcggcgcctcctctgcctgggctcccactttggcggcacttgaggagcccttcagcccaccgctgcactgtgagagctcctttctgggctgggcaaggccgaagccggctccctcagcttgcaggcaggtgtggagggagaggcgcgagcgggaacccgggctgcgcacggcgcttgcgggccagctggagttccgggtgggcgtgggcttggcgggccccgcactgggagcagccagctggccctgccggccccgggcaatgaggggcttagcaccccggccagcggctgcggagggtgtactgggtcccccagcagtgctagcccaccggcgctgcgctccatttctcaccgggccttagctgccttcccgcggggcagggctcgggacttgcagcccgccatgcctgagcctcccaccccctccgtgggctcctgtgctgcccgagcctccccgac

SEQ ID NO: 722898 - DNA, 640 bp, Homo sapiens
ctaagtcgacttgactcataagtagcactgatacaattggaacctgtcctgatgaccccgagtccactgctctttccataacctacctgtccagaacacaaacattcccgagttcctatgaaaagcattgcatagtgagaggtgacagcgtgctggcagtcctcacagccctcgctcgctctcggcgcctcctctgcctgggctcccactttggcggcacttgaggagcccttcagcccaccgctgcactgtgagagctcctttctgggctgggcaaggccgragccggctccctcagcttgcaggcaggtgtggagggagaggcgcgagcgggaacccgggctgcgcacggcgcttgcgggccagctggagttccgggtgggcgtgggcttggcgggccccgcactgggagcagccagctggccctgccggccccgggcaatgaggggcttagcaccccggccagcggctgcggagggtgtactgggtcccccagcagtgctagcccaccggcgctgcgctccatttctcaccgggccttagctgccttcccgcggggcagggctcgggacttgcagcccgccatgcctgagcctcccaccccctccgtgggctcctgtgctgcccgagcctccccgac

SEQ ID NO: 722899 - DNA, 640 bp, Homo sapiens
ctaagtcgacttgactcataagtagcactgatacaattggaacctgtcctgatgaccccgagtccactgctctttccataacctacctgtccagaacacaaacattcccgagttcctatgaaaagcattgcatagtgagaggtgacagcgtgctggcagtcctcacagccctcgctcgctctcggcgcctcctctgcctgggctcccactttggcggcacttgaggagcccttcagcccaccgctgcactgtgagagctcctttctgggctgggcaaggccgaagccggctccctcagcttgcaggcaggtgtggagggagaggcgcgagcgggaacccgggctgcgcacggcgcttgcgggccagctggagttccgggtgggcgtgggcttggcgggccccgcactgggagcagccrgctggccctgccggccccgggcaatgaggggcttagcaccccggccagcggctgcggagggtgtactgggtcccccagcagtgctagcccaccggcgctgcgctccatttctcaccgggccttagctgccttcccgcggggcagggctcgggacttgcagcccgccatgcctgagcctcccaccccctccgtgggctcctgtgctgcccgagcctccccgac

SEQ ID NO: 722900 - DNA, 610 bp, Homo sapiens
gcccatcagcaggaaaatggcctaagaagctttgaaaattttctactatggagtactgtgcagcagataaaaagaatgaagtcagtctatatgaaagaatatggaaagatcttcaaggcaaaatgttgagtgaaaaaggcatgttgccacgtcatcgttttgtttttaattttttgaagaaccatcatgctgttttccatagtgaccacaccatttcacattgagccaactctagccccaaacctcgctaaaaatattgtcaaaccatcttaatcaaaccatttacctagacaaaagtataggtgatagaaatgtttacygtggtgcaatagacatagtaccataaggaaaagatgaatgaactgaatcaagcattaaaaagcaaagacaaatccttataccaacagtgtatcagggttcctatttctctaaatcttcactaacactttttgtcttttatgggtgtttttttgtttgtttgtttgttttcttcttttttttattttttggagacggagtctcactctgtcacacaggctggagtgtggtggcatgatctcggctcgctgcaacctccgcctcccgtgctcaagcgattctcctgccttag

SEQ ID NO: 722901 - DNA, 1989 bp, Homo sapiens
tgttgcccaggctggactcaaactcctggcctcaagtgatcctcctcccaaagtgctgggattccaggcatgagccactgtgcccagcccaatctcagctttctggtttggccaagggatttaytttcaagttgtaaagtaaacaacttgtgcttttctgcttttgccatctcctggttccccctgctgatgccacctctgatgccacttgtcacctttctctaaaccacccccttctctcacctggcaggaaaattccctgcctatccttcagtgaccccagcaccggtttcagtgccagaaaatgtgctgtcctccctgtatttggctcgcctgtcctccccctcactgatgttttctgctcattgggtgggggaggaatcacatgggttaggtgcccatccgtccactcctgtattccatgcgcgaccacggtggcccaaagttggattccagcatgtgatgttgaatgaggcaggcgtggctcccgtccccgggctgcacccagcagttcatcccggatccaggcctctgccttcctctactctcacctcttctcctctgcagagaagtgactgctgctggttagtagggtgggaagtggaggctggagggcatttgagagggcagagctgagttctggcctgatccagtcactcaacagcccatttcctcatctaaaaatagaaaaaaaatcagtaaattagtacatgtcaacacaagcctatgtatatatatatatatttttagagaccaggtcttgctctgttgtccaggttggagtgcagtggcgtaatcatggctcactgcagcctcagctcttgggctcaagtgatcctcccacctcagcctcccgattatctgggactacaggtgtgtaccacgacatctggctaactttttaattttttatagagatgggatctcactatgttgcccaggctggttgcgaactccttacctcaagtgatcctcccacctcaccttcccaaagtgttgggattacaggcatgagccactgtgcctgggcaagccaatattttaacaggccctttacctatgtaatttcacttcaacttctcggcaaccctgtgaggtcgggagatcgggtgttcttgtcaaaggcacatcaagaaatgacaaggcggtaccgggcacagtggcttatgcctgtaatcccagtgctttgggaggccgaggcaggtggatcacctgaggttaggagttcgagaccagccttgccaacatggtgaaaccacgtctctactaaaaaatacaaaaattagcctggcgcagtggtgagcacctgtagtcccagcttctcaggaggctgaggcaggagaattgcttgaacctggggggcggaggttgcagtgagctgagatcatgacagtgcactccagcctgggcaacagagcgagactccatctcaaaaaaaagtgaaagaaatgactgagcaggaatttgggcccaggtttcgtcaccaaattttgtatgttttagctatcattattgctgtccttgttattgatgttatcggccctgagggtataatgatgagcagaatatatcccgattctaagaagtcaagaggaaaggaagctagctttgctttatttcaagtttctcattcttttttgccgtcattcttttttgatcacaaaatgcccacctgtgctctagaaaccacgcctccattggacaggctttgggagtactggctccagtgatttgggtggttttgcactgatttctcatccagcaagcaaacctcaacaccttcagactgtccccagcaaccagaatattatcgtttcagagtttcgagggaccatagctgtcagcctgtctgtccaccctgcctggcgctggccttagttggaggatggttgcatttggaccagagcagaggcagatatctcattcctccaatgaaatacgagggcttgtgcaacaggcttcttatctcatctccacctgatcccagga

SEQ ID NO: 722902 - DNA, 641 bp, Homo sapiens
cttaggatttttcaactttatgatgctgcataagtgatatacattcagcaaaaaccatacttcaagtactcatacaatcattttgcttttcgctttttgaacagtattcaatacattacatgagatactcaacactttataacaaaataggctttgtattagatgatttttttcaactgttggctaatgtaagtgttctgggatgtttaacttaggcgaggctaagttataatgttcaataggttaggtatatgaatcatacatacctgattttaaatttatctcagtcagtaactcgcatatgcaaatatgggcaaattgttccattttgcctcatttgtaatctttaccattcccagaaaaggctcttctcaaagttaccaatggtctaggtcttttcaaaggcartgatcagttttttgattctgttttgtttgtgtgtgtgtgtcagtggaacaactgaaccatgtgacgtggtatagccataagaattctttagacccataagaacatctgttcttaccaaacaggaaaaacatgacaaaggtgtaggtttccatcaagatcagaggtattttgacctatgtaagaagatattttaaataatataaaagccaaagaaaattaaatccagtgatata

SEQ ID NO: 722903 - DNA, 641 bp, Homo sapiens
cttaggatttttcaactttatgatgctgcataagtgatatacattcagcaaaaaccatacttcaagtactcatacaatcattttgcttttcgctttttgaacagtattcaatacattacatgagatactcaacactttataacaaaataggctttgtattagatgatttttttcaactgttggctaatgtaagtgttctgggatgtttaacttaggcgaggctaagttataatgttcaataggttaggtatatgaatcatacatacctgattttaaatttatctcagtcagtaactcgcatatgcaaatatgggcaaattgttccattttgcctcatttgtaatctttaccattcccagaaaaggctcttctcaaagttaccaatggtctaggtcttttcaaaggcagtgatcagttttttgattcygttttgtttgtgtgtgtgtgtcagtggaacaactgaaccatgtgacgtggtatagccataagaattctttagacccataagaacatctgttcttaccaaacaggaaaaacatgacaaaggtgtaggtttccatcaagatcagaggtattttgacctatgtaagaagatattttaaataatataaaagccaaagaaaattaaatccagtgatata

SEQ ID NO: 722904 - DNA, 598 bp, Homo sapiens
caaattgatccccttgttccaacttccctttaaagcccagaaatttatcttatctagtttctgtatttatatgtaacaaagagctaaatcaaaatgtaaatgcaaaataatcataagtattgttttattaggcatgtttttctgacatgttattagttacatcatagaagacagctcagtcagcatcttatgctctttatcttgcaaaaagatgttaccacactaaaattgaattctcacycaagatccagcatggtaaaaattatttgacaagaataatgcttttcaattgttagacaaatttgtcctatagaatttttagtgtttttaagtgagcatttttactgaagtttaacacttctgattctaactctcaggattggttcattttcagaaaatgaacagacttacataaccaccctacaaataaggaaatgaaatattatcagcaccccaaaactccccttgtgtccctcccatctacctccctctactccccaaagataacagccaacctgactattttcactacagattaactttgcctccagttgaacttcatatgaatggaatcacagagtccgtgctttttattgca

SEQ ID NO: 722905 - DNA, 598 bp, Homo sapiens
caaattgatccccttgttccaacttccctttaaagcccagaaatttatcttatctagtttctgtatttatatgtaacaaagagctaaatcaaaatgtaaatgcaaaataatcataagtattgttttattaggcatgtttttctgacatgttattagttacatcatagaagacagctcagtcagcatcttatgctctttatcttgcaaaaagatgttaccacactaaaattgaattctcactcaagatccagcatggtaaaaattatttgacaagaataatgcttttcaattgttagacaaatttgtcctatagaatttttagtgtttttaagtgagcatttttactgaagtttaacacttctgattctaactctcaggattggttcattttcagaaaatgaacagacttacataaccaccctacaaataaggaaatgaaatattatcagcaccccaaaactccccttgtgtcccycccatctacctccctctactccccaaagataacagccaacctgactattttcactacagattaactttgcctccagttgaacttcatatgaatggaatcacagagtccgtgctttttattgca

SEQ ID NO: 722906 - DNA, 1451 bp, Homo sapiens
tagtagagacggggtttcaccgtgtcagccaggatggtctcgatctcctgacctcrtgatcctcccacctcagcctcccaaagtgctgggattacaggcgtgagccacggcgcccggcagaggtgagggctttgggggaacggttgtggggcctggagtgtggaggcgtcagcgcaggcctggcaggagccctgaaccgggacagtggggtcctgcagctgctggcctggggtgtggagacccccaacacaggggcagtctccaggacctccacaccattaacaagatgagccttgtgctcccttgggctctagagaggaagcccctctgagccctcagcccctctttcctccctctcctaaagtaatttgatcctcaggaatttgttctgccctcatctggccctggccagctctgcatttgacaaatgccaggaagaggaaactgttgagaaaacggaactactggggaaagggagggctcactgagaaccatcccggtaacccgaccgccgctggtcaccatgaaccacattgtgcaaaccttctctcctgtcaacagcggccagcctcccaactacgagatgctcaaggaggagcaggaagtggctatgctgggggcgccccacaaccctgctcccccgacgtccaccgtgatccacatccgcagcgagacctccgtgcctgaccatgtcgtctggtccctgttcaacaccctcttcatgaacacctgctgcctgggcttcatagcattcgcctactccgtgaaggtgcgtatggccctggcggaaatccagggggtgccggtgagcctggggctccacctgcccacatgctgcctggggtggggacttgtgtgtccctgtgactgtgagtttgtgtgcacgtctgtcctgtgtgtgcccacgtcagtggctttgtctgtgtgatctgtgtgtgtgtgtggcttggggaatctgcccagtgcaggtctaggaggaggctccaggaggctggctggctggctcagagtctgtccccggctatccactagcccagagcagttctccctatagcccagtaagaaattacaccttcaccttccagactggcacccaggctctcccagaaagtgagaagggaactcacaggtgacttcaccccatggtggggagaacagcctgtgctggggccaaggcagaaggaggatgagccccgaggctcctggagagtctgagccgggtgaggaaggggaggaggtggtccctgatctcagggcagggaggagacagtgaggagctggagccatagcacgcggctctcagctgggggatcctggtcccctcaccatctcctctcccccagtctagggacaggaagatggttggcgacgtgaccggggcccaggcctatgcctccaccgccaagtgcctgaacatctgggccctgattttgggcatcttcatgaccatt

SEQ ID NO: 722907 - DNA, 1451 bp, Homo sapiens
tagtagagacggggtttcaccgtgtcagccaggatggtctcgatctcctgacctcgtgatcctcccacctcagcctcccaaagtgctgggattacaggcgtgagccacggcgcccggcagaggtgagggctttgggggaacggttgtggggcctggagtgtggaggcgtcagcgcaggcctggcaggagccctgaaccgggacagtgrggtcctgcagctgctggcctggggtgtggagacccccaacacaggggcagtctccaggacctccacaccattaacaagatgagccttgtgctcccttgggctctagagaggaagcccctctgagccctcagcccctctttcctccctctcctaaagtaatttgatcctcaggaatttgttctgccctcatctggccctggccagctctgcatttgacaaatgccaggaagaggaaactgttgagaaaacggaactactggggaaagggagggctcactgagaaccatcccggtaacccgaccgccgctggtcaccatgaaccacattgtgcaaaccttctctcctgtcaacagcggccagcctcccaactacgagatgctcaaggaggagcaggaagtggctatgctgggggcgccccacaaccctgctcccccgacgtccaccgtgatccacatccgcagcgagacctccgtgcctgaccatgtcgtctggtccctgttcaacaccctcttcatgaacacctgctgcctgggcttcatagcattcgcctactccgtgaaggtgcgtatggccctggcggaaatccagggggtgccggtgagcctggggctccacctgcccacatgctgcctggggtggggacttgtgtgtccctgtgactgtgagtttgtgtgcacgtctgtcctgtgtgtgcccacgtcagtggctttgtctgtgtgatctgtgtgtgtgtgtggcttggggaatctgcccagtgcaggtctaggaggaggctccaggaggctggctggctggctcagagtctgtccccggctatccactagcccagagcagttctccctatagcccagtaagaaattacaccttcaccttccagactggcacccaggctctcccagaaagtgagaagggaactcacaggtgacttcaccccatggtggggagaacagcctgtgctggggccaaggcagaaggaggatgagccccgaggctcctggagagtctgagccgggtgaggaaggggaggaggtggtccctgatctcagggcagggaggagacagtgaggagctggagccatagcacgcggctctcagctgggggatcctggtcccctcaccatctcctctcccccagtctagggacaggaagatggttggcgacgtgaccggggcccaggcctatgcctccaccgccaagtgcctgaacatctgggccctgattttgggcatcttcatgaccatt

SEQ ID NO: 722908 - DNA, 1451 bp, Homo sapiens
tagtagagacggggtttcaccgtgtcagccaggatggtctcgatctcctgacctcgtgatcctcccacctcagcctcccaaagtgctgggattacaggcgtgagccacggcgcccggcagaggtgagggctttgggggaacggttgtggggcctggagtgtggaggcgtcagcgcaggcctggcaggagccctgaaccgggacagtggggtcctgcagctgctggcctggggtgtggagacccccaacacaggggcagtctccaggacctccacaccattaacaagatgagccttgtgctcccttgggctctagagaggaagcccctctgagccctcagcccctctttcctccctctcctaaagtaatttgatcctcaggaatttgttctgccctcatctggccctggccagctctgcatttgacaaatgccaggaagaggaaactgttgagaaaacggaactactggggaaagggagggctcactgagaaccatcccggtaacccgaycgccgctggtcaccatgaaccacattgtgcaaaccttctctcctgtcaacagcggccagcctcccaactacgagatgctcaaggaggagcaggaagtggctatgctgggggcgccccacaaccctgctcccccgacgtccaccgtgatccacatccgcagcgagacctccgtgcctgaccatgtcgtctggtccctgttcaacaccctcttcatgaacacctgctgcctgggcttcatagcattcgcctactccgtgaaggtgcgtatggccctggcggaaatccagggggtgccggtgagcctggggctccacctgcccacatgctgcctggggtggggacttgtgtgtccctgtgactgtgagtttgtgtgcacgtctgtcctgtgtgtgcccacgtcagtggctttgtctgtgtgatctgtgtgtgtgtgtggcttggggaatctgcccagtgcaggtctaggaggaggctccaggaggctggctggctggctcagagtctgtccccggctatccactagcccagagcagttctccctatagcccagtaagaaattacaccttcaccttccagactggcacccaggctctcccagaaagtgagaagggaactcacaggtgacttcaccccatggtggggagaacagcctgtgctggggccaaggcagaaggaggatgagccccgaggctcctggagagtctgagccgggtgaggaaggggaggaggtggtccctgatctcagggcagggaggagacagtgaggagctggagccatagcacgcggctctcagctgggggatcctggtcccctcaccatctcctctcccccagtctagggacaggaagatggttggcgacgtgaccggggcccaggcctatgcctccaccgccaagtgcctgaacatctgggccctgattttgggcatcttcatgaccatt

SEQ ID NO: 722909 - DNA, 1451 bp, Homo sapiens
tagtagagacggggtttcaccgtgtcagccaggatggtctcgatctcctgacctcgtgatcctcccacctcagcctcccaaagtgctgggattacaggcgtgagccacggcgcccggcagaggtgagggctttgggggaacggttgtggggcctggagtgtggaggcgtcagcgcaggcctggcaggagccctgaaccgggacagtggggtcctgcagctgctggcctggggtgtggagacccccaacacaggggcagtctccaggacctccacaccattaacaagatgagccttgtgctcccttgggctctagagaggaagcccctctgagccctcagcccctctttcctccctctcctaaagtaatttgatcctcaggaatttgttctgccctcatctggccctggccagctctgcatttgacaaatgccaggaagaggaaactgttgagaaaacggaactactggggaaagggagggctcactgagaaccatcccggtaacccgaccrccgctggtcaccatgaaccacattgtgcaaaccttctctcctgtcaacagcggccagcctcccaactacgagatgctcaaggaggagcaggaagtggctatgctgggggcgccccacaaccctgctcccccgacgtccaccgtgatccacatccgcagcgagacctccgtgcctgaccatgtcgtctggtccctgttcaacaccctcttcatgaacacctgctgcctgggcttcatagcattcgcctactccgtgaaggtgcgtatggccctggcggaaatccagggggtgccggtgagcctggggctccacctgcccacatgctgcctggggtggggacttgtgtgtccctgtgactgtgagtttgtgtgcacgtctgtcctgtgtgtgcccacgtcagtggctttgtctgtgtgatctgtgtgtgtgtgtggcttggggaatctgcccagtgcaggtctaggaggaggctccaggaggctggctggctggctcagagtctgtccccggctatccactagcccagagcagttctccctatagcccagtaagaaattacaccttcaccttccagactggcacccaggctctcccagaaagtgagaagggaactcacaggtgacttcaccccatggtggggagaacagcctgtgctggggccaaggcagaaggaggatgagccccgaggctcctggagagtctgagccgggtgaggaaggggaggaggtggtccctgatctcagggcagggaggagacagtgaggagctggagccatagcacgcggctctcagctgggggatcctggtcccctcaccatctcctctcccccagtctagggacaggaagatggttggcgacgtgaccggggcccaggcctatgcctccaccgccaagtgcctgaacatctgggccctgattttgggcatcttcatgaccatt

SEQ ID NO: 722910 - DNA, 767 bp, Homo sapiens
gaatcacagtctatttgtaacctagtctcagaagtgacatctatcacttttgacatattccatccattagaagcaaattactaggtccagtccacactccaggggagggaatagcacagggcatgaatgccagtaggtggggatcaaggggaccacagatgaggctgcccagcaagtgaacacacccatttacgccatctcccacactgaaatgagcagtgctgatttaagagcacaggctctggaatcacagagatctgggtttgtgctcctgcytggaaatgtcagttagacgatcttggattatttaattcttttgtttcttcatggcaaaatgggaatgatgataataacactgacctcaaagggctgttttgaaagtcagactaaatgagctaattcatgcaaaatacttaccaagtatctaacacaaaataagagctcaatgatgatgataagctgctattatcatcatcatcaccaccgccaccgccacctgatttgtaattcaaactctcatgttgactagccgtggcattgcaggcaagttacttgactttcctgtgcatctgtttcctcgtgcataagctggggaaatactacccacccttcagagctattgggagaggagggtggtgatcacgtgcttggcccttggtcgctgtaaatgattacttttaatgggggttcagtctgctttgcataaatttactgccctttttggttaaggcacatctgtttttctgtctttgtttgctcttctatga

SEQ ID NO: 722911 - DNA, 659 bp, Homo sapiens
gagctgaacactgaaggatgagtaggagctatctccagtgcttttcaaaattgaaggggcagatgaatcacttggagagcttgttagtaagcagattctgattcatcaggcaggggcctgagccttgctttgctcccaggtgatgcctatgctgatgagatacgaaagagggaggctctttagatcattatagggcaggagtcaaggaaagatgaagggacagggaaggaaagatgaagggacagggaaggaaagatttctggccaggacaaggcacaggcaaagacacgagggtgcacacagcttggtctaggggaacaggagagtttgtgttctggatccagggactcaggagggagggcaggacctggcagcagaacagatcyccaacccacacagatgggctcttcctgctcatcctctccaatgcccctatctaccatgggtgatctttagcctcagaacactttatttttctgaggagtacaaaggatcacagactggaagtcacactggggaagcagccatggagaacgcactctgcctaaacacagcttgtacaaggaatagcctgaagacaaggtcaaaggcttcaaatcatgaaccaactcacgagctccggacaagctcatttgtcccatgagcaggatgtctgaggg

SEQ ID NO: 722912 - DNA, 637 bp, Homo sapiens
gcatgcctggctaatttttgtattgttagtataaatgaggtttcgctatattggtctggttggtctcgaacaactgacctcaagtgatccacccatctcagcctcccaaagtaatgggattacaggcatgagctaccacacccggccttcgtttttcttttgacacagggttttgctctgtcacccaggctggagtgcagtggtgcagtcatagctcactgcagcctcaaagtcctgagttcaagcaatcctcttgcctcagcctcccaacgtgctagcatctcaggcgtgagccactgcacctggcccgaaaccaagctttctcatcccaagcgccaacctttatcaagtctagcctagtcctctatcgtctcctaagtgtccctcatgagtgatcacttctgagtcctcctgcgtggagagctcagccactgggggcgtatctttcccattggaaaagtgtggttattggaagtttcctctttttagaaagaacaggattggaggtgctctctggggtatcctcctaccaagctgactgttgaagtccttgtggtgctcagggaggatggrtgacactcgctgttgcttcagcttcatcttgagcccacacagcatctccactacccaggtctcc

SEQ ID NO: 722913 - DNA, 669 bp, Homo sapiens
cagaaatgcccacttcaactttgttcaacaaaggttcagcatcaactatctcatttgccaaattgaattaattttcaatttatgaaccaagatctgatgaattatatgagcttaacatttttaatgtttcactgacaatatataagtctataggtccatagtcttatatattagtctgttctcatactgctataaagaaatacccaagactgagtaatttataaaggaaagaggtttaatcaactcacagttccacacggctggggaggcctcaggaaatttacaatcatggtggaaggggaggcaggcatgtcttacatggcagcaggagagagagagagagagagagagagagagagtgcgcwatgtgggaagagccccttagccccttataaaaccatcagatctcgtcagaactcactcactgtaacgagaacatcctggaagaaaccacctccatgttcctcccacctcccaccaggtccctccctcgacatgtggggattatggggattacaatttgagatgagatttggttgaggacacagagccaaaccgtatcacctgatacagaacttacctagaattattactaatgcattgaactttaatgattatgtaatctgtttttatcttttactatttatactctggccctaaaattctacc

SEQ ID NO: 722914 - DNA, 605 bp, Homo sapiens
  misc_feature 158: n = A,T,C or G
ttagtgttacaggtgcccaccaccatgttcagctaattttgtatttttagtagaaatggtttcaccatgttggccaggctggtctcaaactcctgaccttgagtgagccatcgcacctggcctaaaatggaaatttttttttttttttttttttktangagacagagtcactctagttgcccaggctggagtgcagcggcaccatctcggctccctgcaacctccacctcctgggttcaagcaattctcctgcttcagcctcccgagtaactgggattataggtgcctgccaccatgtccggctaatttttgtatgtttagtagagacatggtttcaccatgttggtcaggctggtctcaaactcctgacctcaggtgatccacctgccttggcctctcaaagtgctgggattataggcgtgagccactgcgcccagtctaaaatggaaattcttaattggcatcaaggagtaagggaagttcactaatttgtatgtaaaatatttgcatttgggaggcaatgtacgtttttctgggaaaaggattcacgctgtcatcagattattgaaggaatctgtgacccattcatgtagagggaaactgaa

SEQ ID NO: 722915 - DNA, 605 bp, Homo sapiens
  misc_feature 158: n = A,T,C or G
ttagtgttacaggtgcccaccaccatgttcagctaattttgtatttttagtagaaatggtttcaccatgttggccaggctggtctcaaactcctgaccttgagtgagccatcgcacctggcctaaaatggaaatttttttttttttttttttttgtwngagacagagtcactctagttgcccaggctggagtgcagcggcaccatctcggctccctgcaacctccacctcctgggttcaagcaattctcctgcttcagcctcccgagtaactgggattataggtgcctgccaccatgtccggctaatttttgtatgtttagtagagacatggtttcaccatgttggtcaggctggtctcaaactcctgacctcaggtgatccacctgccttggcctctcaaagtgctgggattataggcgtgagccactgcgcccagtctaaaatggaaattcttaattggcatcaaggagtaagggaagttcactaatttgtatgtaaaatatttgcatttgggaggcaatgtacgtttttctgggaaaaggattcacgctgtcatcagattattgaaggaatctgtgacccattcatgtagagggaaactgaa

SEQ ID NO: 722916 - DNA, 605 bp, Homo sapiens
  misc_feature 158: n = A,T,C or G
ttagtgttacaggtgcccaccaccatgttcagctaattttgtatttttagtagaaatggtttcaccatgttggccaggctggtctcaaactcctgaccttgagtgagccatcgcacctggcctaaaatggaaatttttttttttttttttttttgtangagacagagtcactctwgttgcccaggctggagtgcagcggcaccatctcggctccctgcaacctccacctcctgggttcaagcaattctcctgcttcagcctcccgagtaactgggattataggtgcctgccaccatgtccggctaatttttgtatgtttagtagagacatggtttcaccatgttggtcaggctggtctcaaactcctgacctcaggtgatccacctgccttggcctctcaaagtgctgggattataggcgtgagccactgcgcccagtctaaaatggaaattcttaattggcatcaaggagtaagggaagttcactaatttgtatgtaaaatatttgcatttgggaggcaatgtacgtttttctgggaaaaggattcacgctgtcatcagattattgaaggaatctgtgacccattcatgtagagggaaactgaa

SEQ ID NO: 722917 - DNA, 605 bp, Homo sapiens
  misc_feature 158: n = A,T,C or G
ttagtgttacaggtgcccaccaccatgttcagctaattttgtatttttagtagaaatggtttcaccatgttggccaggctggtctcaaactcctgaccttgagtgagccatcgcacctggcctaaaatggaaatttttttttttttttttttttgtangagacagagtcactctagttgcccaggctggagtgcagcggcaccatctcggctccctgcaacctccacctcctgggttcaagcaattctcctgcttcagcctcccgagtaactgggattataggtgcctgccaccatgtccggctaatttttgtatgtttagtagagacatggtttcaccatgttggycaggctggtctcaaactcctgacctcaggtgatccacctgccttggcctctcaaagtgctgggattataggcgtgagccactgcgcccagtctaaaatggaaattcttaattggcatcaaggagtaagggaagttcactaatttgtatgtaaaatatttgcatttgggaggcaatgtacgtttttctgggaaaaggattcacgctgtcatcagattattgaaggaatctgtgacccattcatgtagagggaaactgaa

SEQ ID NO: 722918 - DNA, 622 bp, Homo sapiens
tttggagttcataacttaaagcagaaactcagagggttgaaatgtcattttcatgaaggatttttattagagtatcatttagattgcctttgcaacctcccatgtgttttgttttttttctaaagggctgctaatcttgttttaaatttgcaatgtagttaatttatcttcactgttaattagttgtgggttgtttaaccttataccrtatagttttacatatctataacaacagtagtttgggcctcttgtattctaatagttaagtccttaagctgtgtacacactgcaattcaagtatgagtcatgcataaccgtagcactaagagacaagagggaaatccctctctcctaaaattttgcaaaagttctgggtttttttttccactgagtgggaactagtcagctaatcatgaacatgaggtctttggcctcatttaaaggtgcttcagaagcactgagccataggaaggcctctttgtctaggtccgggaccctacaccatggcagaagccatcttccctcccagtgtgcagtgatgtcccagatagcgaattggttagccacttttcagtctcgggcagttttgttttccaaaacatgggtttttatctcaggacct

SEQ ID NO: 722919 - DNA, 2244 bp, Homo sapiens
ttgcatttgactttttttagtagttactggttgcaatggttgattttatatgtcaacttggctaggccgtggtgaccagttgttaggtcaaacaccagtctagacgttactgtgaagatatgttttagatgggattaacatttaagtcaacaggctttgagtaaagcaaattaccctccataatgagagtgggcctcattcaatccattgaaggtcataagagaaaagatggaggtccctggaggaagacggaattctgccaggcaatcatcttcagacatcaactcttccctggctctccagccaatgggcctgccctgaagatttcagacttgccagctctcataattgcatgatccaattcgttaaaagagagagagagagaaaggagagagatatcctatttgttctgtttctctggaacaccctaatatgctggtagacatatgggctccccaaatggattgtaagtcatgcagaggccgaaactgagtttcctccacttccacgaccccagcagtgcctagcccatagccagccacagaatggaccctcagtaaacgcatgctgagtggacagcacatggtctaggccgggaaggggtgaggtgtaggaagcagggaagtgcagaggtgcacaccctgaatgtgagggcctccttgagtttgcagcccaggtcccgggccctgcccgtgtggtctgcagggagaagtcattggtctacatgcaatgaccctgccggcctctgggactcacactccgcaagctcaagggcctggttggcaccacggaaaaatcttgaagcgctcacttggcgtgaacaaggtctggggttcatgagaatcagaaccttccagaaccctgggctgtgcactgttatgctgaaaggctggtgctcattttggaccgtcaagcgcagccatgagcagaaggaatccctccgagcatcgtgcccagatggcggctcagcctttcccttgtaacgcgtggcccagaggaaggggccggcgttgttctgccacagggctgttctgccacagggctgctcccccaggaagccctaaatgtgcagactgtgtgggaggaaacagcccccttggattactgggctataaaacttcaaatgcatgaagactttgggtggtgatcaaaaccccagcgcaccccaggaccccaccatgcaaagctcgccccaccagatagtccctgaaggtccttgtttgtcaatacacagcccctggctgggcctcacatcggcccagatccttcctggagctttggtttttcttgaatcctcagcagtccccaccctgctgctgttaggacagaaccgccaagtcaggagcaacagataaaagggcttcccctgccctggtccctgcgctacagtgtaggctgagccagcctcatggcctgtgcagcatgtcaaagacagcatccccatttcgccctgccctcccctcagcaccacaaaatacacaaggcccagaagaggagtccaaatgccttctcgctgtcccatgttcacacggacgctgcttaaggatttaagtacatctcagaacacaagaagccatgagtgagactcttgctttgttcaaaaagctgtgtgatgtccacacaaaacggaaaacaagtacgggctgccagctccctgacagggaccccctccccatccacggagataaaacaagcaatcacagaagtggctggacctacgagcctcttcatcagctgacaaaatagctctgaggaacccaggagcgtcactgggtgtattgggccattcttgcattgctataaagaaatacctaaggttgcatcatttataaagaasaggtttaactagttcccggttctgcaggctgtacaagcatggcgcagggcatctgctcagcttctggggaggcctcagggagcttttactcatggcagaaggcgaagcaagggcaggcatgtcacatggctagaacaggagcaagagaaagaatggaggggaggtgtcgcacacttttaaacaaccagatctcccaagcactcactatcacgaggacaagaccaaggagatggcactaaaccactcatgagaaatccgcccgcatgatccaaccacctcccaccaagccccgcctccgacagtggggattgcaattcaactcgagatttacaggagacgacatccaaactattctgctgggggtggtgtgcatagcagggaaggaaggtagcgtggatgcagatgtc

SEQ ID NO: 722920 - DNA, 2244 bp, Homo sapiens
ttgcatttgactttttttagtagttactggttgcaatggttgattttatatgtcaacttggctaggccgtggtgaccagttgttaggtcaaacaccagtctagacgttactgtgaagatatgttttagatgggattaacatttaagtcaacaggctttgagtaaagcaaattaccctccataatgagagtgggcctcattcaatccattgaaggtcataagagaaaagatggaggtccctggaggaagacggaattctgccaggcaatcatcttcagacatcaactcttccctggctctccagccaatgggcctgccctgaagatttcagacttgccagctctcataattgcatgatccaattcgttaaaagagagagagagagaaaggagagagatatcctatttgttctgtttctctggaacaccctaatatgctggtagacatatgggctccccaaatggattgtaagtcatgcagaggccgaaactgagtttcctccacttccacgaccccagcagtgcctagcccatagccagccacagaatggaccctcagtaaacgcatgctgagtggacagcacatggtctaggccgggaaggggtgaggtgtaggaagcagggaagtgcagaggtgcacaccctgaatgtgagggcctccttgagtttgcagcccaggtcccgggccctgcccgtgtggtctgcagggagaagtcattggtctacatgcaatgaccctgccggcctctgggactcacactccgcaagctcaagggcctggttggcaccacggaaaaatcttgaagcgctcacttggcgtgaacaaggtctggggttcatgagaatcagaaccttccagaaccctgggctgtgcactgttatgctgaaaggctggtgctcattttggaccgtcaagcgcagccatgagcagaaggaatccctccgagcatcgtgcccagatggcggctcagcctttcccttgtaacgcgtggcccagaggaaggggccggcgttgttctgccacagggctgttctgccacagggctgctcccccaggaagccctaaatgtgcagactgtgtgggaggaaacagcccccttggattactgggctataaaacttcaaatgcatgaagactttgggtggtgatcaaaaccccagcgcaccccaggaccccaccatgcaaagctcgccccaccagatagtccctgaaggtccttgtttgtcaatacacagcccctggctgggcctcacatcggcccagatccttcctggagctttggtttttcttgaatcctcagcagtccccaccctgctgctgttaggacagaaccgccaagtcaggagcaacagataaaagggcttcccctgccctggtccctgcgctacagtgtaggctgagccagcctcatggcctgtgcagcatgtcaaagacagcatccccatttcgccctgccctcccctcagcaccacaaaatacacaaggcccagaagaggagtccaaatgccttctcgctgtcccatgttcacacggacgctgcttaaggatttaagtacatctcagaacacaagaagccatgagtgagactcttgctttgttcaaaaagctgtgtgatgtccacacaaaacggaaaacaagtacgggctgccagctccctgacagggaccccctccccatccacggagataaaacaagcaatcacagaagtggctggacctacgagcctcttcatcagctgacaaaatagctctgaggaacccaggagcgtcactgggtgtattgggccattcttgcattgctataaagaaatacctaaggttgcatcatttataaagaacaggtttaactagttcccggttctgcaggctgtacaagcatggcgcagggcatctgctcagcttctggggaggcctcagggagcttttactcatggcagaaggcgaagcaagggcaggcatgtcacatggctagaacaggagcragagaaagaatggaggggaggtgtcgcacacttttaaacaaccagatctcccaagcactcactatcacgaggacaagaccaaggagatggcactaaaccactcatgagaaatccgcccgcatgatccaaccacctcccaccaagccccgcctccgacagtggggattgcaattcaactcgagatttacaggagacgacatccaaactattctgctgggggtggtgtgcatagcagggaaggaaggtagcgtggatgcagatgtc

SEQ ID NO: 722921 - DNA, 2244 bp, Homo sapiens
ttgcatttgactttttttagtagttactggttgcaatggttgattttatatgtcaacttggctaggccgtggtgaccagttgttaggtcaaacaccagtctagacgttactgtgaagatatgttttagatgggattaacatttaagtcaacaggctttgagtaaagcaaattaccctccataatgagagtgggcctcattcaatccattgaaggtcataagagaaaagatggaggtccctggaggaagacggaattctgccaggcaatcatcttcagacatcaactcttccctggctctccagccaatgggcctgccctgaagatttcagacttgccagctctcataattgcatgatccaattcgttaaaagagagagagagagaaaggagagagatatcctatttgttctgtttctctggaacaccctaatatgctggtagacatatgggctccccaaatggattgtaagtcatgcagaggccgaaactgagtttcctccacttccacgaccccagcagtgcctagcccatagccagccacagaatggaccctcagtaaacgcatgctgagtggacagcacatggtctaggccgggaaggggtgaggtgtaggaagcagggaagtgcagaggtgcacaccctgaatgtgagggcctccttgagtttgcagcccaggtcccgggccctgcccgtgtggtctgcagggagaagtcattggtctacatgcaatgaccctgccggcctctgggactcacactccgcaagctcaagggcctggttggcaccacggaaaaatcttgaagcgctcacttggcgtgaacaaggtctggggttcatgagaatcagaaccttccagaaccctgggctgtgcactgttatgctgaaaggctggtgctcattttggaccgtcaagcgcagccatgagcagaaggaatccctccgagcatcgtgcccagatggcggctcagcctttcccttgtaacgcgtggcccagaggaaggggccggcgttgttctgccacagggctgttctgccacagggctgctcccccaggaagccctaaatgtgcagactgtgtgggaggaaacagcccccttggattactgggctataaaacttcaaatgcatgaagactttgggtggtgatcaaaaccccagcgcaccccaggaccccaccatgcaaagctcgccccaccagatagtccctgaaggtccttgtttgtcaatacacagcccctggctgggcctcacatcggcccagatccttcctggagctttggtttttcttgaatcctcagcagtccccaccctgctgctgttaggacagaaccgccaagtcaggagcaacagataaaagggcttcccctgccctggtccctgcgctacagtgtaggctgagccagcctcatggcctgtgcagcatgtcaaagacagcatccccatttcgccctgccctcccctcagcaccacaaaatacacaaggcccagaagaggagtccaaatgccttctcgctgtcccatgttcacacggacgctgcttaaggatttaagtacatctcagaacacaagaagccatgagtgagactcttgctttgttcaaaaagctgtgtgatgtccacacaaaacggaaaacaagtacgggctgccagctccctgacagggaccccctccccatccacggagataaaacaagcaatcacagaagtggctggacctacgagcctcttcatcagctgacaaaatagctctgaggaacccaggagcgtcactgggtgtattgggccattcttgcattgctataaagaaatacctaaggttgcatcatttataaagaacaggtttaactagttcccggttctgcaggctgtacaagcatggcgcagggcatctgctcagcttctggggaggcctcagggagcttttactcatggcagaaggcgaagcaagggcaggcatgtcacatggctagaacaggagcaagagaaagaatggaggggaggtgtcgcacacttttaaacaaccagatctcccaagcactcactatcacgaggacaagaccaaggrgatggcactaaaccactcatgagaaatccgcccgcatgatccaaccacctcccaccaagccccgcctccgacagtggggattgcaattcaactcgagatttacaggagacgacatccaaactattctgctgggggtggtgtgcatagcagggaaggaaggtagcgtggatgcagatgtc

SEQ ID NO: 722922 - DNA, 2244 bp, Homo sapiens
ttgcatttgactttttttagtagttactggttgcaatggttgattttatatgtcaacttggctaggccgtggtgaccagttgttaggtcaaacaccagtctagacgttactgtgaagatatgttttagatgggattaacatttaagtcaacaggctttgagtaaagcaaattaccctccataatgagagtgggcctcattcaatccattgaaggtcataagagaaaagatggaggtccctggaggaagacggaattctgccaggcaatcatcttcagacatcaactcttccctggctctccagccaatgggcctgccctgaagatttcagacttgccagctctcataattgcatgatccaattcgttaaaagagagagagagagaaaggagagagatatcctatttgttctgtttctctggaacaccctaatatgctggtagacatatgggctccccaaatggattgtaagtcatgcagaggccgaaactgagtttcctccacttccacgaccccagcagtgcctagcccatagccagccacagaatggaccctcagtaaacgcatgctgagtggacagcacatggtctaggccgggaaggggtgaggtgtaggaagcagggaagtgcagaggtgcacaccctgaatgtgagggcctccttgagtttgcagcccaggtcccgggccctgcccgtgtggtctgcagggagaagtcattggtctacatgcaatgaccctgccggcctctgggactcacactccgcaagctcaagggcctggttggcaccacggaaaaatcttgaagcgctcacttggcgtgaacaaggtctggggttcatgagaatcagaaccttccagaaccctgggctgtgcactgttatgctgaaaggctggtgctcattttggaccgtcaagcgcagccatgagcagaaggaatccctccgagcatcgtgcccagatggcggctcagcctttcccttgtaacgcgtggcccagaggaaggggccggcgttgttctgccacagggctgttctgccacagggctgctcccccaggaagccctaaatgtgcagactgtgtgggaggaaacagcccccttggattactgggctataaaacttcaaatgcatgaagactttgggtggtgatcaaaaccccagcgcaccccaggaccccaccatgcaaagctcgccccaccagatagtccctgaaggtccttgtttgtcaatacacagcccctggctgggcctcacatcggcccagatccttcctggagctttggtttttcttgaatcctcagcagtccccaccctgctgctgttaggacagaaccgccaagtcaggagcaacagataaaagggcttcccctgccctggtccctgcgctacagtgtaggctgagccagcctcatggcctgtgcagcatgtcaaagacagcatccccatttcgccctgccctcccctcagcaccacaaaatacacaaggcccagaagaggagtccaaatgccttctcgctgtcccatgttcacacggacgctgcttaaggatttaagtacatctcagaacacaagaagccatgagtgagactcttgctttgttcaaaaagctgtgtgatgtccacacaaaacggaaaacaagtacgggctgccagctccctgacagggaccccctccccatccacggagataaaacaagcaatcacagaagtggctggacctacgagcctcttcatcagctgacaaaatagctctgaggaacccaggagcgtcactgggtgtattgggccattcttgcattgctataaagaaatacctaaggttgcatcatttataaagaacaggtttaactagttcccggttctgcaggctgtacaagcatggcgcagggcatctgctcagcttctggggaggcctcagggagcttttactcatggcagaaggcgaagcaagggcaggcatgtcacatggctagaacaggagcaagagaaagaatggaggggaggtgtcgcacacttttaaacaaccagatctcccaagcactcactatcacgaggacaagaccaaggagatggcactaaaccactcatgagaaatccgcccgcatgatccaaccacctcccaccaagccccgcctccgacagtggggattgcaattcaackcgagatttacaggagacgacatccaaactattctgctgggggtggtgtgcatagcagggaaggaaggtagcgtggatgcagatgtc

SEQ ID NO: 722923 - DNA, 592 bp, Homo sapiens
tttgatatttttatatttatattttacttaaataatataaggagttcctttctaaatcaaaattagacttaagaggccaattaaaaataaaggtcacggcgcatggtgaggagttgctgttcgtaaccgacggaaaaggcttcatacgtgaayacggctggacaagcaaccagaacaggtgcttccccaggatgtccagaaacaagcagagaccgtgaaggacatttaacctcaccaccaattccatgtgtgcccatgaaaacaagattccattgttggctgacagattggcaaagattaatactagccaatgttagcaaagacatgaaaaaatgggccgttacggttcctgcttacttattaaacatttctgtgggccagtttggcaatttgaactgagcgtaactcttttgtactcaaggagtacgacatgatgatttgatgtctgtgcaccttgtgcagtgatgaccacaactgggtaaattaacacacctgtcctcatccaggctggacggtgcagccccagaccttgcccatcctgtgacttgaatttatatcctttggttagcatctccccgttccgctttccctg

SEQ ID NO: 722924 - DNA, 592 bp, Homo sapiens
tttgatatttttatatttatattttacttaaataatataaggagttcctttctaaatcaaaattagacttaagaggccaattaaaaataaaggtcacggcgcatggtgaggagttgctgttcgtaaccgacggaaaaggcttcatacgtgaacacggctggacaagcaaccagaacaggtgcttccccaggatgtccagaaacaagcagagaccgtgaaggacatttaacctcaccaccaattccatgtgtgcccatgaaaacaagattccattgttggctgacagattggcaaagattaatactagccaatgttagcaaagayatgaaaaaatgggccgttacggttcctgcttacttattaaacatttctgtgggccagtttggcaatttgaactgagcgtaactcttttgtactcaaggagtacgacatgatgatttgatgtctgtgcaccttgtgcagtgatgaccacaactgggtaaattaacacacctgtcctcatccaggctggacggtgcagccccagaccttgcccatcctgtgacttgaatttatatcctttggttagcatctccccgttccgctttccctg

SEQ ID NO: 722925 - DNA, 1135 bp, Homo sapiens
gcagaggaggaagaagatccccgtgtgagtggactccagcagttccaaccaatgttgttcaagggcaagtgtgcgtgaatatatgtgcagaaatatgtatcatcggtcaggcgcagtggctcacagctgtaattgcagcgctttgggaggcaggggcaggagaattgcttgagcccaggagtttgagaccaacctgggcaacacagtgagaccccatctctacaaaaaaataaacttttaaaaaattagcagtgcagtggtgtgtgcctgcagtcccagctactttgcaggctgaggtgggaagattgtgtaagcctgggagatggaagcggcagtgagccatgatcgtgccgctgcactccagcctgggcaacccagtgagaccctgtctcaaaggggaaaaaaacaaaagaaatgtgtatagtttacattgattatagcaagaaatcagaagccatattgaatgcttcatcaaagaggactggttgaataaactttagtatatcccccccaaaaaagttctatagccaattaaaattatggaagggatgtatgtatacaaagtgtgtgtgtgcgtgtgtgtgtgtgtagagagagaccctaatcaatgagaaattatacttactatgttaattaatcaggctgatacaattagcatatgcggtgtcatcttatttttgtggaacgcaaatcgaaggatctttggacgtaagtattctcaggtggatgtgcatcgccacgtgggcagtgccatatctatgttgtgacattgcagggatcatcccctttatctattttggcaaatttataattaagtttgtcaggtatattcattaattttgtaacgagaaaaataagggatttttattttgaaaaaaataattacacgctttctggaaagtcatcaagttctaaggtttggagaatatgttacagtatttcaaattctcaaatatggaaaaggtgttggaaaagtgctgctgccgccacttcatgccagatgctaaaaacataaagggcagcaatcctgaatgagaaatgcattaataatctcagacttttatacagagattctgtcaaatggtacggtatgtgttagccctgccttgtacacacragaacacggatgtggagg

SEQ ID NO: 722926 - DNA, 1482 bp, Homo sapiens
ggccgggcgcggtggctcacgcctgtaatyccagcactttggaaggccgaggcaggcagatcacaaggtcacgagatcgagaccatcctggccaacatggtgaaatcccgtctctactaaaaatacaaaaattagctgggcatgggggtgggcacctgtaatctgaactacttgggaggctgaggcaggagaatggcttgaacctgggaggcggaggttgcagtgagccaagatcacgccactgcactccagcctggtgacagagcaagactctgtctccaaaaaaaaaaagagagagagagaatttaccaagctctatattcttaaccttgtgtaattgagtttgggacccctcaaatttatgtttttgagattagggctctatccattattatatttgtggagtttttttgtaagtatccttttcagagacccatcaatttgaagctagcctatttcaataatcttcttaatggaatcctcacttccatagtactttccagttcatacattatttttacttatgatacctcatctgattctcactgatggtcctattggtcctatgttagtggccagggtcgctgtgtgaaaaatatagtgtgtgaacttggagaccagcgctagagaataaactttgaagagagagtgagaatgcagtgactaaggaatgacttgaagaatcactctgacccttgctagtcttgacagagctaacaatgtctagactttggatacagttctgagacaaagaaaaatgctagaaaaagtatgtaggaatatggactgaacaaactgatgaaaaaagagcaacatttctactatttaaaaaagtaattaaaattaattttcttcctaaaaagagaccacacactgtggtaaaaattcctaaacattttcaccataatctgtttgttggttttttagaattttatcttaacttccaaaagtattacaagacaatttgtaaaagttaaaaatatttatatgaaagtaatcttttttcttattcactttcctgaagctatggcaacttccaaatttccatttagaaatgtataggtgctgtgacttgagagagagtgagaaataaatgggagacttccttggaactatgtccaaacagcaagtttggacatagttttttttgtgtgttctttttatgtttatatgaagtggcttttgagggaactaatgtagattatggagctctaaagcagtttagtgctgcccctaccatgaggtaatcaacactaaaagatccatgcttatggaaatatacaaatccatatctaaaggtttttttttgttgttgttatctggttttacagaaaagggactatgttttgtatattatccttcaactttttattattaattcaagggcatccctccagtattaacatcaacatctaatgtatactttttacagtttaatattttattaattaactataattacagatatacggatctatttct

SEQ ID NO: 722927 - DNA, 606 bp, Homo sapiens
aatgaatttaccggccgggcgcggtggctcacgcctgtaatyccagcactttggaaggccgaggcaggcagatcacaaggtcacgagatcgagaccatcctggccaacatggtgaaatcccgtctctactaaaaatacaaaaattagctgggcatgggggtgggcacctgtaatctgaactacttgggaggctgaggcaggagaatggcttgaacctgggaggcggaggttgcagtgagccaagatcacgccactgcactccagcctggtgacagagcaagactctgtctccaaaaaaaaaaagagagagagagaatttaccaagctctatattcttaaccttgtgtaattgagtttgggacccctcaaatttatgtttttgagattagggctctatccattattatatttgtggagtttttttgtaagtatccttttcagagacccatcaatttgaagctagcctatttcaataatcttcttaatggaatcctcacttccatagtactttccagttcatacattatttttacttatgatacctcatctgattctcactgatggtcctattggtcctatgttagtggccagggtcgctgtgtgaaa

SEQ ID NO: 722928 - DNA, 2281 bp, Homo sapiens
ccctagatctttctgtaacatggtagagctctacggggaaagaagagttcacaaaaactttttgcagccaccttcagcacagctcacaccaccaactacttgagcccaagcagcacttgttctgtgtactgtggctcatccccaaatcggttccattgctgctgctgctggtggtatcagaactgaagctgtgtctgccccctgcatttttgccatgatcctctgtgaaaagtgtccttgtgtgtaggctcaccarctgtcctggttgcctgtgactgtctaggtttgaagcactggaagtccaatgtctcagaaaatcctgaacgcccaagcaaactggaatagttggtcactgggacatatatgcacagctgaaccttcttccaggcagtgtgttagagactctgcatccaccaactcctacaccaggcactaagtctacttcctgattctttctttaaagcattttaggtcaatttctcctgctagaattctgtatcactcaacaccactctcctgaagggatgaaataggttaccaacaagcatcatgcagtgtttttctgttcctctcctctatgacagcattggattctattatccttcctccctactattgccctcagcagctttagcccctctttccttctcctctccctccctccacccaatccccagaggttctgccttttgagaagaatcaaccattagctctccaaaaggttgcatatttgtctgattactttttgagacagagtcttgctctatcacccaggctggagtgtagtgtcatgatcatggcttactgcagcttcaacctcccaggtttaagtgatcctcctgccccagcctccctagtagctgggactataggcatgcaccaccatacctggataatttttttattattttattttttaattttttgtggaaacggggtctcaccatgttgcccagctggtctcaaactcctgggctcaagcgatccttccaccttgttctcccaaaatgctgggattacaggcatgaaccactgtgcctagccaagttgcatatttaaacataactctttagtatttccttatcatctctgagccaagattcttacctcaatgtctacttctatctacagaagaaaaatacatccaccaacgatgatttatttaaatatctgaggctggaatcaaggccaattttcctttggccagagtatgtgttctgtatttggttttaccaaatgctaagtccaaatgtaaaaaaatatacaccactttaagagtcttaggaataaaatggtaaaagaagttgaagagcatctctagctaaataagggttgtcatttgattaatgcaagaaaaatcaaatagtcacaaagctctccaaacatctctctttcagaattagagccataatatacatttgattccccaaaaaacacatttctgaaagttctaagctagtgaagatatgaattgctaatgaaccctgcaggattcataattataactttgcaatcatgacacaacaatatgctcaaaagcaatgtttgggtactctttgaacataattgatagctaagcatatgcattttagtggtaggtgataagaatcacacataaaagtttttatcttggtatagctggagggggctatgtgaggaggtaaaatgattattttacaggaaaaagaagatgtccttatcttgtgtgccatagatctatcacattctctgacaggattctactgaaatccttcaggagtttcctagtgctctgcctataaaggccccaatccgtatatggcctaaagagctctgcatgatcaaaaacagtgactcttacctgggggcgatgatttcacccttgcccccaccagggaacatgtggcaatatctggaaatattttcagttgttataactgaagggaagggatgtgaatggcatctagtgtgtagaggccagagggtgctgctaaaattgtgcaaagggccactccccacaacagagaatcatccagccccaaatgttaatcaacagtgccaaggtagagaacctcgatattagcccctttctttctctggtttcttctcatatccctcactccttcctgtactgtgttcctattttattttcctttccattctttaaatgggcccctatccttcccacaacttggactttgccattctattcctgctgccagaagctcctcctccagattcctctccctttcctggttaactattatttctccagctctcagcaattaaagcaattttttca

SEQ ID NO: 722929 - DNA, 2281 bp, Homo sapiens
ccctagatctttctgtaacatggtagagctctacggggaaagaagagttcacaaaaactttttgcagccaccttcagcacagctcacaccaccaactacttgagcccaagcagcacttgttctgtgtactgtggctcatccccaaatcggttccattgctgctgctgctggtggtatcagaactgaagctgtgtctgccccctgcatttttgccatgatcctctgtgaaaagtgtccttgtgtgtaggctcaccagctgtcctggttgcctgtgactgtctaggtttgaagcactggaagtccaatgtctcagaaaatcctgaacgcccaagcaaactggaatagttggtcactgggacatatatgcacagctgaaccttcttccaggcagtgtgttagagactctgcatccaccaactcctacaccaggcactaagtctacttcctgattctttctttaaagcattttaggtcaatttctcctgctagaattctgtatcactcaacaccactctcctgaagggatgaaataggttaccaacaagcatcatgcagtgtttttctgttcctctcctctatgacagcattggattctattatccttcctccctactattgccctcagcagctttagcccctctttccttctcctctccctccctccacccaatccccagaggttctgccttttgagaagaatcaaccattagctctccaaaaggttgcatatttgtctgattactttttgagacagagtcttgctctatcacccaggctggagtgtagtgtcatgatcatggcttactgcagcttcaacctcccaggtttaagtgatcctcctgccccagcctccctagtagctgggactataggcatgcaccaccatacctggataatttttttattattttattttttaattttttgtggaaacggggtctcaccatgttgcccagctggtctcaaactcctgggctcaagcgatccttccaycttgttctcccaaaatgctgggattacaggcatgaaccactgtgcctagccaagttgcatatttaaacataactctttagtatttccttatcatctctgagccaagattcttacctcaatgtctacttctatctacagaagaaaaatacatccaccaacgatgatttatttaaatatctgaggctggaatcaaggccaattttcctttggccagagtatgtgttctgtatttggttttaccaaatgctaagtccaaatgtaaaaaaatatacaccactttaagagtcttaggaataaaatggtaaaagaagttgaagagcatctctagctaaataagggttgtcatttgattaatgcaagaaaaatcaaatagtcacaaagctctccaaacatctctctttcagaattagagccataatatacatttgattccccaaaaaacacatttctgaaagttctaagctagtgaagatatgaattgctaatgaaccctgcaggattcataattataactttgcaatcatgacacaacaatatgctcaaaagcaatgtttgggtactctttgaacataattgatagctaagcatatgcattttagtggtaggtgataagaatcacacataaaagtttttatcttggtatagctggagggggctatgtgaggaggtaaaatgattattttacaggaaaaagaagatgtccttatcttgtgtgccatagatctatcacattctctgacaggattctactgaaatccttcaggagtttcctagtgctctgcctataaaggccccaatccgtatatggcctaaagagctctgcatgatcaaaaacagtgactcttacctgggggcgatgatttcacccttgcccccaccagggaacatgtggcaatatctggaaatattttcagttgttataactgaagggaagggatgtgaatggcatctagtgtgtagaggccagagggtgctgctaaaattgtgcaaagggccactccccacaacagagaatcatccagccccaaatgttaatcaacagtgccaaggtagagaacctcgatattagcccctttctttctctggtttcttctcatatccctcactccttcctgtactgtgttcctattttattttcctttccattctttaaatgggcccctatccttcccacaacttggactttgccattctattcctgctgccagaagctcctcctccagattcctctccctttcctggttaactattatttctccagctctcagcaattaaagcaattttttca

SEQ ID NO: 722930 - DNA, 664 bp, Homo sapiens
caatccacctgcctcagccttccaaaagtgctgggattacaggcgtgagccaccacatccggccagtgcactcttaatacacagaaaaatatatttcacatccttctcctgctctctttcaattcctcacttcacaccagtacacaagccattctaaatacttagccagtttccagccttccagatgatctttgccctctgggtcttgacccattaagagccccatagaactcttgatttttcctgtccatctttatggatttttctggatctatattttcttcaattattctttcattttataatgcaactttttcataggaagtccggatgggaatattcacattaatcatttttgcagagactttgctagatcctctcatattttgtcttcctcagggtggcaggggtacagagagtgcctgattggaaaaaaaaaaaaaagagagagagagagaagaagaagaagaagagacacaaatctctacctcccatgttaagctttgcaggacagggaaagaaagggtatgagacacggctaggggtaaactcttagtccaaaacccaarcatgcaataaataaaactcccttatttgacagcttgattcctaacctcctgcttttttttctgctagggtgaaagaagcttaatctcagtttttt

SEQ ID NO: 722931 - DNA, 3831 bp, Homo sapiens
tgcatcctggtcctattctgcttcctctgtcttttgtatttcatgggaatcatcctcaaaacaattgcatgcactcccaattttgtttgcttaaccctaaccctcaccctaaccctaacggatacaatgttttgtattaataattgtcaaattttctgaggagaaatagtgctgggaaatgttgggcttgcctcaattttagtttatctttttaaggctagtcaagtgaagctgtgggagtggagaaggaacaaagaaatctgtaactggttgtgatcaattaggtgtaaacaccactgcactcagaccagcagagcgctcacctcaattttatgtggattctttaaggatgttggctgtttagccttgcctatcttaactatttcctgatgcctgcccacagatgttttgtatgtacatattgtatagttgtccttagtgggaggatagcctaaaaccagttattccaccatagctagaagtgaaaatccttcccaccagggcttgagacctcttcttgttaacttgagttggtattcagcagccaatcttaggagctccctcttaaattgatgtaggaattttaaaaacggatatccttgtagtctatgacagttgaagaaatctttaagtagaaagtagaccttccttcccaaagggaagccttggctcaaataccactatattaatttattttagaactcatattcctcatccataaagctattttccctaaattccaagaatctctttctctactgaactttcactcattaattcattttactcagtgctatggtctgaatgtttttgtctcccccaaattcctaagttgacacctaatcaccaatgtgatggtgttaggagatgggacctttgagagaagattagatcgtgagggtggggccctcatgaatgtgattagtgcctttataaagactccatggagattcctcacccctgccatcatgtaaggacacagggagaaggtgctgtctatgagccagaaagcaggccctcaccagacaccacatctgcgttgaccttgaacatccaagcctccagaactgtgaaaaataaatttctgttgcttataagctacacaactaacagtattttgttatagctgcccaaatagactaagacactatggaaatatttactgagtatctacactggcttggactctccactgggaaagacataagcctcatgagtgagtccctgccttgactagctcacagtctagtgaagaaaacataaaggttgacatcgtaacacacaaagtcctggaacagagttgggattaccaatgcattggctactgatgcagtggaataggggtgagggatttgaggaaactttggactacttaaatgcagtaccgacagcatggcttggtactgtttactatgaatattccaaatataagttggagaccacacaagaagtggggacatcctgcactatctacagtaagccaatcagcatagcacagctccactcaacccacaagtgtcatgtgtgtgtctgagcctgaagtccttcatgtcactctacacgtgtgactcctggcagcaggctgctcagctgtgggcttgcctacctgggcactgagccctggggtgccctccagcaacactgcagtccccagggggtgctgggctttgacaaggcaacatcggcaacatctgaaacttgatttttataaaacatattcttttgctcataattcccctttaaaggagatgcacagatagttaaaccagggagatcagcattctcttcttttatcctggaattcattgttcttcagataaaaagaaatgggccactgaatatgagcagaattgcttgccgtattacgattgtgagcagagtctagtcagactgcctgggttccagagtgggttccagactctaccacttcctagccctgtgtcttcaggcaattactcccatgcctcagtttccttacctacaacatagcacttttaatagcacttatctcagagagctgccatgaagattaaattattataaagtggcagttagaatagtgcctggcacatctaaacactgaatggatgattgatactattaggactattattaatattactaagaaagagcatttatgtgcttggaggcattactgcaataataaccacttctaattaatagtcactgataaaaactatccagtgatagaattttcttaaatgcatgtggtattttctatgaaaaataaaggagtttgatttaagcaataggacattatacaattccaaaaactccctgcaagatccctctaaatgtcactttgctgaaccacgtcctcctccactcaccccactggctgtgtctcctgcttcagcaatcgagggcacatgtgcccacaacgcagcatcagagataatggccacataaaacctagatgtgcaaggatatcgtgaaagatttttggcaaagtcattgttcacattcactgaaaaacactagaactttcagaagtcacttgggggacagaacactcaagagactctttagacaaaagcggttcatatcctaccctgagccctggcagtggtagaagtttcatgctcagtccacccaaaatcttgaatgttggagtcatcaggaaaccgactgtctttagaggaaatcttataaggaatccccacataggaagcaggtaacagcagagacactcaggtagatttaagatagaatcctcggaatgtgtccctgtagtccacccacacttccaaactccaagactctcctgcgtattcaccccttggatattcaggggtacattttgaaaaccatgaagataattacttaaaagcctttcatcaaccataaaatgcgccttcacataaggtcttctgtgttataaatcatcgcagttgcattaccagtggtgttgttacctaatgtgacacaattagtggcatagccatatttttaaacrgcatagttctgactatgtcaattatcaaatggatggctattggaggtcgcaacttactttttgagactcaagagaagaaagaattgcttggcttatgcctctggtgccaatcgtcccctctgtcactctgctgcagcgagcacctttgctgctttaagttggtgaatgaataaatccaaattgtgtgaatattagtgtgtccgggatgaacaacacaggaattgagacaagagcctatccagtggatattctaggaaagttgggagtttcccaggaaaaagccttacagccaggaacttctctactcagatttacagattaagtatctgggtagagacacagtcaggaattttaacgtttgcctacaataaaccaaaaataaaatcaccctgtaaccccaacactttgggaggccaaggcaggtggatcacctgaggtcaggagttcaagaccagcctgaccaacatggtgaaaccctgtctctattaaaaatacaaaaattggccgggcatggtggcgggcgcctgtagtcccagcttctccagaggctgaggcaggagaatcacttgaacccgggaggcggaggttgcagtgagccaagatcacaccactgcactccagctctgggagacagagagagactccatctcaaataaataaataaataataaataaaataaataaataacaattccagaaatggtatttctaatttttcaaaagcagttccaatcatgtgtcataagacaggttcactaagaatcagcccccagaagttctgacctttgctactgcagtggccttgaggctactccacactcgcatggcgccctcagcctggccagcacccctgc

SEQ ID NO: 722932 - DNA, 3831 bp, Homo sapiens
tgcatcctggtcctattctgcttcctctgtcttttgtatttcatgggaatcatcctcaaaacaattgcatgcactcccaattttgtttgcttaaccctaaccctcaccctaaccctaacggatacaatgttttgtattaataattgtcaaattttctgaggagaaatagtgctgggaaatgttgggcttgcctcaattttagtttatctttttaaggctagtcaagtgaagctgtgggagtggagaaggaacaaagaaatctgtaactggttgtgatcaattaggtgtaaacaccactgcactcagaccagcagagcgctcacctcaattttatgtggattctttaaggatgttggctgtttagccttgcctatcttaactatttcctgatgcctgcccacagatgttttgtatgtacatattgtatagttgtccttagtgggaggatagcctaaaaccagttattccaccatagctagaagtgaaaatccttcccaccagggcttgagacctcttcttgttaacttgagttggtattcagcagccaatcttaggagctccctcttaaattgatgtaggaattttaaaaacggatatccttgtagtctatgacagttgaagaaatctttaagtagaaagtagaccttccttcccaaagggaagccttggctcaaataccactatattaatttattttagaactcatattcctcatccataaagctattttccctaaattccaagaatctctttctctactgaactttcactcattaattcattttactcagtgctatggtctgaatgtttttgtctcccccaaattcctaagttgacacctaatcaccaatgtgatggtgttaggagatgggacctttgagagaagattagatcgtgagggtggggccctcatgaatgtgattagtgcctttataaagactccatggagattcctcacccctgccatcatgtaaggacacagggagaaggtgctgtctatgagccagaaagcaggccctcaccagacaccacatctgcgttgaccttgaacatccaagcctccagaactgtgaaaaataaatttctgttgcttataagctacacaactaacagtattttgttatagctgcccaaatagactaagacactatggaaatatttactgagtatctacactggcttggactctccactgggaaagacataagcctcatgagtgagtccctgccttgactagctcacagtctagtgaagaaaacataaaggttgacatcgtaacacacaaagtcctggaacagagttgggattaccaatgcattggctactgatgcagtggaataggggtgagggatttgaggaaactttggactacttaaatgcagtaccgacagcatggcttggtactgtttactatgaatattccaaatataagttggagaccacacaagaagtggggacatcctgcactatctacagtaagccaatcagcatagcacagctccactcaacccacaagtgtcatgtgtgtgtctgagcctgaagtccttcatgtcactctacacgtgtgactcctggcagcaggctgctcagctgtgggcttgcctacctgggcactgagccctggggtgccctccagcaacactgcagtccccagggggtgctgggctttgacaaggcaacatcggcaacatctgaaacttgatttttataaaacatattcttttgctcataattcccctttaaaggagatgcacagatagttaaaccagggagatcagcattctcttcttttatcctggaattcattgttcttcagataaaaagaaatgggccactgaatatgagcagaattgcttgccgtattacgattgtgagcagagtctagtcagactgcctgggttccagagtgggttccagactctaccacttcctagccctgtgtcttcaggcaattactcccatgcctcagtttccttacctacaacatagcacttttaatagcacttatctcagagagctgccatgaagattaaattattataaagtggcagttagaatagtgcctggcacatctaaacactgaatggatgattgatactattaggactattattaatattactaagaaagagcatttatgtgcttggaggcattactgcaataataaccacttctaattaatagtcactgataaaaactatccagtgatagaattttcttaaatgcatgtggtattttctatgaaaaataaaggagtttgatttaagcaataggacattatacaattccaaaaactccctgcaagatccctctaaatgtcactttgctgaaccacgtcctcctccactcaccccactggctgtgtctcctgcttcagcaatcgagggcacatgtgcccacaacgcagcatcagagataatggccacataaaacctagatgtgcaaggatatcgtgaaagatttttggcaaagtcattgttcacattcactgaaaaacactagaactttcagaagtcacttgggggacagaacactcaagagactctttagacaaaagcggttcatatcctaccctgagccctggcagtggtagaagtttcatgctcagtccacccaaaatcttgaatgttggagtcatcaggaaaccgactgtctttagaggaaatcttataaggaatccccacataggaagcaggtaacagcagagacactcaggtagatttaagatagaatcctcggaatgtgtccctgtagtccacccacacttccaaactccaagactctcctgcgtattcaccccttggatattcaggggtacattttgaaaaccatgaagataattacttaaaagcctttcatcaaccataaaatgcgccttcacataaggtcttctgtgttataaatcatcgcagttgcattaccagtggtgttgttacctaatgtgacacaattagtggcatagccatatttttaaacggcatagttctgactatgtcaattatcaaatggatggctattggaggtcgcaacttactttttgagmctcaagagaagaaagaattgcttggcttatgcctctggtgccaatcgtcccctctgtcactctgctgcagcgagcacctttgctgctttaagttggtgaatgaataaatccaaattgtgtgaatattagtgtgtccgggatgaacaacacaggaattgagacaagagcctatccagtggatattctaggaaagttgggagtttcccaggaaaaagccttacagccaggaacttctctactcagatttacagattaagtatctgggtagagacacagtcaggaattttaacgtttgcctacaataaaccaaaaataaaatcaccctgtaaccccaacactttgggaggccaaggcaggtggatcacctgaggtcaggagttcaagaccagcctgaccaacatggtgaaaccctgtctctattaaaaatacaaaaattggccgggcatggtggcgggcgcctgtagtcccagcttctccagaggctgaggcaggagaatcacttgaacccgggaggcggaggttgcagtgagccaagatcacaccactgcactccagctctgggagacagagagagactccatctcaaataaataaataaataataaataaaataaataaataacaattccagaaatggtatttctaatttttcaaaagcagttccaatcatgtgtcataagacaggttcactaagaatcagcccccagaagttctgacctttgctactgcagtggccttgaggctactccacactcgcatggcgccctcagcctggccagcacccctgc

SEQ ID NO: 722933 - DNA, 1629 bp, Homo sapiens
aggggcatggagtcaccagtttctaggcccagttagaaagccccctgtgttaaaatccccccttggcttttctctcccaactcagtggatcattcattccagaaatgtttgttgataactcgcgatgtaactcagcattgtatgcgaagccccacagaagtgtcagagatgaagaaacattttcatcgtacaggagctcaggactccttgaatagctgaagcaaacacacgaagcgctttccccaaggtgcagttgtgctagtggattttctctgtggctttccagggttcccctgagtgcccactgcagtgacagttacggacccaccttagtcaatacgaccccaagagctgggtgtggcagagaacgcgccggagtcagagacagaakacctgggttggaacacaagttccaccacgagctgcataaataggaacagaccacaggatcctctaacctcgaggtcctcaaatgcaacatgcagtccagttcacagcctcgaaccccgaagcccaacctcgacaccctaagcactgaacattctcactcattcggtgaatcctcttctgaactgacacggaactatttttagtctttatttattccacttaatgtgaatattcaggtttctttgcagaagaattcatgtgcttgattcgggggcactccagattctctgggtttgttgcataatcctcactgtgtgcactttatcacctttctaaaatcacagccactctgaattctgaaacacttctggtcccaagggtttcaaatgtagaaggaagagtgaaccccactggaggtagcttttgtcttccatcaacagaacaggtttccttcacccgaggccctgtctgtctctgagtctccaatgcctgccccgcctgcaggtgaaataaatggtcctgattcccccatgttcagcatctgagctccttccatcgtgaggctacagacagaacaaggaaacatcgaaggattaaaacattcactaatgaacttaacgcttaaaatatgtagcctccattcttctatccatgaggtcaaattctcccctggccagtgagtcagtgatggtctgaggttgcaaacacccaagaacacagggcaaaggcaacaggagtcagttccaaggagacgctgagagcgtgacacaacatgtcagattccaagtcagtgaaagggacgtagaactctccacgttctaagcaaatggacacagctcacaaatgaagatatggcagagtttgacttatgaacaacaggagagaagacatttaaaagatagttataaaatatgcactcagaagagattgatttaagaagttttagagaacctcttggtaaaattgatgctactcttgattttcttgttgtatgttaaaaaaaagattctctttagatgatgtcaggaaattcaaatgtgaagtatgggatactatataatgctaccttacaactttatccagaagattatgacatggctagtcaacacttcgttcatttattactttaaaaattagcacataattacaatgatagcatgttttgttgactagaagaaaggaatatattttcatatttttagcttcctatttttcctagacaaatttccaatcgactct

SEQ ID NO: 722934 - DNA, 1187 bp, Homo sapiens
tctaggttttgtctattatgaatagtgttgccatgaacattctcatgcatattttcagttggacatttgtaagcatttctgttcgtgtatacctaaaagggtaattgtggagtcctggggtaaaaatgttcagctttagtagatactgccagcataattttccaaaagtagttacatttttataaatttttaaatttcatgaagttcaaaactgccctatgagataggtattattccccccccccttttttttgatgaagaaagactcaagagagttgcccaaggttaaatagctataggaatgagagtctgggtttmaattcagctgtgcctgcctccaaagcccatgttctctctcactagcctgaactacttttatatctttgagagaattcatgccttaacctccctcactacatgcagtagagcctttgctgttgtattaagatagatagtgctgactatgtgagcttgccctaatggtgtggtgtctggaggggtacagtttaattgagggagcacatttctgaggttcttgtataagaacaagcctctgtccacctgcaaaacacacaagaagagaaacaagcccatatcctatgcctttgttcaagtgcatgggcaaatgggtgtggagagcattgatggcaaaggtgggtaagacatgaggctcaggttacagggagttctgggtgtaggtggccatatgagatggaagcttctgctagtttgtcagtgacaacagttttttatggtccagtattaggagtgtatgagtcaggactcttggtcacaacccaactcaaacttgctaaaggaaaaaaagttttggttcatgaaatggaagtcacaggattcattgggctttaggtctggctagatctaggtgttaacaccactagaaatctgtttgtatctatttcttggctctgatttcttccttgttgttttcattattagacaaaatcctctccaatggtggagatggatcatactccaccagtaatgatggtgtctgtcaagtttgagcttcactctaataatttgttgatgtggtaagaagagagaggggatccttttcacgataattccagtgaaagtcccggcattaactcaaattcaacttcaagtctgggtgagagacccatcttgaaactaatcactgtggccaagagattggaatgtcc

SEQ ID NO: 722935 - DNA, 1187 bp, Homo sapiens
tctaggttttgtctattatgaatagtgttgccatgaacattctcatgcatattttcagttggacatttgtaagcatttctgttcgtgtatacctaaaagggtaattgtggagtcctggggtaaaaatgttcagctttagtagatactgccagcataattttccaaaagtagttacatttttataaatttttaaatttcatgaagttcaaaactgccctatgagataggtattattccccccccccttttttttgatgaagaaagactcaagagagttgcccaaggttaaatagctataggaatgagagtctgggtttaaattcagctgtgcctgcctccaaagcccatgttctctctcactagcctgaactacttttatatctttgrgagaattcatgccttaacctccctcactacatgcagtagagcctttgctgttgtattaagatagatagtgctgactatgtgagcttgccctaatggtgtggtgtctggaggggtacagtttaattgagggagcacatttctgaggttcttgtataagaacaagcctctgtccacctgcaaaacacacaagaagagaaacaagcccatatcctatgcctttgttcaagtgcatgggcaaatgggtgtggagagcattgatggcaaaggtgggtaagacatgaggctcaggttacagggagttctgggtgtaggtggccatatgagatggaagcttctgctagtttgtcagtgacaacagttttttatggtccagtattaggagtgtatgagtcaggactcttggtcacaacccaactcaaacttgctaaaggaaaaaaagttttggttcatgaaatggaagtcacaggattcattgggctttaggtctggctagatctaggtgttaacaccactagaaatctgtttgtatctatttcttggctctgatttcttccttgttgttttcattattagacaaaatcctctccaatggtggagatggatcatactccaccagtaatgatggtgtctgtcaagtttgagcttcactctaataatttgttgatgtggtaagaagagagaggggatccttttcacgataattccagtgaaagtcccggcattaactcaaattcaacttcaagtctgggtgagagacccatcttgaaactaatcactgtggccaagagattggaatgtcc

SEQ ID NO: 722936 - DNA, 873 bp, Homo sapiens
taaaaacacattattcttcaattggccttttagagaaaaaaaagagagagggaagggaggggttaatttggtgagggggcttggtcgtaattagcccactgctgcaaaagtgagatacagaaatccatcggcaccagctttgggggcatggagaggcagcggagagatgggggacgggttgtcagtctgggyattgtgtgtgcttgtgtctctgtgtgtgtgtgaaattttttcatcccaccaccaatctcccctccatcctcccccaattctgccatgatcttgccttctatttccacacactgctccccccaccctaggcgcacccccccttcctccagccctttccatcttcatgaaaaaaattctgattttgatggctctgcggctcttttttccctttttccttgcttttttttttttttttttttgcaacacaacagtcgtgcgatggcctttcctacatgccacacggatgcagccttctgataggagggcaaagtcggcacatccacacacacactggcatacgctcttgcacacacagtctctgtcacatacacaggcgccaagggcttcattttgcttggtttcattccccttaacctctttccccactctacctccaccatggctccttccccccatctttgcatggggactgcggtcacgttagagcctcttttcctctccgcaaccgcggtcttctttcttctcgccattattctttccctaaagctgtcgtgtgtcgcagttcatgggattagcatgttggagagtctttgtgggaggggacctcacaagcaggggattggaatgggggtagataacattaataattttttttgaccaaataagcacccagtgataatg

SEQ ID NO: 722937 - DNA, 1293 bp, Homo sapiens
tttttacatacaggactagaactatgccaaattgagacttgaggagggaaaacaaaagaaataaggatggaatttgttttgatccttgcttctgttcgccccctcacttcacactgaggaatggggtgggaaagaaccagagggaggggagatcgggagcagatgtccttattcataagtagaaaagtggaaccaaaatcactggcttcattcctgtgatctcttggtgtttccagtgagccatctggtcaatattttttgatatttccgtctgtggtaattcaaagtgatgacaatcagagtcactaacgttatgtagcattgtacttagttcagtgctttacaagcatttaatctcatttaattctcataacacccccatgagggaggctctgatatcattctcattttatagccaaggaagatgactcttagaagttaaatgatgggtccaaggccacagagaggctgggatttgaacccagacctgtccgcctctgaaatttaagattgtaatcacatccccaaatgggcaagtaaccagtatcgaaaaacctttggagttccaaggaattctgtctccctgtgacttggtgtccccaaggagcctatttgtatgaacaatggtgttgacattcttctgccacagaactcggccacatgtaaatagtttgatatcctgtttaattaaggggtattttaacatctattccaggcaatccatcagtaacagttaatggacccgcctagttatttatacaacactttttccctttccacctcttctcttcttcctgcyattcatccctaaatctaacacactagaaaacctgaaggggcggtgtggctgaggcatgattcagagctttctagaagtttctttgggcagatacagcttctaggggaggcaaggtgggggctagagaagtgctcagctgttgctatgggtatgttcattctggggcacagcttagttggtcagcacctggatttcctggggcaagggccctaaggacacactggagctttacaaatctgattgcaggtgtttcattatcggttggcatgaagaacattacccatcctgttcaggcagcaaattagaggcacagagaataaaccatgacccactcatagggcaggtgggagacgctcacccagcttccccatggcttcagcatgatcactttaatctgcaaaccaaattcaggtcctgtatgctcttgagggacctaggcttcagttgaatgaatgatggactaggtggtatgcaagagatctaggatattttct

SEQ ID NO: 722938 - DNA, 1293 bp, Homo sapiens
tttttacatacaggactagaactatgccaaattgagacttgaggagggaaaacaaaagaaataaggatggaatttgttttgatccttgcttctgttcgccccctcacttcacactgaggaatggggtgggaaagaaccagagggaggggagatcgggagcagatgtccttattcataagtagaaaagtggaaccaaaatcactggcttcattcctgtgatctcttggtgtttccagtgagccatctggtcaatattttttgatatttccgtctgtggtaattcaaagtgatgacaatcagagtcactaacgttatgtagcattgtacttagttcagtgctttacaagcatttaatctcatttaattctcataacacccccatgagggaggctctgatatcattctcattttatagccaaggaagatgactcttagaagttaaatgatgggtccaaggccacagagaggctgggatttgaacccagacctgtccgcctctgaaatttaagattgtaatcacatccccaaatgggcaagtaaccagtatcgaaaaacctttggagttccaaggaattctgtctccctgtgacttggtgtccccaaggagcctatttgtatgaacaatggtgttgacattcttctgccacagaactcggccacatgtaaatagtttgatatcctgtttaattaaggggtattttaacatctattccaggcaatccatcagtaacagttaatggacccgcctagttatttatacaacactttttccctttccacctcttctcttcttcctgccattcatccctaaatctaacacactagaaaacctgaaggggcggtgtggctgaggcatgattcagagctttctagaagtttctttgggcagatacagcttctaggggaggcarggtgggggctagagaagtgctcagctgttgctatgggtatgttcattctggggcacagcttagttggtcagcacctggatttcctggggcaagggccctaaggacacactggagctttacaaatctgattgcaggtgtttcattatcggttggcatgaagaacattacccatcctgttcaggcagcaaattagaggcacagagaataaaccatgacccactcatagggcaggtgggagacgctcacccagcttccccatggcttcagcatgatcactttaatctgcaaaccaaattcaggtcctgtatgctcttgagggacctaggcttcagttgaatgaatgatggactaggtggtatgcaagagatctaggatattttct

SEQ ID NO: 722939 - DNA, 655 bp, Homo sapiens
cttccttccttccttccttccttccttccttccttccttccttcctttctctytctttctttctttcttttctttttatttttttttgagacagggtcttgctctgtcacccaggctggagtgcagtggcatgatctcagctcactgcaacctttgcctcttgggttcaagcaattcttctgcctcagcctcctgagtacctgggattacaggcgcttaccagctaatttttgtatttttagtagagaccctgttggccaggctggttttgaactcttgacctaagttgatccgcccacctcagcctcccaaagtgctgggattacaggcatgagtcactgcacccagcttgtatgtgtattttgtattaaacaaaacccttcagagttacttacattagtgtttctcaaattcgtgagaatcacccagggaacttgtgaaactatagactttagttcctgcctcagaactgtaggacctgcagctctaaattattctatgatcaggtaaatttgagacacgctgtgttacagcaaattccaaggaataaaatgaaccgaaaggaagtgtatgagactttaatagaagtattttgttgtattttaaatatttaaaacaagctgcgtttatgtataccaaatctatttgttatacg

SEQ ID NO: 722940 - DNA, 1462 bp, Homo sapiens
agggctgtgggcgtgtgtgtgtgttgtgtgtccctgtgtgtggatgtggagggctgtggggatgtgtgtgtgtgttgtgtgtccctgtgtgtggatgtgggagggctgtgggcgtgtgtgtgtgttgtgtgtccctgtgcatggatgtggraggtttggggcatgcgcgtgcatgttgtgtgtgcctgtggtgtgtgtgggtgcctgggcacatgaacaagcacctgtgagagacctggcccacctgtgaccctgtcggctggtcccccaggggagctgtcttcccagcttccggaaagactctccttggtgatcggctccatcctgggggctttggccttcctcctgctggcagccatcaccgtgctggcggtcgtcttccagcggtgagtccccacccctgcccaactctgcccagcaccattaactccacagccaaacctcaagtcctgccaagtctggagccccctgcagaaacctcacactggtgctcctcccgtcagccagcccctgccctgggccccacgtggagatgggcaggagggccaggctgtcgtcccccctccacagaccgactaaagagcagtctggagggtgacaagggggcagcaagggggtggaaatgggagcgtcatccccagtcaccgttttgttcctcaggaagcggcgtgggactggctacacggagcagctgcagcaatacagcagcccaggtggggatgaggagaggaaatgggtggggctggggaacacatgggtggggcacatggcaggcaaggctggatccccccaagattgggggagctccttggcacaaccttctggaggtaagtgggcatgtctggggtgcgcgggcagccctgcctttcacaacacgctcataacatactccacacccctccaggactcggggtgaagtattacatcgacccctccacctacgaggacccctgtcaggccatccgagaacttgcccgggaagtcgatcctgcttatatcaagattgaggaggtcattgggacaggtacagcagggccaaagcagggatcagagcgacggggctcccttgtgccctccgctggccagagtcccatccaaacacagcaggacgctgtgagccttgatccccaccccaacctacacctattttcccaggctcttttggagaagtgcgccagggccgcctgcagccacggggacggagggagcagactgtggccatccaggccctgtgggccgggggcgccgaaagcctgcagatgaccttcctgggccgggccgcagtgctgggtcagttccagcaccccaacatcctgcggctggagggcgtggtcaccaagagccgacccctcatggtgctgacggagttcatggagcttggccccctggacagcttcctcagggtcagtccagcctgggtgaaggaggagggtccttgggtccaggaaagcttccaggagac

SEQ ID NO: 722941 - DNA, 648 bp, Homo sapiens
tgaatayttgctgtgtccaggtgccatctagttgtttttaacattatcacccttaaaataaagctacataatcctgagaggcagttgttatttgtcccacttaacaaatgaaggcattgaagcttggagagactaaattacttgcccagagtcacactgcacaggcagcatctgggtccaatctaatgctgactgactatgaagctcacgtgtttaatctacacactgtattatttcccatcatacagcaagagcagcagggatttgtgtcgcaactgtgcagacactgcagtttctctgaaatctattagttcttcttgttccccaggcactgttcttagtgttgtgtgtgtttaattcaactttatcctgataaagtccctatgctgtaggtgcttatgttgtcacctctaccccacagataagaaagctgagtcagagatgagtttgaggattctgcccatggtcaacaagattagtatttgagccaagctaccaagccaggagtctgactccaaagctttcagtggtagagaaaagtagaaattttagtatccaaaaagaaaaatcatggtttagataaggcaaggatgtgaatctagaaaaacactgagaaaacaagagaatactgtgtgcaacacagcagac

SEQ ID NO: 722942 - DNA, 1388 bp, Homo sapiens
ttatatttacataaaaaataaaatcatctctttggttgattatattaggaagcattggtctaggtaaatcgttccagttcaccatgagtccatagattcattcattcccacaatgaaaggtattcatagttcattaaggtcaactcattacatttgtggrtgaaaataatgagcactaaagttgttaagcaattttcctcacttgatcagtttctcatggtctgttcaagctcaaagaaaaggttgctgtataaactagactgtcaatttataaatttaaaattccataatgaaaaatattatttccactgattctggggatggactcttcagccagcacattattttcctggagtggagacgtgtagggagacaattgataattggaggtcattttgtaagttcgggtggttcagatgatttgttacattagcctggcttaatccgctatgaatacttgaacaaaaggaattctcctgcattaaatactacttatttattcatctgtttatctatacctctatagtacaccttttatattatctaattagatcacaatgacatcctcttaactatctagaggatgaatgtaaaatttaaaaattaggcccaaaaattatagaataatggagaacttgagttgaataagtggattgattttccagatgtgcccctgctttgaccttttgtgtgaccttaagatctttgggataaaatattgactacaaggaagattttatattaagagccttattctttttcctcttctcttctttctccctctgattttcatgtcctgcagttcaccctagccagttaaataaagccatcaccaatccacagaactatcctcttcactcccatattgaacaatggggtgtcacctcccctgggaagggggacagagtttgttgggatagccataatagataattatttcgtttacttatcccttctaactaagcctcaatgctcccacataattatatcactattcatcagattcactcttaattggctgtgtacctctaagcaatattcacacttcatatatccttacatctttattctttgatcctttaaaaatccatagtatctcttgactcttcacttcacaatatgatgatattggtatcctcaaactttcctttgtttcttttatttccttccatgcaataaatttgtcatctgcacttttactttcacattgtcaaggctgataatatttacattctattaagtagcataatcaagtattttcatgccttgtctataagttgattctaaaagttgaaacaaattgtgtttacattattaggacttcataaataactgttcagcacaaggccatacagatataattacagttactctcttttataatttga

SEQ ID NO: 722943 - DNA, 1388 bp, Homo sapiens
ttatatttacataaaaaataaaatcatctctttggttgattatattaggaagcattggtctaggtaaatcgttccagttcaccatgagtccatagattcattcattcccacaatgaaaggtattcatagttcattaaggtcaactcattacatttgtgggtgaaaataatgagcactaaagttgttaagcaattttcctcacttgatcagtttctcatggtctgttcaagctcaaagaaaaggttgctgtataaactagactgtcaatttataaatttaaaattccataatgaaaaatattatttccactgattctggggatggrctcttcagccagcacattattttcctggagtggagacgtgtagggagacaattgataattggaggtcattttgtaagttcgggtggttcagatgatttgttacattagcctggcttaatccgctatgaatacttgaacaaaaggaattctcctgcattaaatactacttatttattcatctgtttatctatacctctatagtacaccttttatattatctaattagatcacaatgacatcctcttaactatctagaggatgaatgtaaaatttaaaaattaggcccaaaaattatagaataatggagaacttgagttgaataagtggattgattttccagatgtgcccctgctttgaccttttgtgtgaccttaagatctttgggataaaatattgactacaaggaagattttatattaagagccttattctttttcctcttctcttctttctccctctgattttcatgtcctgcagttcaccctagccagttaaataaagccatcaccaatccacagaactatcctcttcactcccatattgaacaatggggtgtcacctcccctgggaagggggacagagtttgttgggatagccataatagataattatttcgtttacttatcccttctaactaagcctcaatgctcccacataattatatcactattcatcagattcactcttaattggctgtgtacctctaagcaatattcacacttcatatatccttacatctttattctttgatcctttaaaaatccatagtatctcttgactcttcacttcacaatatgatgatattggtatcctcaaactttcctttgtttcttttatttccttccatgcaataaatttgtcatctgcacttttactttcacattgtcaaggctgataatatttacattctattaagtagcataatcaagtattttcatgccttgtctataagttgattctaaaagttgaaacaaattgtgtttacattattaggacttcataaataactgttcagcacaaggccatacagatataattacagttactctcttttataatttga

SEQ ID NO: 722944 - DNA, 659 bp, Homo sapiens
tgttgagtcttaggagttcattatatattctggatattaattccttagcagatatataatttgaaattattttctcctatttgttaggtcrtgtttttgctttcttaataatatcctttgatgcacaaaatttttttaatcttgatgaagttcaatttatctactttttgttttgtggcctgtgcttttggtataatattcataaaagtgttgctaaatccaatctattgaggatttttcctaatgctttcttctaagagttttatagttttagctctgaagttcaggttttttttatccattttgagttcatttctgtatatgctataaaataagggtcaaactttggtcttttgcatgtggatatccagttttccctggaaaaaaattgttgaaaagattgtcctttgccactgaatagtcttggcacacttgtagaaaatcaattgaccgtgtatgtgatggctaacttctgggctgaaaactgatgttttaaggatggactggagttaaattagtctggcatttaaagtctgtttggggtaattcggagttattcaatttactctggttttccagcagcataatatagggtgacactaaatccattcttcttcctcatcctgcaaccaatgtgagtcataaatatgccagttttt

SEQ ID NO: 722945 - DNA, 659 bp, Homo sapiens
tgttgagtcttaggagttcattatatattctggatattaattccttagcagatatataatttgaaattattttctcctatttgttaggtcatgtttttgctttcttaataatatcctttgatgcacaaaatttttttaatcttgatgaagttcaatttatctactttttgttttgtggcctgtgcttttggtataatattcataaaagtgttgctaaatccaatctattgaggatttttcctaatgctttcttctaagagttttatagttttagctctgaagttcaggttttttttatccattttgagttcatttctgtatatgctataaaataagggtcaaactttggtcttttgcatgtggatatccagttttccctggaaaaaaaytgttgaaaagattgtcctttgccactgaatagtcttggcacacttgtagaaaatcaattgaccgtgtatgtgatggctaacttctgggctgaaaactgatgttttaaggatggactggagttaaattagtctggcatttaaagtctgtttggggtaattcggagttattcaatttactctggttttccagcagcataatatagggtgacactaaatccattcttcttcctcatcctgcaaccaatgtgagtcataaatatgccagttttt

SEQ ID NO: 722946 - DNA, 659 bp, Homo sapiens
tgttgagtcttaggagttcattatatattctggatattaattccttagcagatatataatttgaaattattttctcctatttgttaggtcatgtttttgctttcttaataatatcctttgatgcacaaaatttttttaatcttgatgaagttcaatttatctactttttgttttgtggcctgtgcttttggtataatattcataaaagtgttgctaaatccaatctattgaggatttttcctaatgctttcttctaagagttttatagttttagctctgaagttcaggttttttttatccattttgagttcatttctgtatatgctataaaataagggtcaaactttggtcttttgcatgtggatatccagttttccctggaaaaaaattgttgaaaagattgtcctttgccactgaatagtcttggcacacttgtagaaaatcaattgaccgtgtatgtgatggctaacttctgggctgawaactgatgttttaaggatggactggagttaaattagtctggcatttaaagtctgtttggggtaattcggagttattcaatttactctggttttccagcagcataatatagggtgacactaaatccattcttcttcctcatcctgcaaccaatgtgagtcataaatatgccagttttt

SEQ ID NO: 722947 - DNA, 659 bp, Homo sapiens
tgttgagtcttaggagttcattatatattctggatattaattccttagcagatatataatttgaaattattttctcctatttgttaggtcatgtttttgctttcttaataatatcctttgatgcacaaaatttttttaatcttgatgaagttcaatttatctactttttgttttgtggcctgtgcttttggtataatattcataaaagtgttgctaaatccaatctattgaggatttttcctaatgctttcttctaagagttttatagttttagctctgaagttcaggttttttttatccattttgagttcatttctgtatatgctataaaataagggtcaaactttggtcttttgcatgtggatatccagttttccctggaaaaaaattgttgaaaagattgtcctttgccactgaatagtcttggcacacttgtagaaaatcaattgaccgtgtatgtgatggctaacttctgggctgaaaactgatgttttaaggatggactggagttaaattagtctggcatttaaagtctgtttggggtaattckgagttattcaatttactctggttttccagcagcataatatagggtgacactaaatccattcttcttcctcatcctgcaaccaatgtgagtcataaatatgccagttttt

SEQ ID NO: 722948 - DNA, 625 bp, Homo sapiens
ttgttctggaatattatgcttattaagaccttgtacttggtttgacatctgtcactttaattatgctttctgtattttaaggctttcttgttatcttttacctattttgcttttggatgaaggaaccatgtccatttgcttgtatcttttatccatgacttgtgaggctaacaccctattttaaagataatctttcatgattatcttagaacattaaaattcttttacctaattatgtctgcaataactattgacttcctctgatggatgtcaaggaatttttcactgatgacatccctgtctttgctatttctcttttatattttgcattatgacaacctggatatttaaaatattcttttaaaaacagactttgttattatacttacatatgatattttacttttgtcrtcataattaccctcaattacttaattttcctcttactattgattcatgatttgcaagtttgtattttgttttgtgttttatttatcctacaattttagatagtttaagtgattataaccactttttctcaatcacatcttccctaatgaagaatgcaattgattattcatctcctaattgttcagagcacatttgtaatgcatcttgctggaaa

SEQ ID NO: 722949 - DNA, 2393 bp, Homo sapiens
ccacacggccacatcctcgcccagccccgcctccgcttagctccgccccgtcgcggctccgccccgcggtaaccacgcccacacaaccgtatccccgcccacagctggcttcgccttggccccgcccacaaccctctttccaagcggcggcggcggcggcggcgcgaaggcgacagcggcggcgggggcggggctggcctcacccggaatgaaaacaaacggcggccgctgccgcatccgggcactctgctggtcgcggcgggagtggcgtggcgcaggtgaggacacggcggccgagtgtcctcgaccccagcctcagcagcactgcttggcgccccggttcccggtccgactgggcacctctcctggccaggggtggagcggccgcggggcgggggtgagcagccatgcgtggagctgggccggggccggggccggggccgggagcggtgggccgggcttcgggacgcgctggccgttcggggccctttggtttgccctgagttaggcagaggtgtggggtatttaaaagaaaatattgagtgtatcggtttggggagagaaaggaataaatatgtctataaaaaattagccaaatgctatacttgaatcgtaacactccgagtataccatttgggatttatttgcaatcaaagccagattttctttgctatttaatgacaagacacttgattttctcgaaccttgacgacctgattctatcattctcacctccttcccttttatttttaatcaagaatctttcattttcctaagaaaaaatgaatgtgtcttgactagatatagttgtgtttcaactatatataatgtatacttgaaaaggtgtggctaaatgtagcaatgatcgattcattacaaaagtgaaagtgaaatttttaaaggatcgttataacgtttcactttctgcttggaccacggagtgatattaatgagtttcgtcttttcttagttacaatgtgaaacattgtatggcatgcatgaaactttttcagttctcatttcagttaaaattaaaaactgacttattaaacttgacttaaaatatgtcgccacttactctgttgtctataactgaagttccttaagtttcaagacagtggtttaatttttttttaacattaaatcttattcggtgtaaccctggagctcttgtttgctccctggagtgtctgacacgcactgggtttgtaacactccttcgtccttctgtcaagtggtggcttggatggcatctttttaaaaattttttatttgtttatttttttagtagagacggggtttcaccatgttgaccaggctggtcttgaactcctgacctcaggtgatccactggcctcggcctcccaagtgctgggattacaggtgtgagccaccgcgcccggccttggatggcatctctgagtaccgcatcagcctttcaaattgcttggctccagtaaccagcctgtgaaattactgtcccccagtggggagacagtagggttgctgtgatattttattcagaatttctgaagattcatgagtagtatgtaaagtagtttttaaagttatttgtgtttgaaaagctaacgctctaagtactaatatgctttgctgtgataagccgtttgtcagtgcttgaaaaatggaggattctcccatgggccacccaggttgcacacagcagcctcattggctgtgttattccttcctctcttttctcctccctgtcctgattarcctaattcttgtccccgcactgacataaaatagatttgaactttcttttaaaaaatatttgtttatgaaatacacaagctaccaaagttttcaaagatttcaaagttgtgtgaattgggtttggggggatgtggaatactggccctcaatagaagaaagaaatttatcttggtaatattaactcatattttttccactctctagaacttgtcttcatcattcaggggctaataacatttttctttacttattgcttgtctgatttgggaaaccttaaagcgctgtgctacacctgccagctgccttacatctcagccgcctcactcacctttgaattgctgtgctagtatgggatgagtagacagctccatcgcggtacatacttctctgggagagagaagttacatacctggaacaggcaagcagcaagggactccatgacggaagttcagagtccagtgttgtgggtggaagttgtgctcgttaagatgctgcctaattttgtgtctttgcctgagtcatggtacaaactcagggccctaattttctcagctgtaaaatgatccgatcagtgttagatttgaatagtagggccaggcgcggtggctcaggcctgtaatcccagcactttgggaggccgaggcgggcggatc

SEQ ID NO: 722950 - DNA, 1019 bp, Homo sapiens
agggaatgagggcttcggcctggccagaagttgccccggggagaactagggtgctatgcccacctctcagtgaatgagaggttcctttccttggcctttttagatgacaagaggaaaatttcactatgtcccaccccgagagctaatatagcctaatatagctaatataaaactataaagttttaaatgtatcatatataatgatgacacatatgatatatttaaaactttataaagttttatatgctatatttaaaactttataaagttttatatgatatatttaaactttgggggcaaatagtagcctcgagtggctaacaggatttctgggatgaatttctgtggttctggaaaggcaacaaygttgacctgccatggaatgcagccccacttcccacctccttcccaattttgtctgtagtttcgtttttttttctttttgagatggggtctcactctatcacccaggttggagtgcagtggtgtgatctctgttcactgcaactctgccttccttgctcaagtgatcctcctacctcagcctccacaagtagctgggaccacaggcatgtgccaccacacctggttaattttatgtctttttggtagagatggagtttcaccatattggccaggctggtcttgaactcctgagcttaggcgatccacccgccttggcctcccaaagtgctgggattacaggcatgagacactgtgcctggccctactgcaatttccttttcccttgcttgatcttccaattcactactcatttaaaataactcttactcatagtcttattcagagtaagtcttagactcttactcaaagtcgacttgctttttggttgattaacaagcctacaacaaatatgtattgaagacctcctggatgtacagccatgcccacaactgtgagcaaggcagacgaagcccctgccttctcggagcttataatctagtggcagaatcatttcccaagcccacaatgcagacctaattctgtgttcttggtgt

SEQ ID NO: 722951 - DNA, 1527 bp, Homo sapiens
ctgggcgacagagcaagactccatctcagagaaaaaaaaaaaaaaagtatccatagctacttgccaccctactgcttttctccacatcatgctaatccatttgatattgtggacctttgaacagagacttctacaggtaacagcaccagggacagaacttgctatgctagcatgccagctcacttgaagctacaaaccttacaaacctcttttccctcctggccagatgaggccctcttacccctggtgagggccaggaaagcttccaggtggatttctgagaactatacatacccattattaatagagtacataaaagtactggatttgaactatcttctttttgtgcaatgagagtttgtggaatcttccatattttgcctgtacctcagcctctgtgtagtgatagaagcaggagtagaaaagtgttgtcactagtggcatgttgaggatggaggctttgcgggggtgctttcggaagatctcagtctgtcctgctgattctagatggcgatcatttgcctgtggtggagtgagccaagtgaaaaaaaaaaaaaacaatgtccatggagtagaggcaggagaaaaatcttttaatactacagcagttgtgtttcccaccctaggagagaaacaaagaacagaaaaagaaagaaattgcctaggatatccccagagtagtttaaaatccatcaaatgatcatgaatccacattggatggaaacaaatagaagtggggaggacatgggagattcgggatgaagaagaaatacttccaggttaacagctggtaagaggaaaaaggatcctaaaaacaatggaggaagggggctattgtgtacaggcagaaaatgaaaggcttttagaaaccagtaagaaatgacccacgtgcagagcatagaaatctcctagatgctgaacggcactgagccttggcactgaagcaaaagatatagagatgaagagtctaacctcaataatgatctgacgttccaggagcgtgtaatggtcctgtatgtgtgcggaatcttctgctgaaaatggcaaactggtagagtgccagaaggttagtacctttctctattcaaacaaggaaacaaacccaactaaaccaaatcgccagcataagtataagaggctcacggtgcctcacaagtctgatctcagttcacctttagagcgtcccttaaagaaagacatcgcrtgaatggcgtgaatttcatattaaaggttttgccaattcaagagggatcctgagagtccacaaaatacttatagtcactcataattttgctgataaatgaattagaatcctctcattttgagagttggaatatttggtgaatgagtcacaaagctaatgagtgagcctaggcaactgcccatcatccacatcccagtgaaattctgtggcttgtgcttaacttactgaggggacacctagatttgttagccatttttttatggcagagtacaaaaggtaaattaaattacatgccatggtggtatgtttatagatcagcaaat

SEQ ID NO: 722952 - DNA, 693 bp, Homo sapiens
tctactaaaaatacaaaaattagctgggcatggtggcgtacacctgtaatcccagctactcaggccgaggcaggagaattgcttgagcccagagatggaggttgcagtgagccgagatcttgccactgcactccagcctggccgacagagtaaggctctgtcttaaaaaaaaaaaaaacaacaaaaaaagagagattggctaggggccttagctccttgagggcagggacctgtcacattgatcgcggtatcagcacccaggtacttactattcaaaatgatcagcatacggatgatcatttgtctgcatctcagtttgcctcttttggtgcttctctaaaaaataaaaaaggaagagcttaaactcctacatgattcctgtctttgcgctggsaagaaggctctgggttcttttgttcttcaggacagtcccttgtaaagctcttgccatagttctgttccaggggcactgtcatatttatacctaacaaagctaaggggtgtctttacatttttagcttgttagcaggatgcttatatggccttgctgacccggtttaaaagttgcaatttgcaaaatacatactgaaaatactgcacttttacctatggaagttgtaatttatataaggaaattgtaatttatataatcctttaaaaaacttactcatacgaaataacagagaacgggga

SEQ ID NO: 722953 - DNA, 693 bp, Homo sapiens
tctactaaaaatacaaaaattagctgggcatggtggcgtacacctgtaatcccagctactcaggccgaggcaggagaattgcttgagcccagagatggaggttgcagtgagccgagatcttgccactgcactccagcctggccgacagagtaaggctctgtcttaaaaaaaaaaaaaacaacaaaaaaagagagattggctaggggccttagctccttgagggcagggacctgtcacattgatcgcggtatcagcacccaggtacttactattcaaaatgatcagcatacggatgatcatttgtctgcatctcagtttgcctcttttggtgcttctctaaaaaataaaaaaggaagagcttaaactcctacatgattcctgtctttgcgctgggaagaaggctctgggttcttttgttcttcaggacagtcccttgtaaagctcttgccatagttctgttccaggggcactgtcatatttatacctaacaaagctaaggggtgtctttacatttttagcttgttagcaggatgcttatatggccttgytgacccggtttaaaagttgcaatttgcaaaatacatactgaaaatactgcacttttacctatggaagttgtaatttatataaggaaattgtaatttatataatcctttaaaaaacttactcatacgaaataacagagaacgggga

SEQ ID NO: 722954 - DNA, 2139 bp, Homo sapiens
cctatagagaaaaaggacaaattgaggtatagcagactctcatagtcctagtatctagttctccagaaatcatcacaatggccaaccttggtcactttggagttcttgtgctccaaaagttttccagtaagtccccctggttctaatgacaaaggattccagacatccctgggcccagagagagagtcatagcaggagacctgagatactattttcctgcacaaaagcctcagactcctcagactattgcatcacagggatatcagacaggggatgatagcacctgttctcattctcctgttgattacaagatagatcaactacccatgttcaatcaccacaaagcccataggtgtaacaagggcttgggtaagagatcaactgcctcagacaccctttgaagacaacaggagctcttgaggttagagttaagaagtgacctcaggctgtctactcttcacatccctgatgactccaccctaaaagcggatcctcaaaacagcacttgataagttaaaaccagaggtkcaagcccagtatgcactttcaaattttcttgtaggcccttcagtttggcccaccacacttaaccccttcatccttcagatagggagacctgctatgagcaaggcatatggtaggtgttgagaaaaacaaaagttcatcatcagttttgcttagccaggaggatagtggacaacagcaatggcttctcagcatggcttcacttttgttctattctacagagttaaattgagtctctagagagacatatctcatctctcccttggcctttccatgaccttacatctgtggctctgctgtggtttgaatatataccccaaatttcatgtgttggaaactcaatccccctaattcatatgttggttatagatggggtttttggaagggtaaactaatcaaagggggtgctccatgatagaactggtggcttttatttttttaatttaatttaatttttctttttagagacaaggtcttgctatgttgcccaagctgatctcaaactcctggactcaagcagtcctcctgcatcagcttcccaaaatgcttggattacaggtgtaagccaccatgctcagcagactggtggctttatagtaagaggaagagagacttgaactgacacactcttgccctctcattttgtgatgccctctgccatgctattatgtggcaagaaggccctcaccagatgccagtctcttgatcttggacaccccaaccaccagatctgtgagctaaataaacctcttttccttatcaattcctcagtctcaggtattcagttatagcaacagaaaatgaactaagaaatgatctattcaaagtctgactaactaaaccttttaaggtattgacaattgcttttttgagaaggtcatcctgatcaaggtcaaggtgtgaggttgctcctccactcagcctacgcatcactgtatttggcagttggtctctagtaatcccctagcttcagtaaaggttttgcctatattatttttattgctgttgttgttgtttttatcaagggaagacgaaaaccttaaagaaactccaaaccccctactgtgccatctttgtatgagtcacttcattttccagttaaataatcaggtccagagacaggggcagagtaaagcagacctgagggacagagctggcccaaaccctgctcttttggctccagcctagtggtgctgctgctgtcaagacatttgggacaattcactcattttgtccctgtatagcaaagtctgggaaggagggtatactagtctgttctcacactgctgataaagacataaccaagactgggtaatttataaagaaaaagaggtttaatgaactcccagttccacattgctggggagacctcataatcatggcagaaggcaaaaggcacatcttacatggtgtcagacaagagaaaaaatgagagccaagagagaaaaagggaaacccattataaaaccatcagatcttgtgagacttattcactaccacaagaaaagtatgggggaaactgcccccatgattcaattatctcccactgggtccctcccacaacacataggaattatgggagctacaattcaagatgacatttgggtgaggaca

SEQ ID NO: 722955 - DNA, 2139 bp, Homo sapiens
cctatagagaaaaaggacaaattgaggtatagcagactctcatagtcctagtatctagttctccagaaatcatcacaatggccaaccttggtcactttggagttcttgtgctccaaaagttttccagtaagtccccctggttctaatgacaaaggattccagacatccctgggcccagagagagagtcatagcaggagacctgagatactattttcctgcacaaaagcctcagactcctcagactattgcatcacagggatatcagacaggggatgatagcacctgttctcattctcctgttgattacaagatagatcaactacccatgttcaatcaccacaaagcccataggtgtaacaagggcttgggtaagagatcaactgcctcagacaccctttgaagacaacaggagctcttgaggttagagttaagaagtgacctcaggctgtctactcttcacatccctgatgactccaccctaaaagcggatcctcaaaacagcacttgataagttaaaaccagaggttcaarcccagtatgcactttcaaattttcttgtaggcccttcagtttggcccaccacacttaaccccttcatccttcagatagggagacctgctatgagcaaggcatatggtaggtgttgagaaaaacaaaagttcatcatcagttttgcttagccaggaggatagtggacaacagcaatggcttctcagcatggcttcacttttgttctattctacagagttaaattgagtctctagagagacatatctcatctctcccttggcctttccatgaccttacatctgtggctctgctgtggtttgaatatataccccaaatttcatgtgttggaaactcaatccccctaattcatatgttggttatagatggggtttttggaagggtaaactaatcaaagggggtgctccatgatagaactggtggcttttatttttttaatttaatttaatttttctttttagagacaaggtcttgctatgttgcccaagctgatctcaaactcctggactcaagcagtcctcctgcatcagcttcccaaaatgcttggattacaggtgtaagccaccatgctcagcagactggtggctttatagtaagaggaagagagacttgaactgacacactcttgccctctcattttgtgatgccctctgccatgctattatgtggcaagaaggccctcaccagatgccagtctcttgatcttggacaccccaaccaccagatctgtgagctaaataaacctcttttccttatcaattcctcagtctcaggtattcagttatagcaacagaaaatgaactaagaaatgatctattcaaagtctgactaactaaaccttttaaggtattgacaattgcttttttgagaaggtcatcctgatcaaggtcaaggtgtgaggttgctcctccactcagcctacgcatcactgtatttggcagttggtctctagtaatcccctagcttcagtaaaggttttgcctatattatttttattgctgttgttgttgtttttatcaagggaagacgaaaaccttaaagaaactccaaaccccctactgtgccatctttgtatgagtcacttcattttccagttaaataatcaggtccagagacaggggcagagtaaagcagacctgagggacagagctggcccaaaccctgctcttttggctccagcctagtggtgctgctgctgtcaagacatttgggacaattcactcattttgtccctgtatagcaaagtctgggaaggagggtatactagtctgttctcacactgctgataaagacataaccaagactgggtaatttataaagaaaaagaggtttaatgaactcccagttccacattgctggggagacctcataatcatggcagaaggcaaaaggcacatcttacatggtgtcagacaagagaaaaaatgagagccaagagagaaaaagggaaacccattataaaaccatcagatcttgtgagacttattcactaccacaagaaaagtatgggggaaactgcccccatgattcaattatctcccactgggtccctcccacaacacataggaattatgggagctacaattcaagatgacatttgggtgaggaca

SEQ ID NO: 722956 - DNA, 422 bp, Homo sapiens
ggccaggatggtcttgatctcctgaccacgtgatccacccrcctcagcctcgcaaagtgctgggattacaggaatgagccaccatgcccggcctctttggagaattttataagtgccccttctaaaaacctcaatgctctgtctccctcagcccttgaacatttggttccaccagccaacatgattcctgcctctagaattggtgtttctactttgcctttctttagtcattgaatcctagttatatccaaactcaaacttagctcatgccctgtgtgcctcaccaaatagaaaccaatcccagtgtttcttccccatggaacataaccatgatctagccacttgaccacactacaatcaagaaaaccctatcctcttctcaatggggcattttgacacgggacaaagtggccgcagaaggt

SEQ ID NO: 722957 - DNA, 2022 bp, Homo sapiens
ccttaagagacaacactcactataggtaaatatttaattcccctaggtaagcccagcgctgcaataggtttatggtgggtacccactgtatggttgtggaatgaattaatgcacatgccatccacrctctcacctgtttctttgacttgggtttggcacctagaaggtcattgttgcccacataagaagattttccatgcagtaatagaagcagaagtcagacagcaaaaactaaggactgtgtgaaagatgagaaagtcaagtaaatgggcagacaacctactattctggaaagattaagtttttaagagacatacaaattttcttgatggcaattatttgaaaataaaagtcagagtgccccacgattttacaatgcaagtagattctccatatgccttctatccctcaaaagtataaaagacaagtagtcagtttgcttggcagcctgaaatctctttaaggacaaggaccagcttttatttattattgccattcctacagttcttaacttggcatttgttgcataataggtacaatgtttaaagtacatatgttgaataaattcacttatgaataacacaaataatatgctggctatttttacatattctacagtataagcaaggggagaggagtaaaactttaatagcaaaagatggaaattgggcaaaatgtatcacttggccacattttacacatgacatccccatgagataaacaaactgttggtggtaaatgacagtgagtgaatgaataaatgcaacattagatagaaaatattcaacatatgtacaatcttagttatgaggttattttaatgatcaaaggccttactggatattgaagtgtttgtttagtcgatgtgtgttcatcagcatgacacctacaactgttcgccaagcattttggggtgaatttatcagaacggactccaagccatctctaatgataaaatgcataaatatatccagaaggagaagcaggtcactttttcctacctcacattccctttcccaaaggaaactgattgccaaaaagtgccacctctctgcttatttttattattcagcagagagtggggaatatagtgccatctcatgcattaccattccagagacgtgatcagtaagtgcagtaattgctatgtggaagcaagaacagattgtcatgattccttaacctgggtagaaaacagtgcatgcatcttgtaatttgctttgtagattgctaaagtgattgacactgtgggttacagtgtataattttcccttttttgtgtgtaagactgcataattccaggcatgtttgccatcatatggcacgaggcattatcattcaccttgaatttttcctaaacttgtcttccagaaaaaaggacgaaaacaaggcagcaccctgtcttcccatggccatataaccacttttgaggagagaatgcaatgaaataagtaccatgagaaagggactaatctttctttaaatgacaagatcttccatagagactgcagcccagtgatagaaacttcttctacactgttcctgatgctttattttatttaccacagcagctaacactccactctgggaccagaatacaccagcagaaagatctataaagaatcattagagttttagacagatgtattcacaattctacaaaatacattctcaactggagttagttattagctggtaatcagctttggtagcaacatgtatcaaagctcaaggaacctcctcatactgatcactcaccatcttgtgccatctgggtagaaatgtacaaattcagattttacacatttataccgacaatgggctacactactagaaaaggtggtgggagagctactagcatcacctgaaatgtttcctatctgactgaaatattcaattatggctactccaataaagatacaagttctgggaaataactgttttcagaacgaagtcagttctctatcagtggtttgacaaggcagaatgactgattgtgaagagagtctttcagagaaatgg

SEQ ID NO: 722958 - DNA, 2022 bp, Homo sapiens
ccttaagagacaacactcactataggtaaatatttaattcccctaggtaagcccagcgctgcaataggtttatggtgggtacccactgtatggttgtggaatgaattaatgcacatgccatccacgctctcacctgtttctttgacttgggtttggcacctagaaggtcattgttgcccacataagaagattttccatgcagtaatagaagcagaagtcagacagcaaaaactaaggactgtgtgaaagatgagaaagtcaagtaaatgggcagacaacctactattctggaaagattaagtttttaagagacatacaaattttcttgatggcaattatttgaaaataaaagtcagagtgccccacgattttacaatgyaagtagattctccatatgccttctatccctcaaaagtataaaagacaagtagtcagtttgcttggcagcctgaaatctctttaaggacaaggaccagcttttatttattattgccattcctacagttcttaacttggcatttgttgcataataggtacaatgtttaaagtacatatgttgaataaattcacttatgaataacacaaataatatgctggctatttttacatattctacagtataagcaaggggagaggagtaaaactttaatagcaaaagatggaaattgggcaaaatgtatcacttggccacattttacacatgacatccccatgagataaacaaactgttggtggtaaatgacagtgagtgaatgaataaatgcaacattagatagaaaatattcaacatatgtacaatcttagttatgaggttattttaatgatcaaaggccttactggatattgaagtgtttgtttagtcgatgtgtgttcatcagcatgacacctacaactgttcgccaagcattttggggtgaatttatcagaacggactccaagccatctctaatgataaaatgcataaatatatccagaaggagaagcaggtcactttttcctacctcacattccctttcccaaaggaaactgattgccaaaaagtgccacctctctgcttatttttattattcagcagagagtggggaatatagtgccatctcatgcattaccattccagagacgtgatcagtaagtgcagtaattgctatgtggaagcaagaacagattgtcatgattccttaacctgggtagaaaacagtgcatgcatcttgtaatttgctttgtagattgctaaagtgattgacactgtgggttacagtgtataattttcccttttttgtgtgtaagactgcataattccaggcatgtttgccatcatatggcacgaggcattatcattcaccttgaatttttcctaaacttgtcttccagaaaaaaggacgaaaacaaggcagcaccctgtcttcccatggccatataaccacttttgaggagagaatgcaatgaaataagtaccatgagaaagggactaatctttctttaaatgacaagatcttccatagagactgcagcccagtgatagaaacttcttctacactgttcctgatgctttattttatttaccacagcagctaacactccactctgggaccagaatacaccagcagaaagatctataaagaatcattagagttttagacagatgtattcacaattctacaaaatacattctcaactggagttagttattagctggtaatcagctttggtagcaacatgtatcaaagctcaaggaacctcctcatactgatcactcaccatcttgtgccatctgggtagaaatgtacaaattcagattttacacatttataccgacaatgggctacactactagaaaaggtggtgggagagctactagcatcacctgaaatgtttcctatctgactgaaatattcaattatggctactccaataaagatacaagttctgggaaataactgttttcagaacgaagtcagttctctatcagtggtttgacaaggcagaatgactgattgtgaagagagtctttcagagaaatgg

SEQ ID NO: 722959 - DNA, 2022 bp, Homo sapiens
ccttaagagacaacactcactataggtaaatatttaattcccctaggtaagcccagcgctgcaataggtttatggtgggtacccactgtatggttgtggaatgaattaatgcacatgccatccacgctctcacctgtttctttgacttgggtttggcacctagaaggtcattgttgcccacataagaagattttccatgcagtaatagaagcagaagtcagacagcaaaaactaaggactgtgtgaaagatgagaaagtcaagtaaatgggcagacaacctactattctggaaagattaagtttttaagagacatacaaattttcttgatggcaattatttgaaaataaaagtcagagtgccccacgattttacaatgcaagtagattctccatatgccttctatccctcaaaagtataaaagacaagtagtcagtttgcttggcagcctgaaatctctttaaggacaaggaccagcttttatttattattgccattcctacagttcttaacttggcatttgttgcataataggtacaatgtttaaagtacatatgttgaataaattcacttatgaataacacaaataatatgctggctatttttacatattctacagtataagcaaggggagaggagtaaaactttaatagcaaaagatggaaattgggcaaaatgtatcacttggccacattttacacatgacatccccatgagataaacaaactgttggtggtaaatgacagtgagtgaatgaataaatgcaacattagatagaaaatattcaacatatgtacaatcttagttatgaggttattttaatgatcaaaggccttactggatattgaagtgtttgtttagtcgatgtgtgttcatcagcatgacacctacaactgttcgccaagcattttggggtgaatttatcagaacggactccaagccatctctaatgataaaatgcataaatrtatccagaaggagaagcaggtcactttttcctacctcacattccctttcccaaaggaaactgattgccaaaaagtgccacctctctgcttatttttattattcagcagagagtggggaatatagtgccatctcatgcattaccattccagagacgtgatcagtaagtgcagtaattgctatgtggaagcaagaacagattgtcatgattccttaacctgggtagaaaacagtgcatgcatcttgtaatttgctttgtagattgctaaagtgattgacactgtgggttacagtgtataattttcccttttttgtgtgtaagactgcataattccaggcatgtttgccatcatatggcacgaggcattatcattcaccttgaatttttcctaaacttgtcttccagaaaaaaggacgaaaacaaggcagcaccctgtcttcccatggccatataaccacttttgaggagagaatgcaatgaaataagtaccatgagaaagggactaatctttctttaaatgacaagatcttccatagagactgcagcccagtgatagaaacttcttctacactgttcctgatgctttattttatttaccacagcagctaacactccactctgggaccagaatacaccagcagaaagatctataaagaatcattagagttttagacagatgtattcacaattctacaaaatacattctcaactggagttagttattagctggtaatcagctttggtagcaacatgtatcaaagctcaaggaacctcctcatactgatcactcaccatcttgtgccatctgggtagaaatgtacaaattcagattttacacatttataccgacaatgggctacactactagaaaaggtggtgggagagctactagcatcacctgaaatgtttcctatctgactgaaatattcaattatggctactccaataaagatacaagttctgggaaataactgttttcagaacgaagtcagttctctatcagtggtttgacaaggcagaatgactgattgtgaagagagtctttcagagaaatgg

SEQ ID NO: 722960 - DNA, 634 bp, Homo sapiens
taatttccaccacatgtggttaactaaactaaaaataatcaccatgcagaaaaaggccatgctgtcccttgccacttctcaagtcatctacaacttaagaatatagaaaaagcaatcattactcccttgaaatatctgcatagcrcctaatattgagtacaaaaatgcaggctaaatagatatgaaaagagatatggcagtttctggaaaaagaccttgaggttgtggcttgtctgccattcaccagatgcacaaatcaattacacagcaagcattaaagcctggaagacaaaaaaaaaaaaaaaaatctgattgaatcaggagggaagctaaatactctttcattcatctgttctgagtgaaaaatatacaaaatttaaatgaaaataatttcctccagctacccaagtgtgatttactttaataaggcactaattgatatgttaaacttgctattttcaccacgtcttcaaatcttattatacaagtcaactagccaccgagataaccactgtgatctcctctaaaaagcctactgaaaacaatcctggtcttagccaattcactttttgttcataaaagagagctaaggagtcctaaattacaaaataattattttgaagcccagccttga

SEQ ID NO: 722961 - DNA, 610 bp, Homo sapiens
actcaaagatatttgagggtacagacccatggctggacttggcttttaaaaattcttatctgagatgtttcatagaatagagttccatcaaagccaattaaagcctacatgaaaaataattattcttgctgcactttatgcaaataatcaggccaagtacagtaagactaaagttttattttgtaaactgtaaatcagttctatcattatttgtttttttttwaaaaatggagactggagagagaaaaattatgcctcaaaagaaaaactatagtacactgttgttagctgttcttgaagttttttcctgccatttagactaaattctaaattctttgtaggctagaagtctccaaactaatgctttcaaatctttgcttttaaaattgggaattgtactcctcatcctaggactcattatttaccttatagtatacagttcacttaaatactgtcctaaaactgtagatggaagtaataatgtttttaccatgctagccttgaaagcccagccatgcctgcatgagtatgctcaggcaattgcaaagtagttccattcttctcaccttgtggccagagcgattgatggccttttcccatcttcatagca

SEQ ID NO: 722962 - DNA, 610 bp, Homo sapiens
actcaaagatatttgagggtacagacccatggctggacttggcttttaaaaattcttatctgagatgtttcatagaatagagttccatcaaagccaattaaagcctacatgaaaaataattattcttgctgcactttatgcaaataatcaggccaagtacagtaagactaaagttttattttgtaaactgtaaatcagttctatcattatttgttttttttttaaaaatggagactggagagagaaaaattatgcctcaaaagaaaaactatagtacactgttgttagctgttcttgaagttttttcctgccatttagactaaattctaaattctttgtaggctagaagtctccaaactaatgctttcaaatctttgcttttaaaattgggaattgtactcctcatcctaggactcattatttaccttatagtatacagttcacttaaawactgtcctaaaactgtagatggaagtaataatgtttttaccatgctagccttgaaagcccagccatgcctgcatgagtatgctcaggcaattgcaaagtagttccattcttctcaccttgtggccagagcgattgatggccttttcccatcttcatagca

SEQ ID NO: 722963 - DNA, 2932 bp, Homo sapiens
aaaatctgaagtctttttgtttgggattttcataaggatgcttgttcttatattttagatggatcatcttactcttcaacaaataatatggtctgaaagttacttttcaattagtggagacattttttgaataaaaacataatgtcttcagctggtcaacatgaattacaatatttatctaataaagaatgactgacttttgcccctatcatgaagtaaacgagaatgaattggacaaccaaagttttcattcatacaaagtcgtgctttgtttagaactcatcatccattacacatcctctgaactttatttctcttatttaccaagtatcatgattgagcaacaacagagaattgagaatctttctgtattaatttgttggttaatattatgaaagttccatatgaaaatgctttaacattttttaataaatattgcattaattaagttagaaagctactttttaaaaaaatttgtgggccgggcacggtggttcacgcctgtaatcccagcactttgggaggccgaggcgggcagatcatgaggtcaggagatcgagaccatcatgcctaacgtggtgaaaccctgtctctactaaaaatacaacaaaaattagcagggtgtggtggtgggtgcctgtagtcccagctactggggaggctgaggcaggagaatggcatgaacccgggaggtggagcttgtagtgagccgagatcacgccactgcactccagcctgggtgacagagcaagattctgtctcaaaaaaaaaaaaaaaaagaaaagaaaagaaaaaaagaaaaaaaaacttgtggcaaatactaatcattttaaattaagaagtggtaatataaagaagtgaacaaacttcaaacaagtatagaagtaattatactcaaaagtagaacattcatttattgattccaaaatatttattaagtatttgcctatgtgtcaaacccagcacaaggaactgggaatacagccatgaataaaatatactaaatgatagattctaaagaaaaatagatcaggataaggggattaaggctgatgctagttactattttagttggagtagttgaggaaggtttctttaaggaaaccacctaaatagagggaggatgtcagccttgtagacatcagagaggggaattccagggggtgaacaacaagtgcaaaagtcctggggtaagtatgggagtgacgtgttgtagagaatgaagtgacggagaagaatggttaaaaaaaaaaaattagggcagaatttacccaggagctggattttgcaagagtaatgtctttggatttttttctagacatgatgggttgctgtaggagggtttgagctggggagtgacatgatctgaattgtgttgcagaagcatcagtctggctgctctgtcaacaacagatttagtgacacaggggttggtacgcccattatgagactgtggcagtgtcgtgagagagagagaggctggcagtgacagagtggtgatgtcatcagactggtgacacattttgagagtacagctgagataaaaggcttttcctatcatagtgtgacgttaaaggaggagaaaatggaaaggagagaaaagggacactttacctagaagtgtacaatatttattttttaaacaataattattctctttgttgacaagatctcgtaatgaggaaaatcaaatttattttgatacatttataaggctgagactccattaattatttctagagctaaggtgatacatttatttttcaatagcaaaaataaatctgctttaataagagttaataatgataattccataattcattaattgagcacttactatgtgccaggcagcatgtgaatacctttgcagactttattcactcttttactataacccagagagacagctaggatgttctccgtgttagagatgaggaaagtcaggctcagtgaagctaaatatttgaccaagaccatactgctagagaatgacacacctagggattaaagccaggcctgcttggcactgaacccagctctcaatatctaagttactgtgtgcataaatayatcaaagcacacaacaacagtaacaataggaaaaatcctgaactgttcaggtatttcaaagggcatgtgaaaccggcatacacaattttcttttgaccattgacagcatataaacacagtctcctctggctgtactcatttgctcttattagctattaattgggtatgtcgattttccacaaaaacagaagttgactcataaggtgtaaagaatgctgaagctttgactaggttatattcagcactcgatggatttgatttttctttttaaaccacagtaatgataaggagagtggtgagttaatctttgacttcctttttaaaaaacacacataggaatagagaaaccgtctcttaaactttaccttacagatagtgacataaaacaaaaatgatatactttacagaaagtaaagtcaaataaataaacatataaataagtgaataaatcatgagaaacttaagacgttcaataatgatgagctcaatcttcatccaaaacattcttaaaattgagttttccatttatctttgtaaaacagtcttccagggaaatacattataagaacagtttaatttgttatgaagggcacttgatagttggtcaaataattacgatcattttaagaacaacaagaactttgtaattagggaaatcaaaatttccaagggtaacaagttaacaacatataagttaataaggtaagggcagtaggttagaaaggttgtgacattagtattccctgttcctctctgccaggtagaatcttggcgttggctgttctccccaaccatcctgtaccatagctgtctctgagcttagacaaccctgactcctccctttgttcccagcatcatcact

SEQ ID NO: 722964 - DNA, 645 bp, Homo sapiens
tgtttttattttgtaacagccattgattgactttgaaaatcttttatactattaaactttttttaaaaagccatttctcagttttctttctaatctgtactagctacaaacaatttctgtgactttcagtcagttattaaaaatatctttttgtgtccttttttcagcagcccatgacccatcgagaaactgcacctgtttcccagcctgaaaacaaaccagaaagtaagccaggcccagttggaccagaactccctcckggacacatcccaattcaagtgatccgcaaagaggtggattctaaacctgtttcccagaagcccccacctccctctgagaaggtagaggtgaaagttccccctgctccagttccttgtcctcctcccagccctggcccttctgctgtcccctcttcccccaagagtgtggctacagaagagagggcagcccccagcactgcccctgcagaagctacacctccaaaaccaggagaagccgaggctcccccaaaacatccaggagtgctgaaagtggaagccatcctggagaaggtgcaggggctggagcaggctgtagacaactttgaaggcaagaagactgacaaaaagtacctgatgatcgaagagtatttgaccaaagagctgc

SEQ ID NO: 722965 - DNA, 645 bp, Homo sapiens
tgtttttattttgtaacagccattgattgactttgaaaatcttttatactattaaactttttttaaaaagccatttctcagttttctttctaatctgtactagctacaaacaatttctgtgactttcagtcagttattaaaaatatctttttgtgtccttttttcagcagcccatgacccatcgagaaactgcacctgtttcccagcctgaaaacaaaccagaaagtaagccaggcccagttggaccagaactccctcctggacacatcccaattcaagtgatccgcaaagaggtggattctaaacctgtttcccagaagcccccacctccctctgagaaggtagaggtgaaagttccccctgctccagttccttgtcctcctcccagccctggcccttctgctgtcccctcttcccccaagagtgtggctacagaagagagggcagcccccagcactgcccctgcagaagctacacytccaaaaccaggagaagccgaggctcccccaaaacatccaggagtgctgaaagtggaagccatcctggagaaggtgcaggggctggagcaggctgtagacaactttgaaggcaagaagactgacaaaaagtacctgatgatcgaagagtatttgaccaaagagctgc

SEQ ID NO: 722966 - DNA, 656 bp, Homo sapiens
tcccagatctagaaatcactgcaagtctgggtttaagttccagtgcagcatttaagttcagatgctcacaataagtctcccaagactggaaaacaacattagagcaaatattgagttttggtgcagtattaaattctggtggcaaatattaagtccttgcccaaacaaaaagcaactggtggcaaggaattagattccaataataaatagtaaaggttgaacaacacaagaatacacctataaaagctagaacatgtggatatctctttaaacatggaaatagcaatgtacagatgaaaggaaacacaacaccgctaaaaaacaacagaactcacctaatgcagtaggagaaataaacatatataacatttctgacagagaattcagagcacatctttttataaaagagctcaggaaacaccgaaaatataaagttaaaaaaaatttggaaaatatttaaagatcaacaagagaaaaattgtttttttaaawacagaaattgaaaaagcttcagctagaatacctacaaaaagagatgactgaaataaatgaaataagagatgaaaaggatacataacaactgatacacaaaaatacaaaggtttataagaggctattacaaacaagtacctgccaaaaaattaaaaaatctaaag

SEQ ID NO: 722967 - DNA, 747 bp, Homo sapiens
cgtcaccccyttctttgactcggaaagggaactccctgatcccttgcgcttcccaggtgaggcaatgcctcgccctgcttcggctcgcgcacggtgcgcgcacacactggcctgcgcccactgtctggcgctccctagtgagatgaacccggtacctcagatggaaatgcagaaatcacccgtcttctgcgtcgctcacgctgggagctgtagaccggagctgttcctattcggccatcttggctcctccctccaattcttttgggtatatatccagcagtgggattgctggatcacatggtaatttttaattttttgaagaatcatcatactgttttccacggcagcagcaccattttatgttcccaccaacagttcattctagtttctccacatccttgccaacacttgctattttctctttttgacagtacccatcctaatgagtgtgaggtcctgtctcattgtggttttgattcttgaggctttttaaagctttttgtttcattataatttttattggattacaaaaggaacacaggtaattttatttggaaactatgaaaaataataaaaattatcttctcagaaaatgattcttgttaacatttaagctcagttaagctctctcactttctctcccttctctctctttgtacaacttttaaaaaatatagtaggggtgagactatatgtatctatactatagtaggggtgagactatatgtatccttcctttttcactta

SEQ ID NO: 722968 - DNA, 624 bp, Homo sapiens
tcagcctcctaagtagctggaactacaggagtgcgccaccagctaatttttgcatttttttttttgtagaaacagtttcgccatgttgcccaggctcwcactgggtcttatgttccaacatacgaatttgtctgggggatgggtgacacatacattcaaaccatagcagggccttcaataggtcattagagagagagccaaggaacaccagtgtggctttttgcattgaacaacgataagttaatggaagtttaacatagcccacagtctgtagtcagaggtcagaggagtaaggccttacatgctacagatgcccacaaaggagataagaggaagccagaagaaatagaaatttgtttgtcagtggataaagaacaaggccaaggttttcttaaatagtgattgatgaggccctggtttactgtaacagtgtacttgtgattttttaattttgtaaaaattgtcccagtgtgtaattctctgtttatacctgagtgtggggaaatgaattttaaggaaaaagccctatatttcctgataaatcacttctataactaattggttatttaatgattcatctgtgtaaaaagggggactaatggttttaaaataaaatttcatcaa

SEQ ID NO: 722969 - DNA, 624 bp, Homo sapiens
tcagcctcctaagtagctggaactacaggagtgcgccaccagctaatttttgcatttttttttttgtagaaacagtttcgccatgttgcccaggctctcactgggtcttatgttccaacatacgaatttgtctgggggatgggtgacacatacattcaaaccatagcagggccttcaataggtcattagagagagagccaaggaacaccagtgtggctttttgcattgaacaacgataagttaatggaagtttaacatagcccacagtctgtagtcagaggtcagaggagtaaggccttacatgctacagatgcccacaaaggagataagaggaagccagaagaaatagaaatttgtttgtcagtggataaagaacaaggccaaggttttcttaaatagtgattgatgaggccctggtttactgtaacagtgtacttgtgattttttaattttgtaaaaattgtcccagtgtgtaattctctgtttatacctgagtgtggggaaatgaattttaaggaaaaagccctatatttcctgataaatcacttytataactaattggttatttaatgattcatctgtgtaaaaagggggactaatggttttaaaataaaatttcatcaa

SEQ ID NO: 722970 - DNA, 624 bp, Homo sapiens
tcagcctcctaagtagctggaactacaggagtgcgccaccagctaatttttgcatttttttttttgtagaaacagtttcgccatgttgcccaggctctcactgggtcttatgttccaacatacgaatttgtctgggggatgggtgacacatacattcaaaccatagcagggccttcaataggtcattagagagagagccaaggaacaccagtgtggctttttgcattgaacaacgataagttaatggaagtttaacatagcccacagtctgtagtcagaggtcagaggagtaaggccttacatgctacagatgcccacaaaggagataagaggaagccagaagaaatagaaatttgtttgtcagtggataaagaacaaggccaaggttttcttaaatagtgattgatgaggccctggtttactgtaacagtgtacttgtgattttttaattttgtaaaaattgtcccagtgtgtaattctctgtttatacctgagtgtggggaaatgaattttaaggaaaaagccctatatttcctgataaatcacttctataactaattggttatttaatgattcatctgtgtaaaaarggggactaatggttttaaaataaaatttcatcaa

SEQ ID NO: 722971 - DNA, 624 bp, Homo sapiens
tcagcctcctaagtagctggaactacaggagtgcgccaccagctaatttttgcatttttttttttgtagaaacagtttcgccatgttgcccaggctctcactgggtcttatgttccaacatacgaatttgtctgggggatgggtgacacatacattcaaaccatagcagggccttcaataggtcattagagagagagccaaggaacaccagtgtggctttttgcattgaacaacgataagttaatggaagtttaacatagcccacagtctgtagtcagaggtcagaggagtaaggccttacatgctacagatgcccacaaaggagataagaggaagccagaagaaatagaaatttgtttgtcagtggataaagaacaaggccaaggttttcttaaatagtgattgatgaggccctggtttactgtaacagtgtacttgtgattttttaattttgtaaaaattgtcccagtgtgtaattctctgtttatacctgagtgtggggaaatgaattttaaggaaaaagccctatatttcctgataaatcacttctataactaattggttatttaatgattcatctgtgtaaaaaggrggactaatggttttaaaataaaatttcatcaa

SEQ ID NO: 722972 - DNA, 652 bp, Homo sapiens
tgaggagatgctgaaacaatgaatgagagtggaaatgtattctatgctgtggagtgaagaaaacacacagctcaggattcaatgataatgacaatgagggtggttgagagtaactgtcgtaacactcttattttctaagcacctcctacattccaagtactgtgctggatgcttaatattttcatttccaacatttaaaacaatccattaagaattatctcctctagtgaagaaaataaagcttcaaaacttaasttgcttgtattacacaatgagtaaatggtagggcctgaatttaaccccaggtctcccaacccaaagatcacgatctttcttctactgaagtgctggatttatcctaagaaggcattcttctgttaatccttacaccagaatgccagctaattaaaacagaaacaaaaacaaacagaaacgctgtttgagaaatgttctttgtaagggagatgacctaacatgaatttttggatgaaattataatggatatggaggagttttgtttttttggtttgagaaagaatcttcaggaaaacatatagaatttgcaggagagtcatgttcattaaaccatctcagagttaaagactggagggaatagatgttaatagccataaaggccttgcagaaaaaggca

SEQ ID NO: 722973 - DNA, 1980 bp, Homo sapiens
ggcaagctccctggttattccatctccatatacctcaagactcctaacacagttctttgcacataatagacattcattttgcaggacagataccaagatgaattgcttcagtttgtttttaacaacgtaattctatttccaatttagataattcattgatttcacacctttccttcctggttactctatacttaattttcccttttcttctttccttttttgtttgtttttttttttttttttgaaacagagtcttgctccattgcccagactggagtgcagtggcgcaatcttggctcactgcaacctccgcctcccgggttcaaacaattcttctgcctcagcctcccaagtagctgggactacaggtgagtgccaccacatccagctaatttttgtctttttagtagaggtggggtttcaccatgttggcagggatggtctttatctcctgaactcatgatccgacctctcaaagtgctgggattacaggcatgagccactgtgcctggcctcttctttctctttctaaaagcacatcaatttacatttctacatctgcttcctacaaagaatttcctctgaatgaattcaacaagtgtcctgtacatgtaaatatatgtatgaatcttttgtacctatccatgtcaaagggtttttgaagccaaactgaaaactttcctagactacatgttgatgttctgaatatccacatttcgaggctcttaacaaagctgtatcaaactccttttcttctgagtaatatattatgtacgtaaagtcctaggagatgccctaagtctactataagtgaatttactttttgttttctgctttgcttcattcatcctgctttgctttttttctcatcccaaatataaacatctgttttgttatcaagttaaagttaaggagatataaaaccctctcagattaatgtacagcccattattgaattctggatcttagtgatatccaatatattatcatgaattttatagaatatactgaacttttaattcttatctgatttatcttcttaatgatgcttagatttccattcaaaaatcctgtctcttctcaccctttccacactgtgtctgtttttgtgcccttttctagagttttacatttctctttaggattatctctctctttctctcgctcacctacatacacacaccacacactccatgtccaaaktcacagtctaagcattttggtgatatgccattcctcttctacctttgttagaagttcctctttcccatggaatcaattctaccggaaaaaagtgaaaaggaaccttagagagcaatcattaaaggtgcaaagggaaaggtccccatgtctgggagtgtctctaaccagctgtgtgatacgtgccatgtaatatctggctttggttttctcatctctaaaactggagggtaaaacaagactatgtcttgaaacctttctaattctgaaatgttcactattatcagttaacatttattgtgcttttctgcatggcaggcctcaggctaacggctggctataactagcactatccatgctcacaacaactccataaggaaggtgccacggttatcctcattatgtcactgagaaaactgaggttctgagaggtaaagtcatttcacacctgatgggatatggatgtaagactggaactcagacggcatgactctcaggttacagattctgcatcacatgctcatatcaactgatctgtatttttatacaacttcaaaaatgaaaacactgggcatgtgacctataaataatgaaatcatatacaaaaataaagaaacaccccacattgttgaaaaattatttcctttccaaaaattacttgaaagggcatcagtaagccctggcatatttgttcaaaatacagtcttactgaataggggtgtgtgtgtgtgtgtgtgtttgtgtgtgtgtgtgtgtggtgtgtatatacacacatatata

SEQ ID NO: 722974 - DNA, 1980 bp, Homo sapiens
ggcaagctccctggttattccatctccatatacctcaagactcctaacacagttctttgcacataatagacattcattttgcaggacagataccaagatgaattgcttcagtttgtttttaacaacgtaattctatttccaatttagataattcattgatttcacacctttccttcctggttactctatacttaattttcccttttcttctttccttttttgtttgtttttttttttttttttgaaacagagtcttgctccattgcccagactggagtgcagtggcgcaatcttggctcactgcaacctccgcctcccgggttcaaacaattcttctgcctcagcctcccaagtagctgggactacaggtgagtgccaccacatccagctaatttttgtctttttagtagaggtggggtttcaccatgttggcagggatggtctttatctcctgaactcatgatccgacctctcaaagtgctgggattacaggcatgagccactgtgcctggcctcttctttctctttctaaaagcacatcaatttacatttctacatctgcttcctacaaagaatttcctctgaatgaattcaacaagtgtcctgtacatgtaaatatatgtatgaatcttttgtacctatccatgtcaaagggtttttgaagccaaactgaaaactttcctagactacatgttgatgttctgaatatccacatttcgaggctcttaacaaagctgtatcaaactccttttcttctgagtaatatattatgtacgtaaagtcctaggagatgccctaagtctactataagtgaatttactttttgttttctgctttgcttcattcatcctgctttgctttttttctcatcccaaatataaacatctgttttgttatcaagttaaagttaaggagatataaaaccctctcagattaatgtacagcccattattgaattctggatcttagtgatatccaatatattatcatgaattttatagaatatactgaacttttaattcttatctgatttatcttcttaatgatgcttagatttccattcaaaaatcctgtctcttctcaccctttccacactgtgtctgtttttgtgcccttttctagagttttacatttctctttaggattatctctctctttctctcgctcacctacatacacacaccacacactccatgtccaaattcacagtctaagcattttggtgatatgccattcctcttctacctttgttagaagttcctctttcccatggaatcaattctaccggaaaaaagtgaaaaggaaccttagagagcaatcattaaaggtgcaaagggaaaggtccccatgtctgggagtgtctctaaccagctgtgtgatacgtgccatgtaatatctggctttggttttctcatctctaaaactggagggtaaaacaagactatgtcttgaaacctttctaattctgaaatgttcactattatcagttaacatttattgygcttttctgcatggcaggcctcaggctaacggctggctataactagcactatccatgctcacaacaactccataaggaaggtgccacggttatcctcattatgtcactgagaaaactgaggttctgagaggtaaagtcatttcacacctgatgggatatggatgtaagactggaactcagacggcatgactctcaggttacagattctgcatcacatgctcatatcaactgatctgtatttttatacaacttcaaaaatgaaaacactgggcatgtgacctataaataatgaaatcatatacaaaaataaagaaacaccccacattgttgaaaaattatttcctttccaaaaattacttgaaagggcatcagtaagccctggcatatttgttcaaaatacagtcttactgaataggggtgtgtgtgtgtgtgtgtgtttgtgtgtgtgtgtgtgtggtgtgtatatacacacatatata

SEQ ID NO: 722975 - DNA, 1980 bp, Homo sapiens
ggcaagctccctggttattccatctccatatacctcaagactcctaacacagttctttgcacataatagacattcattttgcaggacagataccaagatgaattgcttcagtttgtttttaacaacgtaattctatttccaatttagataattcattgatttcacacctttccttcctggttactctatacttaattttcccttttcttctttccttttttgtttgtttttttttttttttttgaaacagagtcttgctccattgcccagactggagtgcagtggcgcaatcttggctcactgcaacctccgcctcccgggttcaaacaattcttctgcctcagcctcccaagtagctgggactacaggtgagtgccaccacatccagctaatttttgtctttttagtagaggtggggtttcaccatgttggcagggatggtctttatctcctgaactcatgatccgacctctcaaagtgctgggattacaggcatgagccactgtgcctggcctcttctttctctttctaaaagcacatcaatttacatttctacatctgcttcctacaaagaatttcctctgaatgaattcaacaagtgtcctgtacatgtaaatatatgtatgaatcttttgtacctatccatgtcaaagggtttttgaagccaaactgaaaactttcctagactacatgttgatgttctgaatatccacatttcgaggctcttaacaaagctgtatcaaactccttttcttctgagtaatatattatgtacgtaaagtcctaggagatgccctaagtctactataagtgaatttactttttgttttctgctttgcttcattcatcctgctttgctttttttctcatcccaaatataaacatctgttttgttatcaagttaaagttaaggagatataaaaccctctcagattaatgtacagcccattattgaattctggatcttagtgatatccaatatattatcatgaattttatagaatatactgaacttttaattcttatctgatttatcttcttaatgatgcttagatttccattcaaaaatcctgtctcttctcaccctttccacactgtgtctgtttttgtgcccttttctagagttttacatttctctttaggattatctctctctttctctcgctcacctacatacacacaccacacactccatgtccaaattcacagtctaagcattttggtgatatgccattcctcttctacctttgttagaagttcctctttcccatggaatcaattctaccggaaaaaagtgaaaaggaaccttagagagcaatcattaaaggtgcaaagggaaaggtccccatgtctgggagtgtctctaaccagctgtgtgatacgtgccatgtaatatctggctttggttttctcatctctaaaactggagggtaaaacaagactatgtcttgaaacctttctaattctgaaatgttcactattatcagttaacatttattgtgcttttctgcatggcaggcctcaggctaacggctggctataactagcactatccatgctcacaacaactccataaggaaggtgccacggttatcctcattatgtcactgagaaaactgaggttctgagaggtaaagtcatttcacacctgatgggatatggatgtaagactggaactcagacggcatgactctcaggttacagattctgcatcacatgctcatatcaactgatctgtatttttatacaacttcaaaaatgaaaacactgggcatgtgacctataaataatgaaatcatatwcaaaaataaagaaacaccccacattgttgaaaaattatttcctttccaaaaattacttgaaagggcatcagtaagccctggcatatttgttcaaaatacagtcttactgaataggggtgtgtgtgtgtgtgtgtgtttgtgtgtgtgtgtgtgtggtgtgtatatacacacatatata

SEQ ID NO: 722976 - DNA, 1980 bp, Homo sapiens
ggcaagctccctggttattccatctccatatacctcaagactcctaacacagttctttgcacataatagacattcattttgcaggacagataccaagatgaattgcttcagtttgtttttaacaacgtaattctatttccaatttagataattcattgatttcacacctttccttcctggttactctatacttaattttcccttttcttctttccttttttgtttgtttttttttttttttttgaaacagagtcttgctccattgcccagactggagtgcagtggcgcaatcttggctcactgcaacctccgcctcccgggttcaaacaattcttctgcctcagcctcccaagtagctgggactacaggtgagtgccaccacatccagctaatttttgtctttttagtagaggtggggtttcaccatgttggcagggatggtctttatctcctgaactcatgatccgacctctcaaagtgctgggattacaggcatgagccactgtgcctggcctcttctttctctttctaaaagcacatcaatttacatttctacatctgcttcctacaaagaatttcctctgaatgaattcaacaagtgtcctgtacatgtaaatatatgtatgaatcttttgtacctatccatgtcaaagggtttttgaagccaaactgaaaactttcctagactacatgttgatgttctgaatatccacatttcgaggctcttaacaaagctgtatcaaactccttttcttctgagtaatatattatgtacgtaaagtcctaggagatgccctaagtctactataagtgaatttactttttgttttctgctttgcttcattcatcctgctttgctttttttctcatcccaaatataaacatctgttttgttatcaagttaaagttaaggagatataaaaccctctcagattaatgtacagcccattattgaattctggatcttagtgatatccaatatattatcatgaattttatagaatatactgaacttttaattcttatctgatttatcttcttaatgatgcttagatttccattcaaaaatcctgtctcttctcaccctttccacactgtgtctgtttttgtgcccttttctagagttttacatttctctttaggattatctctctctttctctcgctcacctacatacacacaccacacactccatgtccaaattcacagtctaagcattttggtgatatgccattcctcttctacctttgttagaagttcctctttcccatggaatcaattctaccggaaaaaagtgaaaaggaaccttagagagcaatcattaaaggtgcaaagggaaaggtccccatgtctgggagtgtctctaaccagctgtgtgatacgtgccatgtaatatctggctttggttttctcatctctaaaactggagggtaaaacaagactatgtcttgaaacctttctaattctgaaatgttcactattatcagttaacatttattgtgcttttctgcatggcaggcctcaggctaacggctggctataactagcactatccatgctcacaacaactccataaggaaggtgccacggttatcctcattatgtcactgagaaaactgaggttctgagaggtaaagtcatttcacacctgatgggatatggatgtaagactggaactcagacggcatgactctcaggttacagattctgcatcacatgctcatatcaactgatctgtatttttatacaacttcaaaaatgaaaacactgggcatgtgacctataaataatgaaatcatatacaaaaataaagaaacaccccacattgttgaaaaattatttyctttccaaaaattacttgaaagggcatcagtaagccctggcatatttgttcaaaatacagtcttactgaataggggtgtgtgtgtgtgtgtgtgtttgtgtgtgtgtgtgtgtggtgtgtatatacacacatatata

SEQ ID NO: 722977 - DNA, 1980 bp, Homo sapiens
ggcaagctccctggttattccatctccatatacctcaagactcctaacacagttctttgcacataatagacattcattttgcaggacagataccaagatgaattgcttcagtttgtttttaacaacgtaattctatttccaatttagataattcattgatttcacacctttccttcctggttactctatacttaattttcccttttcttctttccttttttgtttgtttttttttttttttttgaaacagagtcttgctccattgcccagactggagtgcagtggcgcaatcttggctcactgcaacctccgcctcccgggttcaaacaattcttctgcctcagcctcccaagtagctgggactacaggtgagtgccaccacatccagctaatttttgtctttttagtagaggtggggtttcaccatgttggcagggatggtctttatctcctgaactcatgatccgacctctcaaagtgctgggattacaggcatgagccactgtgcctggcctcttctttctctttctaaaagcacatcaatttacatttctacatctgcttcctacaaagaatttcctctgaatgaattcaacaagtgtcctgtacatgtaaatatatgtatgaatcttttgtacctatccatgtcaaagggtttttgaagccaaactgaaaactttcctagactacatgttgatgttctgaatatccacatttcgaggctcttaacaaagctgtatcaaactccttttcttctgagtaatatattatgtacgtaaagtcctaggagatgccctaagtctactataagtgaatttactttttgttttctgctttgcttcattcatcctgctttgctttttttctcatcccaaatataaacatctgttttgttatcaagttaaagttaaggagatataaaaccctctcagattaatgtacagcccattattgaattctggatcttagtgatatccaatatattatcatgaattttatagaatatactgaacttttaattcttatctgatttatcttcttaatgatgcttagatttccattcaaaaatcctgtctcttctcaccctttccacactgtgtctgtttttgtgcccttttctagagttttacatttctctttaggattatctctctctttctctcgctcacctacatacacacaccacacactccatgtccaaattcacagtctaagcattttggtgatatgccattcctcttctacctttgttagaagttcctctttcccatggaatcaattctaccggaaaaaagtgaaaaggaaccttagagagcaatcattaaaggtgcaaagggaaaggtccccatgtctgggagtgtctctaaccagctgtgtgatacgtgccatgtaatatctggctttggttttctcatctctaaaactggagggtaaaacaagactatgtcttgaaacctttctaattctgaaatgttcactattatcagttaacatttattgtgcttttctgcatggcaggcctcaggctaacggctggctataactagcactatccatgctcacaacaactccataaggaaggtgccacggttatcctcattatgtcactgagaaaactgaggttctgagaggtaaagtcatttcacacctgatgggatatggatgtaagactggaactcagacggcatgactctcaggttacagattctgcatcacatgctcatatcaactgatctgtatttttatacaacttcaaaaatgaaaacactgggcatgtgacctataaataatgaaatcatatacaaaaataaagaaacaccccacattgttgaaaaattatttcctttccaaaaattacttgaaagggcatcagtaagccctggcayatttgttcaaaatacagtcttactgaataggggtgtgtgtgtgtgtgtgtgtttgtgtgtgtgtgtgtgtggtgtgtatatacacacatatata

SEQ ID NO: 722978 - DNA, 1617 bp, Homo sapiens
tgggcacaagtacttttgtttatttgctgctgaatcatagcatcaagcatagagcctggcacctataaattgctctataaatttctggtgaataaatgaatcaatcaataaatgaatcttccaacaacatgatgcaacacagaccaacgttcagatcctacaaggtctaataatgtggctaaaggggcacctgttcttggttccctttggtgaaaacctgataatcaatgaatggcaagcatatttacatatttaaaagtttgcctgcaaggtaatcttaccttgaggctgtgtaataggagtaagtatctattagctcgtaggaagcacatgcacacatgtatgtacacacataaactactctgatctctcatgtcttcaacaacttgactacatttttacctgaaaaaattattgtagmtattactaatgtgatgcactaaccagagagcagaaacaaattgagttgtttgtttctccaggagggaaagcaggccgcagctacttccagaaggtcaagagatcagggtatgaatacctaagacatgtgtgtgtatatttctgccacagggagttttcacacaatacacaaatggaggatcaactaacaggctgccagtcaaggggagattcaagaagtttcaaagaaatgctctgaaccccaaaataacaaaggaaaacatgttttgaaaagtacacaaagacagttctcttaaaaatctgccaggactccttgccaaaatggcatgttacacatccccttctctataacctataccatctgggctttccgtaccccaccagcagggtgtaagaatgcctattcatttgcacccctgcccatataagttattataactttttaaaaatcattcccaaacctgtaggttaaaacatgatgtctccctgctttaatttggaggtctctaagttgcttacggtacaacctcaggatccattcatgctcattttgtagctacaaaagaaaaagctctaaaggaaggccaagtgaaatcctggacatgcagtgtgatgaagaaataagggctgctgcttaaccaagagtcaactcaagcagtctctgtgaagttctttctcactgcctctgtttattttcctcctcagccaacacacgactaacagcagcatcttgaatttgcgttacaatttaccaagcacctttattttcctcaatgatcttcataaaaattctgtactatggataagatgactctgttttccagatgcagatccagaaaatggactttccctcagtgtctccagttattaagtagtaaaacccagactagaacctgtgttttctcatggcctcttcaaagttctttctacgatggcatagttccttaagataaaccgagtgaaagaaaggtaactttcactcacaattcaccagaaaaaaaaaaaaaaaaaaaaaagaggaggtgggggagaaagaggtgctacactcagctgagcccacctgtttggtttctgttagctttgaccaaagtgccagtcattacactaaaattctattttgaggtttatcatgaatattggtttctacaaaattcttcattaattaatgctagaaaacacagctctcagtcaattgcc

SEQ ID NO: 722979 - DNA, 1617 bp, Homo sapiens
tgggcacaagtacttttgtttatttgctgctgaatcatagcatcaagcatagagcctggcacctataaattgctctataaatttctggtgaataaatgaatcaatcaataaatgaatcttccaacaacatgatgcaacacagaccaacgttcagatcctacaaggtctaataatgtggctaaaggggcacctgttcttggttccctttggtgaaaacctgataatcaatgaatggcaagcatatttacatatttaaaagtttgcctgcaaggtaatcttaccttgaggctgtgtaataggagtaagtatctattagctcgtaggaagcacatgcacacatgtatgtacacacataaactactctgatctctcatgtcttcaacaacttgactacatttttacctgaaaaaattattgtagctattactaatgtgatgcactaaccagagagcagaaacaaattgagttgtttgtttctccaggagggaaagcaggccgcagctacttccagaaggtcaagagatcagggtatgaatacctaagacatgtgtgtgtatatttctgccacagggagttttcacacaatacacaaatggaggatcaactaacaggctgccagtcaaggggagattcaagaagtttcaaagaaatgctctgaaccccaaaataacaaaggaaaacatgttttgaaaagtacacaaagacagttctcttaaaaatctgccaggactccttgccaaaatggcatgttacacatccccttctctataacctataccatctgggctttccgtaccccaccagcagggtgtaagaatgcctattcatttgcacccctgcccatataagttattataactttttaaaaatcattcccaaacctgtaggttaaaacatgatgtctccctgctttaatttggaggtctctaagttgcttacggtacaacctcaggatccattcatgctcattttgtagctacaaaagaaaaagctctaaaggaaggccaagtgaaatcctggacatgcagtgtgatgaagaaataagggctgctgcttaaccaagagtcaactcaagcagtctctgtgaagttctttctcactgcctctgtttattttcctcctcagccaacacacgactaacagcagcatcttgaatttgcgttacaatttaccaagcacctttattttcctcaatgatcttcataaaaattctgtactatggataagatgactctgttttccagatgcagatccagaaaatggactttccctcagtgtctccagttattaagtagtaaaacccagactagaacctgtgttttctcatggcctcttcaaagttctttctacgatggcatagttccttaagataaaccgagtgaaagaaaggtaactttcactcacaattcaccagaaaaaaaaaaaaaaaaaaaaaagaggaggtgggggagaaagaggtgctacactcagctgagcccacctgtttggtttctgttagctttgaccaaagtgccagtcattacactaaaattctattttgargtttatcatgaatattggtttctacaaaattcttcattaattaatgctagaaaacacagctctcagtcaattgcc

SEQ ID NO: 722980 - DNA, 1287 bp, Homo sapiens
tgcccttggattgctgttttcaagactatctgcaatcacatcgtgcagttaaccttcttccacacagtccacttggcttacccaaaaatagtacagaaccagggtcagctggggtgtttgaacacatttgtgtatgtgtgtttctatgcaatctaatgagtaatataaaagaacttaaggcgattctttttttattagtacctctccagttttgcaaaacaatcttaattattacagaatactgtttcatgatataaagctggcagtgttcttagttatcgtctagctcttctcaataaggaaactgttgaaaccagaacttgcaaaaaatttctttttaaaaaattctccactctgatatactctcccctatgccattccattacagaatctagatcctgtcttcttcccaagaggcttgctttctgagcagaataaaaattacggcaaagttagtttgatagaaagaatgaaactaactcggtttcctagaatactgaccagcctgcatttatgaacatgaatgaaaattacagggtctctatgtagaaatctgaatcaaacttgtgatcaaaaccagaagaacttgaccctcattttctttcttagccaaccactaactttgggagtcttcagatgaaatctcatctccagcatgacttaatatttgggtaaggtgctggtggaaaagtttcacagtctatttcaaagaaaagatttgcatttgtgaggcacacatctgcagtactttgaaatatactggcaaattaaaaattacacacactctcccaacaagttctcagctcttttaaatattgcacaaagaacgttggttagtaatgtactcaaagatcagaattctgtttcagcacatccttatatgaatattctactataataaaagctgaatctcaataagcttgtcagcctttatccaaagacactcgaggatttaattgttctaactaactcgggtactcagatcttttgaagaggtgaaacaaatttaactctcttaaaataatcagttagaattgcctcagtgtcacgtggtaccagtggaatacacttctgtggggtrtcaggaaactgacggctaaaagacaactagagctgtaaagcctcgtcttcgacactcacgttttatccagggataaaggcaacccaaagctcaaacatataccaatgctttaaatattttcaacgtacatctggactctaagaacaaaagctggtctattctatctctctggttcagtaacttttctatcaactgcaaaatagctt

SEQ ID NO: 722981 - DNA, 1287 bp, Homo sapiens
tgcccttggattgctgttttcaagactatctgcaatcacatcgtgcagttaaccttcttccacacagtccacttggcttacccaaaaatagtacagaaccagggtcagctggggtgtttgaacacatttgtgtatgtgtgtttctatgcaatctaatgagtaatataaaagaacttaaggcgattctttttttattagtacctctccagttttgcaaaacaatcttaattattacagaatactgtttcatgatataaagctggcagtgttcttagttatcgtctagctcttctcaataaggaaactgttgaaaccagaacttgcaaaaaatttctttttaaaaaattctccactctgatatactctcccctatgccattccattacagaatctagatcctgtcttcttcccaagaggcttgctttctgagcagaataaaaattacggcaaagttagtttgatagaaagaatgaaactaactcggtttcctagaatactgaccagcctgcatttatgaacatgaatgaaaattacagggtctctatgtagaaatctgaatcaaacttgtgatcaaaaccagaagaacttgaccctcattttctttcttagccaaccactaactttgggagtcttcagatgaaatctcatctccagcatgacttaatatttgggtaaggtgctggtggaaaagtttcacagtctatttcaaagaaaagatttgcatttgtgaggcacacatctgcagtactttgaaatatactggcaaattaaaaattacacacactctcccaacaagttctcagctcttttaaatattgcacaaagaacgttggttagtaatgtactcaaagatcagaattctgtttcagcacatccttatatgaatattctactataataaaagctgaatctcaataagcttgtcagcctttatccaaagacactcgaggatttaattgttctaactaactcgggtactcagatcttttgaagaggtgaaacaaatttaactctcttaaaataatcagttagaattgcctcagtgtcacgtggtaccagtggaatacacttctgtggggtgtcaggaaactgacggctaaaagacaactagagctgtaaagcctygtcttcgacactcacgttttatccagggataaaggcaacccaaagctcaaacatataccaatgctttaaatattttcaacgtacatctggactctaagaacaaaagctggtctattctatctctctggttcagtaacttttctatcaactgcaaaatagctt

SEQ ID NO: 722982 - DNA, 2115 bp, Homo sapiens
catatgctgcttctctttactgccatggttatttatagatctactgcaaaatttaaagacaacttagtgatgggaaaagtcaggactaagagttaggaggattatgttcagcatcagctctgccatcatgtgctgtttgggatctcaggtaattcacttaatcttcatgcacctcaatttctctatctgtaaaatggcagtaatgctttgcctaattcatagagctagtagaagagcaaatgtgagaaaagttatattgcaccttgaaggcagggtctctaattatcaagctgttaaacccttacttttaattagccctttcacatccaaggtgtcatttcatactgcaagctgggagctgatgtctccatttttatagatgagataagtaaaggtaagttactagcctagtctcaaaaattacaaagccatgatctttgcagaaaaactttggattatatgtagatttcagcttaaaatcctgctctgccacctgcataaatcggttatcctctttgagcttcagatttctacatataaaatagaaataatgataccatgatactgtcttactgaatcataacacaattaaaagaatacataaaattacctgaaataaagtcaagtgctaagtcaatggtgaccatgattatcacaatgtgtctctgtgctgaaaacaagatttcaaaggcatgaaccactcaaggtggcacctagtgtgtatgtgatgatgggtgggagtcagggtgatggtggcaaaagcagatgtctctctccaaccaagcactctttataccgcacagaccctgatcttctgctcccttctacagtcttacttaaacttcacccatccattttttcaaagcagactttactcctctgaaatagcattkaaaaggatttttaaagtacttcttgttagaatggtgagagctcctgagaatgaaaatggaaattcttgttcatgaagaagtttctgtagccctgaagtgaattcatatgcatacttgctggttctgacttacattgtttaagtcatggctgatgcatccagagaccatgagggagagagaaaggagatgggatagaggaagtatagttgttcagaaatcaaaacaaaaacaaaaacaaaaccctaaacctaaaccagctgaggtaaaggtaaaaaatgtagaaatacggccaacaggcatcatctgaagaaaattgctttgaaaaattagaaagaaacctttatatacaaaactttttctgcacatataatttatcttcctcattgtatccttatgacccaaactattgaagacagcaaggatcttaaaaatcattgacattctcctccattccaaagatgaggaggtagaagcccatggagattaggcaatttgatccaaagagatcctactatgacagagctaagctcatagctgactcttctggctttgagcagtattcccttaagggtataacacagcttctaacacaccatgctacacatgcaaaatatgtcttttctatagtttgcttagcagtatttgaattatgaacatatttctttgcaataaaagaaaatttggcaacacttggagcatttgccaaggctcattatatgttctaatgagctccttcaaatgttctaacattcaggcttctctcctgccaaagattgatgtccagctttggtgatttgcttccttctgttggagcatgcaagagaggctctaagtaaaaaggacatttaggtctttcatggctaataagcatattgggcccccacctcagattgtccataattgtcttcctccttctatttgagaatccagtgaaacgtattccaactgtcttgtgaaagccaaaatgtagttatacttgattatcatggatcttatttcatgatcataggaactaatctaaattacaaatgttttatgataactttaggaagattttactataaggaatatcaattcaactttctccttaatatgatgcctttgagtaaacaagcacagagtgaaaacacatgaagagagaaaaggagcaaaatccttagggtaattcatgaagaagagggattcttggtttccataacaattctataactagatcacagga

SEQ ID NO: 722983 - DNA, 2115 bp, Homo sapiens
catatgctgcttctctttactgccatggttatttatagatctactgcaaaatttaaagacaacttagtgatgggaaaagtcaggactaagagttaggaggattatgttcagcatcagctctgccatcatgtgctgtttgggatctcaggtaattcacttaatcttcatgcacctcaatttctctatctgtaaaatggcagtaatgctttgcctaattcatagagctagtagaagagcaaatgtgagaaaagttatattgcaccttgaaggcagggtctctaattatcaagctgttaaacccttacttttaattagccctttcacatccaaggtgtcatttcatactgcaagctgggagctgatgtctccatttttatagatgagataagtaaaggtaagttactagcctagtctcaaaaattacaaagccatgatctttgcagaaaaactttggattatatgtagatttcagcttaaaatcctgctctgccacctgcataaatcggttatcctctttgagcttcagatttctacatataaaatagaaataatgataccatgatactgtcttactgaatcataacacaattaaaagaatacataaaattacctgaaataaagtcaagtgctaagtcaatggtgaccatgattatcacaatgtgtctctgtgctgaaaacaagatttcaaaggcatgaaccactcaaggtggcacctagtgtgtatgtgatgatgggtgggagtcagggtgatggtggcaaaagcagatgtctctctccaaccaagcactctttataccgcacagaccctgatcttctgctcccttctacagtcttacttaaacttcacccatccattttttcaaagcagactttactcctctgaaatagcattgaaaaggatttttaaagtacttcttgttagaatggtgagagctcctgagaatgaaaatggaaattctkgttcatgaagaagtttctgtagccctgaagtgaattcatatgcatacttgctggttctgacttacattgtttaagtcatggctgatgcatccagagaccatgagggagagagaaaggagatgggatagaggaagtatagttgttcagaaatcaaaacaaaaacaaaaacaaaaccctaaacctaaaccagctgaggtaaaggtaaaaaatgtagaaatacggccaacaggcatcatctgaagaaaattgctttgaaaaattagaaagaaacctttatatacaaaactttttctgcacatataatttatcttcctcattgtatccttatgacccaaactattgaagacagcaaggatcttaaaaatcattgacattctcctccattccaaagatgaggaggtagaagcccatggagattaggcaatttgatccaaagagatcctactatgacagagctaagctcatagctgactcttctggctttgagcagtattcccttaagggtataacacagcttctaacacaccatgctacacatgcaaaatatgtcttttctatagtttgcttagcagtatttgaattatgaacatatttctttgcaataaaagaaaatttggcaacacttggagcatttgccaaggctcattatatgttctaatgagctccttcaaatgttctaacattcaggcttctctcctgccaaagattgatgtccagctttggtgatttgcttccttctgttggagcatgcaagagaggctctaagtaaaaaggacatttaggtctttcatggctaataagcatattgggcccccacctcagattgtccataattgtcttcctccttctatttgagaatccagtgaaacgtattccaactgtcttgtgaaagccaaaatgtagttatacttgattatcatggatcttatttcatgatcataggaactaatctaaattacaaatgttttatgataactttaggaagattttactataaggaatatcaattcaactttctccttaatatgatgcctttgagtaaacaagcacagagtgaaaacacatgaagagagaaaaggagcaaaatccttagggtaattcatgaagaagagggattcttggtttccataacaattctataactagatcacagga

SEQ ID NO: 722984 - DNA, 604 bp, Homo sapiens
ttatcttttcaaaattctcagtccagattaccatttatgatgctttcttttccataagtggtccaaacacatttgctgaaactttttacctttccatcccacaataattccactgcaaaaaagtaaatttaaagctgttccaacaactgatttttgacgttggagatgaaacacaaggatgttaaattatgaggaattatgcattgatagttcatagtctaccttcttccgggtgagtgtgtgagctttcttcttagtatgtcttattatttaccaggtccaaaaataatactactcaccacaaatgggaacacagaggttttttggcaggagcctracatcactaaagcacaaagaaaatgagaatggaatccgtgaattgtttttcctttttcctaaaccatgtgcctccttactcactgtctttttactggtcctctctagccttaattctttctttgcatatgtctatttttcaaagtctacatcatggattcttactcattcacctacacttttaaacttcactactgtttatcaaataggtagagaagaaaagaaaggccaaaatgaggaaatagtatgaagatgtgaagatggaaaa

SEQ ID NO: 722985 - DNA, 632 bp, Homo sapiens
ccgtgaggtcctcgactgccccctaatcaccctggatgcccaactcttcayccacgatatctcaggggacccatttcccccagatatcccgggagaacacggcctgaccccgtagccccggaacccccaattccccctctaggtatcctaggcaaccgctgctacccccatgaattccctcagagggcccgttccccccatggcccacatacctccagagtccccctccacaggtccccaggggcccccagctcccctccccccagttcactaagaccctgagtgcccaggtgtccccagtgaccacgggcagacccctccccgcacatctgcacgtctccctggagactcctgagagcccctcccctgctctggtgcgcggccctttccctcgtgtgtgggtgtgggtaggggacctccagcccagcctccatcgctgggcccctgccccctgccaccttcacttgggcgccagagccgctctgtttaccacctgtcagaaggaaaaggtgtggagcagacaggcgggacggggatggcggcgactcgccctgtccttccccaacgaccccaatccctgtacctcctctgctccccctagggtccgcggcgtcccctgtgcgcggctccat

SEQ ID NO: 722986 - DNA, 632 bp, Homo sapiens
ccgtgaggtcctcgactgccccctaatcaccctggatgcccaactcttcatccacgatatctcaggggacccatttcccccagatatcccgggagaacacggcctgacsccgtagccccggaacccccaattccccctctaggtatcctaggcaaccgctgctacccccatgaattccctcagagggcccgttccccccatggcccacatacctccagagtccccctccacaggtccccaggggcccccagctcccctccccccagttcactaagaccctgagtgcccaggtgtccccagtgaccacgggcagacccctccccgcacatctgcacgtctccctggagactcctgagagcccctcccctgctctggtgcgcggccctttccctcgtgtgtgggtgtgggtaggggacctccagcccagcctccatcgctgggcccctgccccctgccaccttcacttgggcgccagagccgctctgtttaccacctgtcagaaggaaaaggtgtggagcagacaggcgggacggggatggcggcgactcgccctgtccttccccaacgaccccaatccctgtacctcctctgctccccctagggtccgcggcgtcccctgtgcgcggctccat

SEQ ID NO: 722987 - DNA, 568 bp, Homo sapiens
aaaagaacttgagatgggtgaatagacttacattttatttctgctctcagactgggaacggtgtctttgggaatgtgattgaatttctctgaccctaagttttcggagcaatagaatatgaataaaaatttatgtctcttgcagaaatccaaaacactgcatgttctcactcataggtgggaattaaacaatgagaacacttggacacagggcagggaacatcacacaccagggcctgttgtggggtgggggactgggggagggatagcattaggagaaataccaaatgtaaatgatgagctgatgggtgcagcaaaccaacatggcacatgtatacaacgttgtgcacatgtaccctagaacttgaagtataataataataataataataaattctgtctcttggtttgcagcgagcatcaaatgttgtaaccctctttaagcacctggcatggtgcatgttaatgatcattgcctttccttctgcaaaccaccacacccrggcagagtaatcttttaatttagtatccttgattaaatgactttaagtcaaactctcacttaatct

SEQ ID NO: 722988 - DNA, 621 bp, Homo sapiens
aaattgttttggcacaaagattatttcacaccttgaaataatcttttttatgaccttaggataaatttttaaaataaatccctaaagcactttttaaagaccagctgcatggtatcccactgtatgttttataattcttaagatctatcctatgtatggatagacgattttaaaaacattgtcatctattcttttgtacataatgcaaatatattggttaggatacattgttagaagcagatttgctgggtcaaatggtatttgtatttttaatagctatttccttccatasaggtgtaacattttgggagaagtagttggccagtattgtttaagagacacagaaatgtctttttaaatgggactctagtcccatttttaggaaactgattatcaaaatatttacatcagtggaaatcctgaagaaagcaaatagtttcacttgcatgcttttactttcatttattaaaagtaaaggatggttttaatcccagagaggctaaagttaaaaggataaaaaccataggaccattagaaaataagcatacccaatgataattatataataaaaagtttctaaaggggcaaaagtaaatttcttctcttccaacttaatagttc

SEQ ID NO: 722989 - DNA, 597 bp, Homo sapiens
actaaattcacaatgtctgctgagtcagaccagttttatatccatctttggaaatctacctgtatttcactgatcccttctttaatggtaaatcagaccctactttgtatttaaactcactatactgtacaccaaactagaggtagcttataaagaaaatacattactcttcctaacattttaggtttttgtgcccagcataccttcttaaaaaaaatttctggagctctttgaggccttggggaaaaaataaaatgaatgaaaaaggagctgacctgggatatcatggaggctaaatatttcactaattctgttttgttgaagattacagtctgattyggtttatttgttttttgttttggtttgagagctttccttctttctccctttatttggcactcatccttcttaagagactatttgagttttagtagctggactctgggaaccgcaggcatgttgtttggcagatggatttttgcagttctacagaacaaacctaattatccattttgagttgtcatctgagtttctgtttgagttgccaatgtttgtccattggatttttctcctgtccattaagcaattttctcgcat

SEQ ID NO: 722990 - DNA, 597 bp, Homo sapiens
actaaattcacaatgtctgctgagtcagaccagttttatatccatctttggaaatctacctgtatttcactgatcccttctttaatggtaaatcagaccctactttgtatttaaactcactatactgtacaccaaactagaggtagcttataaagaaaatacattactcttcctaacattttaggtttttgtgcccagcataccttcttaaaaaaaatttctggagctctttgaggccttggggaaaaaataaaatgaatgaaaaaggagctgacctgggatatcatggaggctaaatatttcactaattctgttttgttgaagattacagtctgattcggtttatttgttttttgttttggtttgagagctttccttctttctccctttatttggcactcatccttcttaagagactatttgagttttagtagctggactctgggaaccgcaggcatgttgtttggcagatggatttttgcagttctacagamcaaacctaattatccattttgagttgtcatctgagtttctgtttgagttgccaatgtttgtccattggatttttctcctgtccattaagcaattttctcgcat

SEQ ID NO: 722991 - DNA, 1040 bp, Homo sapiens
atggcataggaaaatgtttattggaaaagtaattgagacttcaggaatatgggattatatgtttttataggaaacagattagggcattagaaaatgtttctttaagggaacaagataaattaggccaaatcagaccacactttgactaagatagataaacaaagagatacttgatataggcctagtctctacataaaagtgaagtggatataaatgtgaataattaatttattacatgacaaagacggtaaaaggagggaaaagaaaaaaaaactgttccatagacacatgcctttttgattaagactgataattctcagagcttgtctaccaagcaatctggcttaaagaaagcactaatggattttttcatgtagaagtgtattcatgttggaaaaggtgttgtaagcatagtactgaatatattggaatttttgaaaaacctatgcaactgtaattgctcagtgttttatgcagggcaatgtgtaattgctgtcttttgtttatttttagataaaagatctgcagctatggaattcttctccatgacattttcacagaacatactacttgtgatttatatcatgtccttactcaaggtaattttattttttaagaataccataaaatctatttaagtcacatcctgtctcccagtgaaataaaagacatctcagaagggatttcattgtatccttttgggtgtgtgtgttttgtatttttgcattttcccaggaagaaatggagacagtgactcagttaatgcattatgcttatcctctcattgctccattcttggttttggtgatcatttgaaatacatggagattgtttgctcaactctctcaggctgctgcttgttaaataacagcacttgtcagccctatgtcatttttgtagtacagttacaaataaacaggactccaggcctcaccagtcaaagttaccctttggaaactaatttctccctcttccctctttayttctgctaccattgagagagaacgagagagagagagagagagaatattttggcacta

SEQ ID NO: 722992 - DNA, 1040 bp, Homo sapiens
atggcataggaaaatgtttattggaaaagtaattgagacttcaggaatatgggattatatgtttttataggaaacagattagggcattagaaaatgtttctttaagggaacaagataaattaggccaaatcagaccacactttgactaagatagataaacaaagagatacttgatataggcctagtctctacataaaagtgaagtggatataaatgtgaataattaatttattacatgacaaagacggtaaaaggagggaaaagaaaaaaaaactgttccatagacacatgcctttttgattaagactgataattctcagagcttgtctaccaagcaatctggcttaaagaaagcactaatggattttttcatgtagaagtgtattcatgttggaaaaggtgttgtaagcatagtactgaatatattggaatttttgaaaaacctatgcaactgtaattgctcagtgttttatgcagggcaatgtgtaattgctgtcttttgtttatttttagataaaagatctgcagctatggaattcttctccatgacattttcacagaacatactacttgtgatttatatcatgtccttactcaaggtaattttattttttaagaataccataaaatctatttaagtcacatcctgtctcccagtgaaataaaagacatctcagaagggatttcattgtatccttttgggtgtgtgtgttttgtatttttgcattttcccaggaagaaatggagacagtgactcagttaatgcattatgcttatcctctcattgctccattcttggttttggtgatcatttgaaatacatggagattgtttgctcaactctctcaggctgctgcttgttaaataacagcacttgtcagccctatgtcatttttgtagtacagttacaaataaacaggactccaggcctcaccagtcaaagttaccctttggaaactaatttctccctcttccctctttacttctgctaccattgagagagaacragagagagagagagagagaatattttggcacta

SEQ ID NO: 722993 - DNA, 1121 bp, Homo sapiens
aagtgcggttacctgctgtgctcggcgcttgtcagcccgctggttctggtggtagatgcggctaaagttggacacaatgactggcacaggcagggcaatgaccaagacgccactgagtgagcagatggacccgaaaatcttgccagcaatggtgctgggcaccatgtctccgtagctggagcgaggggaggtaggccaaggtcaggaaaagtgcccacctacctttcagtcccccactccatcccatctaatccggactagctctgtgaccctggccaggcactcaaaccttctgagtccctcagtttcttgctctgtaaaatgctgggtggccaagtgagaaatgggcctggccctcaacccctaccatctgctgcccctgtccaagctacataccaagcacctgagtcagctagaaatctatgaaaaccaagcagaggggagcatgaggaagtcacaggcagtgaacacagcctcctggggagagagtcccagcaccacaggccagccgaagggcttcaagtcccgggaggagtgttttgttggttttggctgcctctgtcttacctgctctaggtaggaccccttttcattcccctataggggaatccttgaaaactgtccacatatgacaaaayagggaggagccttgaaaccctcctgcctttctccatgccacccacctcccacagagacagagcagagccaaccttactaacttgttcacagagagctcccctgaagatcagggagattctgtaactgactcgcccaagatcacactgcatactcttgttctgaccgcagaaccaatcagaactcctccagagaaacacagcctctgcagtcttcagcctctaagccttttctcaggctgtgccctaggatggctgttccttatttcggtattttcactcattttaagcattcaggactctgctcaaaagtctttccaacttggccattgctggctctgtgatgtgtcatctcagagcgtgtcctcaactgtgagacatgggcagccatccaccatcacagagttgttgtgaggacttgaatagagtaaaagccatcaaaatactcagttccagcccactgtcagcgctcagtatttgtttgtc

SEQ ID NO: 722994 - DNA, 1739 bp, Homo sapiens
tgcctcctgtgctggtatggtcgagggcagtatttgctgaacaataatacaatcaatcacacttgccaaactaccagggttccatccatcaaattcaagacatatactgaccacttcaattaaccgtgtattagtgatataggtctcaaatgttgaagagcatcaaaatcacctggggaaattgttaaaaagtataaatgacctggccttcccacagtgattctaatgtaatgcatttgaggatgggacctaggatctgtattgttaccaatctcatcaataatcccatcatacaccaaagtttgagaatcactggtttgcagaaagctatgcctagagattaggacaagtcactattcagagcaggtgcctactttttgacttgctgtcccagggaagaagggaagatgacacaacaacattcccacttgtagaaagaagagaataaactgggctgggtgcagtggttcatgcctgtaatccagcactttgggaggccaaggtgggccaatcacttgaggtcaggagtttgagaccatcctggtcaacatggtgaaaccctgtctttaccaaaaatacaaaaattagccagatgtggtggtacacatatgtaatcctagcaactcgggagggtgaagcaggaaaatctcttgaacccaagaggcgggggctgcagtgagccgagatcacaccactgcacttcagcctgggtgacagagtgagactcaaaaaaggaagagaataaactgaagtttctgatggattggatgttggctcccaattatttcccctctgtgttttcatatctttgccatttgactttgcagttcctcccactgtttccctaccttgtggttagacttaaccatgtgactcacttggccagtgagatgygggcgaagtaacagagtgccagttccaagcttaaaccgtgttcctgcttaccctcttgatctgtaccttgagaacagcttttcctggtagctgctgccagtccagacaggaccccagagttacacattgaccagcctaagcccaagcaagaagccaagcccagctggacccaacttgaatcagagctttttagccaagagcagttagatcaatccatctccatatgaaatccatacacatgaaagaaaaactgattgcaattttgagccaatggatttgggggtgacttgtcactcagcaaaagctaactcataacctctccccagttttagcattatttgggtagcaggagtgggaactcatgctccctacattgaaaaggggctcagactttaagcaaaataattttcctaattttatgaaacattaaggatatatactactaggaagtattctcatctgaattcacagtgtgtcatttatttgaatatacctgaagaacgaagcatatgaatgtagaagagtgaaataagagaaaataggaatatttaggtcatataacagcatcattttttttttcaaaatagaaacagattgttgtacagaatccagcaatcctggtggaaatactctgcaatggaagcatgttttccattaacttaaatattgtgttaacctcaatcaaaaatatactttcttaaactaaatacagaatttatagttttgagaaacagagcctacagtctaaatgggcaaaggaactgatgcaaatgactctgtcccacatgattaaaaatattcttagttttattttgtaaaaatgaaattaaaacctaaaatagaat

SEQ ID NO: 722995 - DNA, 518 bp, Homo sapiens
ccaaactcacggggatatgtgtcccaccaactgacccatatttgagcaaattgatctagattcttgataaatattattgyccaataaacatcacatacttttaagatctgggtttaacatattatcagaccttggagacatggctccttagatccccagaagcagagttaatttagctaaccagtggtgagctgcattctgctgtacgagtttgctctacctcctaatgtagctataatatttgtaggagattccagcattggccaaaagagtggactaccctccctttatgatttcttggaaccctaaaactttatgagactatgaatatgactaggaacaaggagatgattttcttctcagtagtgaaaatcattatatatacatatatgtctttataatcctaatagcacaacttatattgttactatgttatatgggccaagcattgttccatgctcaaattaactcatttaattctcataagaacttatgtggtaaatactattattatccca

SEQ ID NO: 722996 - DNA, 518 bp, Homo sapiens
ccaaactcacggggatatgtgtcccaccaactgacccatatttgagcaaattgatctagattcttgataaatattattgcccaataaacatcacatacttttaagatctgggtttaacatattatcagaccttggagacatggctccttagatccccagaagcagagttaatttagctaaccagtggtgagctgcattctgctgtacgagtttgctctacctcctaatgtagctataatatttgtaggagattccagcattggccaaaagagtggactaccctccctttatgatttcttggaaccctaaaactttatgagactatgaatatgactaggaacaaggagatgattttcttctcagtagtgaaaatcattatatatacatatatrtctttataatcctaatagcacaacttatattgttactatgttatatgggccaagcattgttccatgctcaaattaactcatttaattctcataagaacttatgtggtaaatactattattatccca

SEQ ID NO: 722997 - DNA, 584 bp, Homo sapiens
gcgttgatgacatcaacctagccttttattttaaatcccctgtcaacgcaattagataatacaaaaataacaaaactataggaggttgaggatggggctgggggccaaggagattacttggtttgaaatgaataaattgtctatcgtaagggaattctttggtgcattttattgtgtgaaatgagcctggtcatatgactgccctgcctccctggaggcctccctgccctcctccttcccacagacacttatgggaggtactggccaactctgtatggccagtactgccctaagcaagaccaagaagcttagtctcaatttcagagagttattttggcaacatatttgggaaaatgatagttagatgctgcgttagccagcctctgcatgattttttacgcaraacaaacagttccaaatatcagtgctttcagcaactcatatatttctcacttatggtgcatgtcgctgatggttggctgctgctctgatctcactccagtatcagcttcagtcaaggaacgtattgttgtcaaggaaaggaaaaagaacagtggtgagaccaaaggatcttaaagtttcta

SEQ ID NO: 722998 - DNA, 585 bp, Homo sapiens
cattgtcatcgtctttatcatcctttgcaattattacatttactgccttctagtacaaggaaggggatgggtggctggctggctaggtggatagaaggatggaagaggtaagtacaaggaaggggatgagtggctggctggctagatggatagaaagatggaacaggtaagtataaggaaggggataggtggctggctggctagatggatggaaggggtggaaggggatgcaagaggtaagtacaaggaaggggatgggtggctggctggctagatggatagaaggttggaagacaggaaggatggaacggaagaagagggaagaacaaaaatggaaacacatagtactgttaggtgaactgaacttctaaggtgccgattctcagtgatagaatcttgagttgatacctccttgggtggcatggagcctatacctttgtagatcttgggaaacaacttctaaargaatcatagttgtatgtaatcgtaagtacaacaataattattttaggcacataacccaaaggttttcttacaaggaatctatgaaccttaagagtgagggcttctgttaagagtaagggc

SEQ ID NO: 722999 - DNA, 585 bp, Homo sapiens
cattgtcatcgtctttatcatcctttgcaattattacatttactgccttctagtacaaggaaggggatgggtggctggctggctaggtggatagaaggatggaagaggtaagtacaaggaaggggatgagtggctggctggctagatggatagaaagatggaacaggtaagtataaggaaggggataggtggctggctggctagatggatggaaggggtggaaggggatgcaagaggtaagtacaaggaaggggatgggtggctggctggctagatggatagaaggttggaagacaggaaggatggaacggaagaagagggaagaacaaaaatggaaacacatagtactgttaggtgaactgaacttctaaggtgccgattctcagtgatagaatcttgagttgatacctccttgggtggcatggagcctatacctttgtagatcttgggaaacaacttctaaaakaatcatagttgtatgtaatcgtaagtacaacaataattattttaggcacataacccaaaggttttcttacaaggaatctatgaaccttaagagtgagggcttctgttaagagtaagggc

SEQ ID NO: 723000 - DNA, 585 bp, Homo sapiens
cattgtcatcgtctttatcatcctttgcaattattacatttactgccttctagtacaaggaaggggatgggtggctggctggctaggtggatagaaggatggaagaggtaagtacaaggaaggggatgagtggctggctggctagatggatagaaagatggaacaggtaagtataaggaaggggataggtggctggctggctagatggatggaaggggtggaaggggatgcaagaggtaagtacaaggaaggggatgggtggctggctggctagatggatagaaggttggaagacaggaaggatggaacggaagaagagggaagaacaaaaatggaaacacatagtactgttaggtgaactgaacttctaaggtgccgattctcagtgatagaatcttgagttgatacctccttgggtggcatggagcctatacctttgtagatcttgggaaacaacttctaaaagaatcatagttgtatgtaatcgtargtacaacaataattattttaggcacataacccaaaggttttcttacaaggaatctatgaaccttaagagtgagggcttctgttaagagtaagggc

SEQ ID NO: 723001 - DNA, 585 bp, Homo sapiens
cattgtcatcgtctttatcatcctttgcaattattacatttactgccttctagtacaaggaaggggatgggtggctggctggctaggtggatagaaggatggaagaggtaagtacaaggaaggggatgagtggctggctggctagatggatagaaagatggaacaggtaagtataaggaaggggataggtggctggctggctagatggatggaaggggtggaaggggatgcaagaggtaagtacaaggaaggggatgggtggctggctggctagatggatagaaggttggaagacaggaaggatggaacggaagaagagggaagaacaaaaatggaaacacatagtactgttaggtgaactgaacttctaaggtgccgattctcagtgatagaatcttgagttgatacctccttgggtggcatggagcctatacctttgtagatcttgggaaacaacttctaaaagaatcatagttgtatgtaatcgtaaktacaacaataattattttaggcacataacccaaaggttttcttacaaggaatctatgaaccttaagagtgagggcttctgttaagagtaagggc

SEQ ID NO: 723002 - DNA, 585 bp, Homo sapiens
cattgtcatcgtctttatcatcctttgcaattattacatttactgccttctagtacaaggaaggggatgggtggctggctggctaggtggatagaaggatggaagaggtaagtacaaggaaggggatgagtggctggctggctagatggatagaaagatggaacaggtaagtataaggaaggggataggtggctggctggctagatggatggaaggggtggaaggggatgcaagaggtaagtacaaggaaggggatgggtggctggctggctagatggatagaaggttggaagacaggaaggatggaacggaagaagagggaagaacaaaaatggaaacacatagtactgttaggtgaactgaacttctaaggtgccgattctcagtgatagaatcttgagttgatacctccttgggtggcatggagcctatacctttgtagatcttgggaaacaacttctaaaagaatcatagttgtatgtaatcgtaagtacaacaatarttattttaggcacataacccaaaggttttcttacaaggaatctatgaaccttaagagtgagggcttctgttaagagtaagggc

SEQ ID NO: 723003 - DNA, 595 bp, Homo sapiens
cacgcaggctcccaggcaccatcacccccctcccccgtcgcccctccctcacggggagccccttccccctggaaagacagcaggtactgtagcctcgcctgctggccaggggcgccggctcagaggacctgccctgacctgcacgtgctgaccagacagcccagcgtaaggacccgcgatcccacgccaccgccctgggtttaccacggtcaccrccacctctctcacagggcccccgggggacccagccgcgcccggcctggtgtctgcaccgagggaccgcgtctcacgcccggcggctcctgcaggggaagccgtggtcagcgactcaccacgaggacagggcagggcggctgagtgcggaagagaagcatgaagctgggggcgggggtgggggaggaggaacaaaagttgcatctagacagaggtgaacgaaacaaaaccaaaacccgaacgtgttccgtcgcaggatgggcgccgcccgtcccgggcccttagcccgacatctcttctcgctgctccttgttcctgcgcacctcggccgcgtgcagctcctgcaggacagggggcgggagggcctgagggcgggggtggc

SEQ ID NO: 723004 - DNA, 595 bp, Homo sapiens
cacgcaggctcccaggcaccatcacccccctcccccgtcgcccctccctcacggggagccccttccccctggaaagacagcaggtactgtagcctcgcctgctggccaggggcgccggctcagaggacctgccctgacctgcacgtgctgaccagacagcccagcgtaaggacccgcgatcccacgccaccgccctgggtttaccacggtcaccaccacctctctcacagggcccccgggggacccagccgcgcccggcctggtgtctgcaccgagggaccgcgtctcacgcccggcggctcctgcaggggaagccgtggtcagcgactcaccacgaggacagggcagggcggctgagtgcggaagagaagcatgaagctgggggckggggtgggggaggaggaacaaaagttgcatctagacagaggtgaacgaaacaaaaccaaaacccgaacgtgttccgtcgcaggatgggcgccgcccgtcccgggcccttagcccgacatctcttctcgctgctccttgttcctgcgcacctcggccgcgtgcagctcctgcaggacagggggcgggagggcctgagggcgggggtggc

SEQ ID NO: 723005 - DNA, 523 bp, Homo sapiens
tagaataaaatcagccctatccgatttaacccagcttatcaatacagtttttcctamaggatattatactcatttgaacctctgggcctctgcctatgttttcctgttcctagtttgctgtctcagttcctttttgccaatcagaatcctataaatccttcaaggtataatctagagcttattcttctttgaaacttgccctcacgctgatacatttcttgactgatttcctgtcatagagctagggtagtacagctaagggtaccctaggtagtacagtacccttaatacttattggctgtgcaattattgcattccttaatcatagatgtccaagcaaatttcttccacttaaatgtaaaagtaaaataacaaaatataaagcttgaaaagtggggggtggtggtggggtggaaaaacacataatatcattacccatatattttcttccaaaaactcttcaatgtaataaatatgctcaatccttagagggttcaggtgaaataaacatggcaatacagtc

SEQ ID NO: 723006 - DNA, 1334 bp, Homo sapiens
gctttatttccctcaagtgttagtaatcataatgcgatcctaatgtattagatttggttccctactttatttctaggcttttcagttttgtctagttgatcatattttttgttttgttttgtttttgtttttttagctaaaaatggcctgtggatctatcctgtgtgatatttgacataccctatttatatttaaatagatgctttgagaaatgtaaggtttcctttacaatattctaagtttgggcaaagttcaccattgcattagggttgaagtataactgattatctaacttccatcgcttcttcacttccttaaaattctttgattcagtatgtggggggagggcgagaagttgtttctgatcaaaacactttttctgaagaatattctttggtactgatatacttcgtcaatatgatttatagcaagatgtgcgctacaccagtattgtgttaaatgtgcttccagatgacctagcctctgatcattttattcttttttgatttttcaattgctcatataattcatttcaaacaaaaggaagaaagtgatcatagaaataggctaggtagcgggaaaggaagacagaaatgcttaacaagttgcaaacaggaaaaagaaattaggacaaacgggcttcagaaaagccgcaagcacgctggtaaacaaacttaggctgccctggagcaaccccctgtttgtctttgctttatggtgcaatgtagtctagtggtctgatcaactgggaatctcagttttgcctcagactccctgttctgtactgaatggccttggacagggatctctgatgtgagataggcaggttttcaaactgtgagggtcaatgtttataagtggaaatgttgcaaaggggtgaagggcattattacaactaaaggaagcactattatatagaaacaatcaaatcaaggatttttttttctgcacatttagagccaaacactcaattttcctgccctgacaatttgtttatttgttcrtgtttggattttattgaggtccctgataacacaggcattttggaaatgggtgggagtatgtgtgaatagcaaaagaaatcatctactggcaggtattgatagtttcttctgttttgtgcatcctctcttcctatccctagaactgatctctttttttaaataagaatatatattgtaatgtatattttagattttataataagcatgcttagttatttgcatttttctcaaaataatattatatgtacatattagtaatcaagatattcaaacacatctttagatgaaaccatgtttaaagaaagctctacttctattaaaatcctgcga

SEQ ID NO: 723007 - DNA, 683 bp, Homo sapiens
cctctattcctcctaattccttaagtagagtcacccaggaagtatttattgatctgatttaaccagttcatgtggcacaataagactttttgttttgtacattataccctgttaatatggtcgcaaatagtattgggttttggataattatttcttagtatgaactcataatgagcccagaacccactttttcctccaagtttctgtctgtccctttctcttctaattttttcaaaaatgtgcatgtcatccctgtgcagggaccatgctaatcttctctgtatcattctaattttagtatatgtgctgctgaaataagcgcctttcgattttttttttttaagatggagtcttactctgtcaccaggctggagtgcagtggcgtgatctaagctcgctgcaacctccgactccctggttcaagcgattcttctgcctctccagtagctgcatttatgggctcgcgccaccacgcccagctagtttttttttttttttttttttttgtattttwagtaaaaacggggtttcaccatgttggccaggatggtctcgatctcctgacctcatgatctgcccgccctggcctcccaaggtgctggcattacaggcatgagccaccgtgcccggccgccctttcaattttttttttggagacagagtcttgctctgtctcccaggct

SEQ ID NO: 723008 - DNA, 596 bp, Homo sapiens
atggggttaaaatagaagattgttgacagatagcatactgggtatgtactgcccctagggaactcttcagtatagataaatggaagcctataattaaatacttattttcaatcttctagtcaacaattttcagaagcattgataagcacaaataaaatayattggtgatcaacttaatagtacacccttaacattaatattcctacttgccttttataatttttgatccctcatccctgctccctgggataacctccccaatacaccatctttcaagtttattttcagaggaatacagattaggatattagttttttcaaataatcaactttcaaacttcatacatttaatcttctgtatttttaaatttttccataaatttttataactatattagtagcttcctaaattttttttcctatcaagttagctgtttttatttcatttttttagataaatgcttaggtcactgattgtcaacttttattcttttctaatacatgaatttagagctgcaatgttcctagcaaattttaattaaactgcatggtacaagttgtgctttgcgttattttctcattatttaaatacaaaca

SEQ ID NO: 723009 - DNA, 596 bp, Homo sapiens
atggggttaaaatagaagattgttgacagatagcatactgggtatgtactgcccctagggaactcttcagtatagataaatggaagcctataattaaatacttattttcaatcttctagtcaacaattttcagaagcattgataagcacaaataaaatatattggtgatcaacttaatagtacacccttaacattaatattcctacttgccttttataatttttgatccctcatccctgctccctgggataacctccccaatacaccatctttcaagtttattttcagaggaatacagattaggatattagttttttcaaataatcaactttcaaacttcatacatttaatcttctgtatttttaaatttttccataaatttttataactatattagtagcttcctaaattttttttcctatcaagttagctgtttttatttcattttttwagataaatgcttaggtcactgattgtcaacttttattcttttctaatacatgaatttagagctgcaatgttcctagcaaattttaattaaactgcatggtacaagttgtgctttgcgttattttctcattatttaaatacaaaca

SEQ ID NO: 723010 - DNA, 628 bp, Homo sapiens
tatacacctaaaaggatatacacctaaaaggatacacctaaaaggatatatgccataaccctgatttaaatgcctaattgtcaccctggcacatattatgatagttcatcagtggaaaggcttagtcggagaaacttttcttttttttttctttgagatggaatctcacactgtcgcccaggctgggttgcagtggtgcgatctccgatcactgcaacctccgcctcctgggttcaagcgattctcctgcctcagcctcctgagtaactgggattataggcacccgccgtcacgcgtggctaattttttttttttttttgtatttttagtagacacagggtttcactatgttggccaggctggtcttgaactcctgaccttgtgatctgcccacctcaggcttccaaagtgctgcaattacagacgtgagccactgcatctggcmagctgaagaaagttttttccacttgaattttcagcctaccctactcctttctctattattatatagcataagcttagaagctattcctttcaatagtctcctaggcaattctgcttctaatatcatcactataaccctttagccatccttcctcactctgactttactgacaacagtcaatct

SEQ ID NO: 723011 - DNA, 607 bp, Homo sapiens
taatatgtattatatatacacaaagtgtggcagtcagggccataagaatgctcaggggaactcaggacagagcagggatctctrcaatgaggtgagacaagggataaaattaaggaaattatgttatttcaatgttaaatggtgacccagaaggcacagagcttgaggatgctcagatcgcaccagttattaaactctaactcaatatgaacatattttcctccatcttagaggctcaggatccttttttgttttaagagagaaagtcttgctatgttgctcagggctcaaatgatattccagcctcagcggaatacattttagtggctcattttcaagtcttaagagtttctcaagtgatcatctattctgttctgctaccctacatacacacacacacacacacacacacacacgcacacacacacacacttacttcaaaatcaagagattgccctcttccttggtttgggaaatggaaaataaaacatctcagaaatcccaaagcaacataattcttcatttacttttccctaaaggctatatagatggagatagataggtgcggacccggggtgatggttatggaataccagaaccagcgtgg

SEQ ID NO: 723012 - DNA, 607 bp, Homo sapiens
taatatgtattatatatacacaaagtgtggcagtcagggccataagaatgctcaggggaactcaggacagagcagggatctctgcaatgaggtgagacaagggataaaattaaggaaattatgttatttcaatgttaaatggtgacccagaaggcacagagcttgaggatgctcagatcgcaccagttattaaactctaactcaatatgaacatattttcctccatcttagaggctcaggatccttttttgttttaagagagaaagtcttgctatgttgctcagggctcaaatgatattccagcctcagcggaatacattttagtggctcattttcaagtcttaagagtttctcaagtgatcatctattctgttctgctaccctacatacacacacacacacacacacacacacacgcacacacacacacacttacttcaaaatcaagagattgccctcttccttggtttgggaaatggaaaataaaacatctcagaaatcccaaagcaacataattcttcatttacttttccctaaaggctatayagatggagatagataggtgcggacccggggtgatggttatggaataccagaaccagcgtgg

SEQ ID NO: 723013 - DNA, 639 bp, Homo sapiens
cactgcaacctctacctcctgggttcaactgattctcctgcctcagccttccaagtagctgggattacaggcacctgccaycaggcccagctaatttttgtatttttaatagaaacgtggtctcgccatgttggccagggtggtctaaatctcctgacctcaggtgatccacccacctctgccttccgaagtgttggcattacttgcgtgagccactgtgcctggcatagatgggaataaagtaattcttataaagtacttggcttagctgctggcaaataataatgcttactgattcttgcatattacccatagtttattggctaactttatgtcttccttaaattatgaaattctataaagtatccttgtctattttaaaattatactcatttttataacttacatgctttatttgtatatatccaggatactagatatttgtaatccaaattggaggttattttttgtcatttgatttttttttctgtaatgtgtgttctcaccacatagaagtttttacatttttatgtagtcagatttattcatgtttttatttatggttatgttaaagattatagctattagggacctatttcttcagggtttataatttatgtatgttgttacaaatagaga

SEQ ID NO: 723014 - DNA, 639 bp, Homo sapiens
cactgcaacctctacctcctgggttcaactgattctcctgcctcagccttccaagtagctgggattacaggcacctgccaccaggcccagctaatttttgtatttttaatagaaacgtggtctcrccatgttggccagggtggtctaaatctcctgacctcaggtgatccacccacctctgccttccgaagtgttggcattacttgcgtgagccactgtgcctggcatagatgggaataaagtaattcttataaagtacttggcttagctgctggcaaataataatgcttactgattcttgcatattacccatagtttattggctaactttatgtcttccttaaattatgaaattctataaagtatccttgtctattttaaaattatactcatttttataacttacatgctttatttgtatatatccaggatactagatatttgtaatccaaattggaggttattttttgtcatttgatttttttttctgtaatgtgtgttctcaccacatagaagtttttacatttttatgtagtcagatttattcatgtttttatttatggttatgttaaagattatagctattagggacctatttcttcagggtttataatttatgtatgttgttacaaatagaga

SEQ ID NO: 723015 - DNA, 639 bp, Homo sapiens
cactgcaacctctacctcctgggttcaactgattctcctgcctcagccttccaagtagctgggattacaggcacctgccaccaggcccagctaatttttgtatttttaatagaaacgtggtctcgccatgttggccagggtggtctaaawctcctgacctcaggtgatccacccacctctgccttccgaagtgttggcattacttgcgtgagccactgtgcctggcatagatgggaataaagtaattcttataaagtacttggcttagctgctggcaaataataatgcttactgattcttgcatattacccatagtttattggctaactttatgtcttccttaaattatgaaattctataaagtatccttgtctattttaaaattatactcatttttataacttacatgctttatttgtatatatccaggatactagatatttgtaatccaaattggaggttattttttgtcatttgatttttttttctgtaatgtgtgttctcaccacatagaagtttttacatttttatgtagtcagatttattcatgtttttatttatggttatgttaaagattatagctattagggacctatttcttcagggtttataatttatgtatgttgttacaaatagaga

SEQ ID NO: 723016 - DNA, 639 bp, Homo sapiens
cactgcaacctctacctcctgggttcaactgattctcctgcctcagccttccaagtagctgggattacaggcacctgccaccaggcccagctaatttttgtatttttaatagaaacgtggtctcgccatgttggccagggtggtctaaatctcctgacctcaggtgatccacccacctctgccttccgaagtgttggsattacttgcgtgagccactgtgcctggcatagatgggaataaagtaattcttataaagtacttggcttagctgctggcaaataataatgcttactgattcttgcatattacccatagtttattggctaactttatgtcttccttaaattatgaaattctataaagtatccttgtctattttaaaattatactcatttttataacttacatgctttatttgtatatatccaggatactagatatttgtaatccaaattggaggttattttttgtcatttgatttttttttctgtaatgtgtgttctcaccacatagaagtttttacatttttatgtagtcagatttattcatgtttttatttatggttatgttaaagattatagctattagggacctatttcttcagggtttataatttatgtatgttgttacaaatagaga

SEQ ID NO: 723017 - DNA, 639 bp, Homo sapiens
cactgcaacctctacctcctgggttcaactgattctcctgcctcagccttccaagtagctgggattacaggcacctgccaccaggcccagctaatttttgtatttttaatagaaacgtggtctcgccatgttggccagggtggtctaaatctcctgacctcaggtgatccacccacctctgccttccgaagtgttggcattacwtgcgtgagccactgtgcctggcatagatgggaataaagtaattcttataaagtacttggcttagctgctggcaaataataatgcttactgattcttgcatattacccatagtttattggctaactttatgtcttccttaaattatgaaattctataaagtatccttgtctattttaaaattatactcatttttataacttacatgctttatttgtatatatccaggatactagatatttgtaatccaaattggaggttattttttgtcatttgatttttttttctgtaatgtgtgttctcaccacatagaagtttttacatttttatgtagtcagatttattcatgtttttatttatggttatgttaaagattatagctattagggacctatttcttcagggtttataatttatgtatgttgttacaaatagaga

SEQ ID NO: 723018 - DNA, 642 bp, Homo sapiens
aaggaaaggggcgttttaatgtgggagtggctagcaatgcaaatgctacaaagtgcaaaaaagccaaagactaaatcgggtttcctatgggcattggcagcctcactaatgtagcttcagatgagtattaggtgytaagccagccttcgtgaagtatgtcagaggtccagccagcgtccacattttgaagcctgtttttgtactgccctcaagcgaggaattatttttacatttttaaaagagtgtaaataaaaacaaaaggtctgactttttgtcagagactgctatggctcacaaagccttaaatatttactacctggcccttttcaggaaaagtttgcagactccggtacaaataaaagaaatatatttttactctgtttcaagatgcttgactggaaaagaaagaacgtatgagtcagagagaaattgataggattgaccaaaccttcaaaaaatgggaaaaaggctgagtgcggtagctcacacctgtaatcccagcactttgggagggtgaggcaggaggattgcttgagctcaggagtttgagaccagcctgggctatgtggtgaaacatcgtctctactaaaaatataaaaattaggtgggcatggtggcacacgcctgtaatcccagctactg

SEQ ID NO: 723019 - DNA, 642 bp, Homo sapiens
aaggaaaggggcgttttaatgtgggagtggctagcaatgcaaatgctacaaagtgcaaaaaagccaaagactaaatcgggtttcctatgggcattggcagcctcactaatgtagcttcagatgagtattaggtgttaagccagccttcgtgaagtatgtcagaggtccagccagcgtccacattttgaagcctgtttttgtactgccctcaagcgaggaattatttttacatttttaaaagagtgtaaataaaaacaaaaggtctgactttttgtcagagactgctatggctcacaaagcctwaaatatttactacctggcccttttcaggaaaagtttgcagactccggtacaaataaaagaaatatatttttactctgtttcaagatgcttgactggaaaagaaagaacgtatgagtcagagagaaattgataggattgaccaaaccttcaaaaaatgggaaaaaggctgagtgcggtagctcacacctgtaatcccagcactttgggagggtgaggcaggaggattgcttgagctcaggagtttgagaccagcctgggctatgtggtgaaacatcgtctctactaaaaatataaaaattaggtgggcatggtggcacacgcctgtaatcccagctactg

SEQ ID NO: 723020 - DNA, 642 bp, Homo sapiens
aaggaaaggggcgttttaatgtgggagtggctagcaatgcaaatgctacaaagtgcaaaaaagccaaagactaaatcgggtttcctatgggcattggcagcctcactaatgtagcttcagatgagtattaggtgttaagccagccttcgtgaagtatgtcagaggtccagccagcgtccacattttgaagcctgtttttgtactgccctcaagcgaggaattatttttacatttttaaaagagtgtaaataaaaacaaaaggtctgactttttgtcagagactgctatggctcacaaagccttaaatatttactayctggcccttttcaggaaaagtttgcagactccggtacaaataaaagaaatatatttttactctgtttcaagatgcttgactggaaaagaaagaacgtatgagtcagagagaaattgataggattgaccaaaccttcaaaaaatgggaaaaaggctgagtgcggtagctcacacctgtaatcccagcactttgggagggtgaggcaggaggattgcttgagctcaggagtttgagaccagcctgggctatgtggtgaaacatcgtctctactaaaaatataaaaattaggtgggcatggtggcacacgcctgtaatcccagctactg

SEQ ID NO: 723021 - DNA, 565 bp, Homo sapiens
catttaacattctgatgtatttcttttggtgaaagtatgtatgcacttttgttgtgtatagaggtaagagtagagttgttgggtcatagggtatgcatatgtagatactgccacacagttttcccaagtgattatatcaatttacatacccaccattaatgtacaagaattccagttgttcaacatcctcactattacttgaaatctctaaactggctggatgtggtggcttacacctataattctagcactttgggaggctgcggtgggagaattgcttgaggccacgagttcgagaccatcctgggcaacatagtgagaccctgtttctacattaaaaatgtttaaaaagaaaaagaatttaaaaattagaaaaatctttaatctatttttttttttttttttaatacggagtcttactctgtcacccaggctggagtgcagtggcgtgatctcggctcactgcaarctccgcctcccgggctcatgccattctcctgcctcagcctcccgagtagctgggactacaggtgcccaccaccacacccagctaattttttgtact

SEQ ID NO: 723022 - DNA, 1893 bp, Homo sapiens
caaattctattttacactaaatatgatgggtgaaaaataatagcttgagaccattaagatgcaacactaataataataatttcctgaacacttagcttgtgccagacactgtcctaagtgtttttcatgaatttactcctttaatcatcgtaacatcatgtggagttatcaggacataaagccacatgttagattcaggtttagaaacttattaatgttttaattttacaatttaaaatattataggccgggcacagtggcccacacctgtaatcccagcactttgggaggctgaggtgggcagatcacttgagcccaggagttccagaccagcctgggcaacatgatgagaccctgtctctacaaaaaataaaaaattagccaggtgtggtgttgtgcacctgtagtcctagctactcaggaggctgaggcaggaggatcccttgagcctgggaagtcaaggctgcagtgagcagtaatactgtcattgcactccagcctgggtgacasagtgagaccgtgtctctaaaaaataataattttgtttaaaaattaaaaacaatttgtcttattagcttatataaaagggaccacattaatcttagtcgttatctcaaaaaaaaacaaaattgttctctcttgtgatggctttttggagaaaaaagaaagaagagaaaaagaaaaaatcacaccttaactggcatacattttattaatatgatttagcaaagttcgacaacagaagagtcctcattttttttatagtgaaaagaaggaaatcacacaagaggaaaactgccatgacttatacagaggagttacagagttaaatttattcataacatattaggtttgtttggtggtggttgttgttgtttttgagacagggtctcactctgtcacccatgctggagtgcaatggcgcaatctcagctcactgcagcctcgacttctcagctcacacaatcttcccacttcagcctcccaagtagctgggaccacaggtgcacaccaccatacctggctaattttcgtattttttgtatagatagggttctgccatgtagcccaggctggtctggaactcccaggctcagatgatctacctacctcagcctctcaaagggcttagattacaggcatgagccaccatgcctggccagttttgtctttacttaatcaagttttagtaccatttccattacatcacctactcaaaataagatatttacatcaactgtttatcaataaagtatctgtagtttctacgtcactcttttgccttcaagtttccttagctgattcctttttaaccaagaatggacaaaaaacaaacaaacaaaaaaccccagaaatataattttttagctcctcttttttttttctgtaagaaaaggaaggtgtgttttaaaattccatgatagttactgatattttcttaatttttccagaagtgagaagctgaggcaagaggaggccaagtaacttgtatgaagttgtatgatcaccaagaagcagaaatcagagtaggctcttgacctatgctgcctcttatcatgtacaggaagattttattctgaacccttaaggatatagctaagagattttttaatgttaccatcgagacttcaatgtcaggtttggggaggaaatcaagaagagatatttcataataaatggtacgactgaaataaaattgcagttgcatcctgcagtaaaattagagtatacgaattattttccattctggttttggctgcttatcctttagtcattctttccagggccattctgtgtaggttaggcttcctcagcgaaagcagagggtcgtggtggggaaaacataggctctatattcagatagacttgggggtaggtgggagtcctggatcc

SEQ ID NO: 723023 - DNA, 718 bp, Homo sapiens
aatttagtggctttgaagcacgggcaggacctaacacatattcttgctgttgttctatatgccttttgtatacctatcattgacttatgttttatatctaaatagctcttttactacacatctttcatacacatcttctataattaaataaattgttaagattctcatcttgatgataatgcagtaacctgcacaagagatttgcttgttgattygttttgtcctgagaggtagagttctaaacccttaaaccttgcaaatgcttttctgttttgagtcccaaattgcacttttaaacagaatgagaggtagaagaaatcagagattagatacaaagagacttaaagttcctaggggagtggtaaacctaaaagaaaacctgcagtttgtctgtgtaacccacagactatttaaatgtgggtgttattgtttagttagcacagtattatgtaagggcctaaaacaattttattctggtgatttcagagtacagtgtggtatatatctgtgtcatcagattgcagtcagaataaaatacaatgcaagataaactccaatcatttttttcattgtggtgttagccccaaagctcccccattttacccaaagacaaatggacaacaaatggtgttctgttattggtacagaactcaaactgaatgggatttatcaggattttgtgtctaatctctcttcttaagggctctggctgttagct

SEQ ID NO: 723024 - DNA, 718 bp, Homo sapiens
aatttagtggctttgaagcacgggcaggacctaacacatattcttgctgttgttctatatgccttttgtatacctatcattgacttatgttttatatctaaatagctcttttactacacatctttcatacacatcttctataattaaataaattgttaagattctcatcttgatgataatgcagtaacctgcacaagagatttgcttgttgatttgttttgtcctgagaggtagagttctaaacccttaaaccttgcaaatgcttttctgttttgagtcccaaattgcacttwtaaacagaatgagaggtagaagaaatcagagattagatacaaagagacttaaagttcctaggggagtggtaaacctaaaagaaaacctgcagtttgtctgtgtaacccacagactatttaaatgtgggtgttattgtttagttagcacagtattatgtaagggcctaaaacaattttattctggtgatttcagagtacagtgtggtatatatctgtgtcatcagattgcagtcagaataaaatacaatgcaagataaactccaatcatttttttcattgtggtgttagccccaaagctcccccattttacccaaagacaaatggacaacaaatggtgttctgttattggtacagaactcaaactgaatgggatttatcaggattttgtgtctaatctctcttcttaagggctctggctgttagct

SEQ ID NO: 723025 - DNA, 718 bp, Homo sapiens
aatttagtggctttgaagcacgggcaggacctaacacatattcttgctgttgttctatatgccttttgtatacctatcattgacttatgttttatatctaaatagctcttttactacacatctttcatacacatcttctataattaaataaattgttaagattctcatcttgatgataatgcagtaacctgcacaagagatttgcttgttgatttgttttgtcctgagaggtagagttctaaacccttaaaccttgcaaatgcttttctgttttgagtcccaaattgcacttttaaacagaatgagaggtagaagaaatcagagattagatacaaagagacttaaagttcctaggggagtggtaaacctaaaagaaaacctgcagtttgtctgtgtaacccacagactatttaaatgtgggtgttattgtttagttagcacagtattatgtaagggcctaaaacaattttattctggtkatttcagagtacagtgtggtatatatctgtgtcatcagattgcagtcagaataaaatacaatgcaagataaactccaatcatttttttcattgtggtgttagccccaaagctcccccattttacccaaagacaaatggacaacaaatggtgttctgttattggtacagaactcaaactgaatgggatttatcaggattttgtgtctaatctctcttcttaagggctctggctgttagct

SEQ ID NO: 723026 - DNA, 584 bp, Homo sapiens
tggattaaaattttaatcacattttttttcagttcagaattatactttagcatgttttggtatgtacatatataagattcagcattttatgatccataaaaatagtactatcaaattagaatttgtttctgtaatgtaagctgataagccagggaaaataatatcaccatgcgtaagattttcttgttttttagaaataaatatgattaagctgttttaactctaaagctacaacttcatcttataataatttagttcttatgtattaaaaatctcatttggatgttagatcaatccacatatttctttaagattttttcttttgaattacaagccaatttaatactgtgggtttggcacgatctttgtcaagagtttcagcttgaaaggttaataagaaatactctatgctttratacagcacaacagaacaacagggagccctatcttcagaactgccaagcacatcaccttcatcagttgctgccatttcatcgagatcagtaatacacaaaccatttactcagtcccggatacctccagatttgcccatgcatccggcaccaaggcacataacggaggaa

SEQ ID NO: 723027 - DNA, 558 bp, Homo sapiens
tagtcttaaaatttttcttatacttcttccccacaatgattaaagtaaaagagtctttccaacttaagatattataactatgaaataaagtcagtaattcattttatctttacctaatatttactcttttaaaaattagcgaccaatgattcttctgtcatagttttattcaaatgtatttaagaaactaaggtttaaacaacagccaaacatatggaacttgcctttaggcaatttcttagtctgttttaatgaaaaataaaacataaaaaatttaccttccaygagtttctagtgccagacagccacagggcacttctgagtgcttgacccgttctggaaatggtatggattgagcagagcagagagtctcaagcttcctgttcttacttcatttggttcatcttttatcaaaccttcattgtggctgttcactaggttaaaaatgatctactctagagctatttccttgccacaatgaaatctctagggggaacaagagtctttgtaaagggtcactcacttgttctacacacattgtgactttattcacctgaa

SEQ ID NO: 723028 - DNA, 558 bp, Homo sapiens
tagtcttaaaatttttcttatacttcttccccacaatgattaaagtaaaagagtctttccaacttaagatattataactatgaaataaagtcagtaattcattttatctttacctaatatttactcttttaaaaattagcgaccaatgattcttctgtcatagttttattcaaatgtatttaagaaactaaggtttaaacaacagccaaacatatggaacttgcctttaggcaatttcttagtctgttttaatgaaaaataaaacataaaaaatttaccttccatgagtttctagtgccagacagccacagggcacttctgagtgcttgaccygttctggaaatggtatggattgagcagagcagagagtctcaagcttcctgttcttacttcatttggttcatcttttatcaaaccttcattgtggctgttcactaggttaaaaatgatctactctagagctatttccttgccacaatgaaatctctagggggaacaagagtctttgtaaagggtcactcacttgttctacacacattgtgactttattcacctgaa

SEQ ID NO: 723029 - DNA, 558 bp, Homo sapiens
tagtcttaaaatttttcttatacttcttccccacaatgattaaagtaaaagagtctttccaacttaagatattataactatgaaataaagtcagtaattcattttatctttacctaatatttactcttttaaaaattagcgaccaatgattcttctgtcatagttttattcaaatgtatttaagaaactaaggtttaaacaacagccaaacatatggaacttgcctttaggcaatttcttagtctgttttaatgaaaaataaaacataaaaaatttaccttccatgagtttctagtgccagacagccacagggcacttctgagtgcttgacccgttctggaaatggtatggattgagcagagcagagagtctcaagcttcctgttcttacttcatttggttcatcttttatcaaaccttcattgtggctgttcactaggttaaaaatgatctactctagagctatttccttgccacawtgaaatctctagggggaacaagagtctttgtaaagggtcactcacttgttctacacacattgtgactttattcacctgaa

SEQ ID NO: 723030 - DNA, 558 bp, Homo sapiens
tagtcttaaaatttttcttatacttcttccccacaatgattaaagtaaaagagtctttccaacttaagatattataactatgaaataaagtcagtaattcattttatctttacctaatatttactcttttaaaaattagcgaccaatgattcttctgtcatagttttattcaaatgtatttaagaaactaaggtttaaacaacagccaaacatatggaacttgcctttaggcaatttcttagtctgttttaatgaaaaataaaacataaaaaatttaccttccatgagtttctagtgccagacagccacagggcacttctgagtgcttgacccgttctggaaatggtatggattgagcagagcagagagtctcaagcttcctgttcttacttcatttggttcatcttttatcaaaccttcattgtggctgttcactaggttaaaaatgatctactctagagctatttccttgccacaatgaaatctctagkgggaacaagagtctttgtaaagggtcactcacttgttctacacacattgtgactttattcacctgaa

SEQ ID NO: 723031 - DNA, 1356 bp, Homo sapiens
atctgaatacttgtcctgattctttcacttagtagctgtgtgacctggagcaaattacttaacctctctgatttgcagtttagttatgtgaaaaatgagcataagtccctgcataattcatacggaggtagtgaggataaatgtaataatagatgtaaaaatgttgcagtccactgggaaacagtaatacatgaaaggtatgcttaatatttggttgtaaaatatagcctttattctatgatgtccgattttcttggcattcacaacacttagaacccactaataaagccatgctagcaagagtacaattaaggacaagttggaaaactgcccagttcccatgcatttgatcttagtgaagcacagcacatttgaaaggactgtggatgcaggagctgcatttatggggaagtccctccatgaggccctctccatctacccacctgacctcttatccttctacccactcccgaacaatttgctcggctcagccccctccgatccaaagcctctgtgattctaagacccaggtgtgttctggagaagattaatcacaggcagacacaactttgcatttcttcctttcccacccacctaacttatttccacaaaaaaaaaaaaaaaaaaaaaaaaagccttgaagcaggctggcagaagataaaagggtctccagtttaggtagatatgcaagaaagggagagctgtttgtagaaacatcagatctttcttggccatgactgggcatcactttgccccatctcccatctttccatagctagaaggaaggattctcctggataccttcaaggttcatttaagtaggacacagaactcattggctcccttgttcctggacttcccctgctagtggtgtggtcttttcctgactaatcaaatcccaggaaacttaggaaacaaactacagaacaagatataattttgcaggtgattcagcagctctcagatttctgttcagctagaaggcaaatttatccttcaaaccagtatacccatttcttcacatctcctgtgtcccagcagttrgataaactctccaggtaatggtgaatcaagaaaaggtcatctgacaagctcagtgagtgaaaatggcccatcccactttgctgaagtcacatcacgggcttgctgtcactgaaggtcattgccataccacttcctacaggtctttgacctcaagggccggaggaacacttttctcaggctcctttctccccattgctgtggtccacaaatgtattcactgaaacaagtaattctgcttagttccgaaataaagaaacttaggtcagagttctaaccagaaacaggaaatgcagccaggggaggacagagtca

SEQ ID NO: 723032 - DNA, 1356 bp, Homo sapiens
atctgaatacttgtcctgattctttcacttagtagctgtgtgacctggagcaaattacttaacctctctgatttgcagtttagttatgtgaaaaatgagcataagtccctgcataattcatacggaggtagtgaggataaatgtaataatagatgtaaaaatgttgcagtccactgggaaacagtaatacatgaaaggtatgcttaatatttggttgtaaaatatagcctttattctatgatgtccgattttcttggcattcacaacacttagaacccactaataaagccatgctagcaagagtacaattaaggacaagttggaaaactgcccagttcccatgcatttgatcttagtgaagcacagcacatttgaaaggactgtggatgcaggagctgcatttatggggaagtccctccatgaggccctctccatctacccacctgacctcttatccttctacccactcccgaacaatttgctcggctcagccccctccgatccaaagcctctgtgattctaagacccaggtgtgttctggagaagattaatcacaggcagacacaactttgcatttcttcctttcccacccacctaacttatttccacaaaaaaaaaaaaaaaaaaaaaaaaagccttgaagcaggctggcagaagataaaagggtctccagtttaggtagatatgcaagaaagggagagctgtttgtagaaacatcagatctttcttggccatgactgggcatcactttgccccatctcccatctttccatagctagaaggaaggattctcctggataccttcaaggttcatttaagtaggacacagaactcattggctcccttgttcctggacttcccctgctagtggtgtggtcttttcctgactaatcaaatcccaggaaacttaggaaacaaactacagaacaagatataattttgcaggtgattcagcagctctcagatttctgttcagctagaaggcaaatttatccttcaaaccagtatacccatttcttcacatctcctgtgtcccagcagttggataaactctccaggtaatggtgaatcaagaaaaggtcatctgacaagctcagtgagtgaaaatggcccatcccactttgctgaagtcacatcacgggcttgctgtcactgaaggtcattgccataccacttcctacaggtctttgacctcaagggccggargaacacttttctcaggctcctttctccccattgctgtggtccacaaatgtattcactgaaacaagtaattctgcttagttccgaaataaagaaacttaggtcagagttctaaccagaaacaggaaatgcagccaggggaggacagagtca

SEQ ID NO: 723033 - DNA, 640 bp, Homo sapiens
gaaatgaccaagatggcaggactgcatctctgatcctaacttaagaagatttaatgcactgagccatttattgaacattttgtgctgtgatggaggtaggggcaggcagctgaatgaaggcaaaataaagtgagatcctccctcctcaaaacagtcactccccctgccttctaattcaggcaataaagaactcaatgagagtttctttctttctttatcaaatagggttagctgtatgttcccagttaaaaaaaaaaaaaargggggggggggcaacttaacattctctctaaaaataacaaacctaaaaaattgctttaaaacaatttttagacaaattagcaaatatttgcattgtctaccaaatgcccaaccatatgcttaagtgcaagattctgtgccagagaaatcggtccttgctgcaggacagattagtctagtatagagatcagcctacacttatgaaacaattagagaacaattgagttttctctctctggaacgaggtgcttataaacctgtgtaattcagccctaggtttcctagtagatgtttctgggagaggattcctgttaacttactgttttcttgggtggaaataagtaggctgagttgagattcttcagtgtcttaaaacccc

SEQ ID NO: 723034 - DNA, 640 bp, Homo sapiens
gaaatgaccaagatggcaggactgcatctctgatcctaacttaagaagatttaatgcactgagccatttattgaacattttgtgctgtgatggaggtaggggcaggcagctgaatgaaggcaaaataaagtgagatcctccctcctcaaaacagtcactccccctgccttctaattcaggcaataaagaactcaatgagagtttctttctttctttatcaaatagggttagctgtatgttcccagttaaaaaaaaaaaaaagggggggggggrcaacttaacattctctctaaaaataacaaacctaaaaaattgctttaaaacaatttttagacaaattagcaaatatttgcattgtctaccaaatgcccaaccatatgcttaagtgcaagattctgtgccagagaaatcggtccttgctgcaggacagattagtctagtatagagatcagcctacacttatgaaacaattagagaacaattgagttttctctctctggaacgaggtgcttataaacctgtgtaattcagccctaggtttcctagtagatgtttctgggagaggattcctgttaacttactgttttcttgggtggaaataagtaggctgagttgagattcttcagtgtcttaaaacccc

SEQ ID NO: 723035 - DNA, 640 bp, Homo sapiens
gaaatgaccaagatggcaggactgcatctctgatcctaacttaagaagatttaatgcactgagccatttattgaacattttgtgctgtgatggaggtaggggcaggcagctgaatgaaggcaaaataaagtgagatcctccctcctcaaaacagtcactccccctgccttctaattcaggcaataaagaactcaatgagagtttctttctttctttatcaaatagggttagctgtatgttcccagttaaaaaaaaaaaaaaggggggggggggcaacttaacattctytctaaaaataacaaacctaaaaaattgctttaaaacaatttttagacaaattagcaaatatttgcattgtctaccaaatgcccaaccatatgcttaagtgcaagattctgtgccagagaaatcggtccttgctgcaggacagattagtctagtatagagatcagcctacacttatgaaacaattagagaacaattgagttttctctctctggaacgaggtgcttataaacctgtgtaattcagccctaggtttcctagtagatgtttctgggagaggattcctgttaacttactgttttcttgggtggaaataagtaggctgagttgagattcttcagtgtcttaaaacccc

SEQ ID NO: 723036 - DNA, 568 bp, Homo sapiens
ttggataaaatgcaaacgaaaattgcttatctaggttctctgtagtcattcaacataggctcaccaagttaaaagttttaattctagattttagactctgagaaatgcaaatcaaaactgcaatgagatactaacaccagtcagaatggytattatcaaaataaaaaaatgaaagatgctggcaaggttgtagagaaaaagagatgcttatacacagttggtgggagtgtaaattagttcatccattgtggaagacagggtggtgattcttcaaagacctaaagaaaggagtaccactcaacccagtaatcccattacctgtactagtctgttcttatgctgttaataaagatgtatctgagactgggtaaattataaagaaaagaggtttaatggactcacagttccacatggctggggaggcctcacaatcatggcagaaagagaatgaggatcaaagtcacatcttacatggaggcaggcaagagagaacttgttaacttgtgcagggcaactcccatttataaaaccatcggatctcatgagatctattcactatcaggagaac

SEQ ID NO: 723037 - DNA, 597 bp, Homo sapiens
tgctcagatctctctggtttccgaacacgtactctctacgccacgcaatgctgcccgtgccatcagattctcttcagctgtgagctgagtcttttccagagtctcagttggccctttgaatgtttacttaaaactccyttagcctggacgaatgctaattgtttggtaggagacgcttttcatttttctagaatcttcagatcattaggggagaggagtgttttggatgagtccttgaagggtgagtgtattaacgaacctgagtggaaagggtcccttggcagcgacatcattctcctctctgagaatccggtgaaccatggagaaaataattttgtaagtaggacatggtaatagttaagcagcttgaaaagctactagctcccaaatttattaggaaatcctcatctactagttggaaaatctagtccctccccaccgcttccttcttctttttttttttgagatggagtctcactctgtcacccaggctggagtgcagtggtgtgatctcgtctcactgcaagctccacctcccaggttcatgtcattctcctgtctcagcctggaactacagggcacccgccaccacgcctg

SEQ ID NO: 723038 - DNA, 597 bp, Homo sapiens
tgctcagatctctctggtttccgaacacgtactctctacgccacgcaatgctgcccgtgccatcagattctcttcagctgtgagctgagtcttttccagagtctcagttggccctttgaatgtttacttaaaactcccttagcctggacgaatgctaattgtttggtaggagacgcttttcatttttctagaatcttcagatcattaggggagaggagtgttttggatgagtccttgaagggtgagtgtattaacgaacctgagtggaaagggtcccttggcagcgacatcattctcctctctgagaatcyggtgaaccatggagaaaataattttgtaagtaggacatggtaatagttaagcagcttgaaaagctactagctcccaaatttattaggaaatcctcatctactagttggaaaatctagtccctccccaccgcttccttcttctttttttttttgagatggagtctcactctgtcacccaggctggagtgcagtggtgtgatctcgtctcactgcaagctccacctcccaggttcatgtcattctcctgtctcagcctggaactacagggcacccgccaccacgcctg

SEQ ID NO: 723039 - DNA, 597 bp, Homo sapiens
tgctcagatctctctggtttccgaacacgtactctctacgccacgcaatgctgcccgtgccatcagattctcttcagctgtgagctgagtcttttccagagtctcagttggccctttgaatgtttacttaaaactcccttagcctggacgaatgctaattgtttggtaggagacgcttttcatttttctagaatcttcagatcattaggggagaggagtgttttggatgagtccttgaagggtgagtgtattaacgaacctgagtggaaagggtcccttggcagcgacatcattctcctctctgagaatccggtgaaccatggagaaaataattttgtaagtargacatggtaatagttaagcagcttgaaaagctactagctcccaaatttattaggaaatcctcatctactagttggaaaatctagtccctccccaccgcttccttcttctttttttttttgagatggagtctcactctgtcacccaggctggagtgcagtggtgtgatctcgtctcactgcaagctccacctcccaggttcatgtcattctcctgtctcagcctggaactacagggcacccgccaccacgcctg

SEQ ID NO: 723040 - DNA, 636 bp, Homo sapiens
tggagcagattgtgctgaccagagacaagaccgtggtctctgctgaccttctcatagacgaccggccggacatcacaggcaagtggcctgcgacaggtgaggagcacgtggggagggccccagccttggcccccttctcctgggcagtgagcactcagttgcttcctgccccacttagtcaccagctgtttgccaggcactgagcccctccccttcgggaagacaaggccccctctgtatgggctgtggcctggtgctcctgggagctgggaggagtgggtgccagctctagggttagcttgaggggtggccttggggaagtcccttcagcttcaaagccttgtcttcctcatgtaacatggggactcaactctggtttccaaatgtttgtttttagcaacaaaacccattttttcccccaaaagcaatgtggactgatgcaatgaatgacaggagggcagagcagagctcctgcagggaaggtgggttgggacagaagacccccctccccaaaaccaaacaagccagtcaaccttgaactgccgtagaaaggagagggagatgggcgtggygactcacgcctgtaatttgggaggctgatgtgggtggatggcttgagcccaggagtgtgaaacc

SEQ ID NO: 723041 - DNA, 622 bp, Homo sapiens
ctttaggaggccaagggaggaggactacttgagcccaggaaattgagaccagcctgggcaacagagcaagaccccgtctctacaaaaaatataaaaaattagccaggcatggtggcacatgcctgtggtcccaaccacttgggaggctgaggtgggaggatcgcttgagccggtgaggtcaaggttgtagtgagccatggttgcaccaccgcactccagcatgggaaacagaataaggccctgtctcaaaagaaaaaaaaaaaaaaaaaaaaaaagtactttcaacagaagaaaaaaaaaatctttcctcatttttgaaatctggtctttgaaaaaaagattttcattgcaactrataaaagcacgtattcactggttgttcttgtgtccaaaatcttaaagtaaaattggagcaaagccccaaaaagcttttaaacaaattcatcagccacatgtgtttgcaattgtttgacttaggagaaattataaagcggttctggaacattcgtgtttttataaatctattgtcattggcatataatggttgaaaatcattagctatataagaagtatcctcctattttaaaaatatctacagataaaatggttcaacgtctgagat

SEQ ID NO: 723042 - DNA, 3791 bp, Homo sapiens
gggagctcaagaggagcccttatcaagtctgatgataccaggtaatagagatgagtcattagcagctcaactcattgctgatgtcattaggtaccattttgaaaagcatttggtgttctcttgtgaatttgccagcacttctccaatgcatacccaatacattcataccaggaggtctttccagaatgttcacagtaccacgttagagcaataccatgaacgtcacaagggcttgaagtttataaatagcgtagtttcatttttacgaaaaagcaagctgcgtgtttctaagtatggttgcatgtgatgaaactaaaaagataggagaatggtctccatgaacctcagaatagttacttctaggtgagaacacaattggataaaatagggaaggagcagataaatagattcagggttttggtactgttttgaagtcggatggtaggttcacaaatatttattttattatgctgttatactttataatggatgcatcaaattatattaagaaaaagtgttacatatagaaaataccataaccaaacctaaacaaatgtggaaggagaaaaagtaaggccattgaaacaataaaacctttctgtcatacccccctgctccccagccacagtgtggcatacattaaaaagcagacaataaattagccagacatggtggcatgtgcctgtagtcccagctacctgggaggccaaggtgagaggatggcttgggcccaagagtttgaggctgcggtgagccatgatggtgccactgcactccagcctggttagcaaagcaagagcctctctctcaaataaatacataaataattttttttaaaaaagcagacaacatcaaatgttggtaaaggtgagaagccaaagtaattcttgaagcaatatggaatttcctaataagatcagatgaggagtatactctgtaacccagcagtactgctccttagagccatttctgcttatttgtacagagatgtttattgcaacactgttcataatagtaaaactggaaacagctggcatgtccatggacagtagagtggataagtaactgtaatctagtcatatagtggaatattatacagccatagcagcagcaaatgaacctcatgactataatgagcaaataaagaaaactgaaagaatacatacagattaattcctgttatgttaaaaaaaaaaaagtcaaaagctgttcagactaaacaagaatttgtttagtggcaaaactagaaagacaagggaataatgaactgagtggatagtagttacttcttagagggcagtaagggagccacagggaaaggagcttcagagatgctagtgggtacaaaggggtgtgtgtatgtgtaatttttaaaattatgatcaaatatacttcataaacaatttgcctttttggtcatttttagatgtgtaattcagtgagtggcattaatttcattcacagtgttgtgcaaccagcatcctgtttccatcactccagtaagaaattcttacccatttaatatcaactccccatactaaatgggtatttaactattgtaaatagttacacacattatactttactggttattatatttcataataaaaacatttaatgtaagaggtatgccaattccaaaggcttgtgcaaacctttactctgggaatgaagtggagagatcagcctttagaatttctaggtgtatgactgtttatattactgaatggtgtagaaagtgtcctataccatatactattatcagtagtaagggaaataactttatataaagaaaggcttttgggcagatacagtctttcatactgaggttcaccttttctatttcaaggataaggtagagtcaaaatttccatttctaggtaacatttgcttatattcactttgatctgtgaatcttcatatgcttaccagctgttacatggataatttataattatgtgtcatgcatttcattttttttccccttagctgcagtagtctagccttccctccccattttgtgtttcttatttgaaagttaatctattttaaatttatgttttccattcagagtagatttttcagtgatgtggttaatacttaattctttagaaagtgattgagaatatcaggaaaagggaagcatatcatttaaataaaaacaccatagtgaacttcttaaacatactaccttcgtgtcatagggttattaacttgacaaaacttcacagttgattatagtactaagggcttgtgaatattcatgaagatttgtatactcttgtcattttttctcttaaagaccatcattaggatagatagatgcaaacaatctagaaacaatgcttatgatttctattatatgttatatttttcttaatgtggttaagttattaccatgcattcatgttctattaatggaaaatactttgattggattctcatctcgaggaggagctgtttcagagctggtgtgcgctattatgtaagaggtgagaattttgtcagcatggstcatatctgtaattaatattttgtcttacggtgacacgaatgtaaccttttgtattttatttgttttcattatcatttgatagccttgctaagtatttatctcctgcttcattgtaataattaggtaggtcttccgtgcttcagttactgtaattacattgcaaatgttaatgtgatacttgtaggctgctgcttactgcttgaagaggaactgatcatgttgtttgctggatgtccgaaagcacagctgaactcagtgtagttttcagtaacctaacttagaaagtattttcttgtattgcttttaggttttttgcatgcatgaagctagtcatttggctttgtgccttcaactttgtaaacatttacattttgagcatttattttctaggctttgtactagcaacatgcttattttgctaaactaaactttaaaaatctgtattaaagcttactgtcattatgaaaagaagtttctccaacctttgtattttttttaaccagaatatatcagcatattttatggctgtgagccattaaataaattgtagcttggggccagaaagttgtagaaattatttgcttaatctctctcatagcagaggaagaataacattgagtgagtgacctggcaaagatcacaaaccaaaattaaagttagcaactctgttgtaactagattttcttggatggaaacatagtttttgattaaatttttgaacaggtagtgcatttacatatttcaaatatcaaaaagtatttttttaatgcaataaaaaatatttcccatttctgacctcatctgcttggttcttacccccttcccagctaatcagatgttagtttcttgtttatccttccagataatttttatgctaatacagatatgtgcccttctcttcctccttttttagacagtgataatattctgtgcacatttttctgcaccttgtttcctttttttccttcatatcttttgcaaatcttttcataaagatctttctttcatacacacaaacacacatactgtctctcagtctgactctgacttttaaaaataattggatgttgttccttagtgggaattacgaagggaagcaaggatagcctgtgcctctgacaagtaatctcataaagtattgaggagtcatgtcattgctgatttggctcaataattttggccccttctggtgatatggtaactaaaacagtgatacttcacatatacctgcaaatgttatatgtaagaaatatgtcagaaaggatgttaggaaata

SEQ ID NO: 723043 - DNA, 639 bp, Homo sapiens
taatctagtcatatagtggaatattatacagccatagcagcagcaaatgaacctcatgactataatgagcaaataaagaaaactgaaagaatacatacagattaattcctgttatgttaaaaaaaaaaaagtcaaaagctgttcagactaaacaagaatttgtttagtggcaaaactagaaagacaagggaataatgaactgagtggatagtagttacttcttagagggcagtaagggagccacagggaaaggwgcttcagagatgctagtgggtacaaaggggtgtgtgtatgtgtaatttttaaaattatgatcaaatatacttcataaacaatttgcctttttggtcatttttagatgtgtaattcagtgagtggcattaatttcattcacagtgttgtgcaaccagcatcctgtttccatcactccagtaagaaattcttacccatttaatatcaactccccatactaaatgggtatttaactattgtaaatagttacacacattatactttactggttattatatttcataataaaaacatttaatgtaagaggtatgccaattccaaaggcttgtgcaaacctttactctgggaatgaagtggagagatcagcctttagaatttctaggtgta

SEQ ID NO: 723044 - DNA, 639 bp, Homo sapiens
taatctagtcatatagtggaatattatacagccatagcagcagcaaatgaacctcatgactataatgagcaaataaagaaaactgaaagaatacatacagattaattcctgttatgttaaaaaaaaaaaagtcaaaagctgttcagactaaacaagaatttgtttagtggcaaaactagaaagacaagggaataatgaactgagtggatagtagttacttcttagagggcagtaagggagccacagggaaaggagcttcagagatgctagtgggtacaaaggggtgtgtgtatgtgtaatttttaaaattatgatcaaatatacytcataaacaatttgcctttttggtcatttttagatgtgtaattcagtgagtggcattaatttcattcacagtgttgtgcaaccagcatcctgtttccatcactccagtaagaaattcttacccatttaatatcaactccccatactaaatgggtatttaactattgtaaatagttacacacattatactttactggttattatatttcataataaaaacatttaatgtaagaggtatgccaattccaaaggcttgtgcaaacctttactctgggaatgaagtggagagatcagcctttagaatttctaggtgta

SEQ ID NO: 723045 - DNA, 639 bp, Homo sapiens
taatctagtcatatagtggaatattatacagccatagcagcagcaaatgaacctcatgactataatgagcaaataaagaaaactgaaagaatacatacagattaattcctgttatgttaaaaaaaaaaaagtcaaaagctgttcagactaaacaagaatttgtttagtggcaaaactagaaagacaagggaataatgaactgagtggatagtagttacttcttagagggcagtaagggagccacagggaaaggagcttcagagatgctagtgggtacaaaggggtgtgtgtatgtgtaatttttaaaattatgatcaaatatacttcataaacaatttgcctttttggtcatttttagatgtgtaattcagtgagtggcattaatttcattcacagtgttgtgcaaccagcatcctgtttccatcactccagtaagaaattcttacccatttaatatcaactccccatactaaatgggtatttaactattgtaaatagttacacacattatactttactggttattatatttcataataaaaacatttaatgtaagaggtatgccaattccaaaggcttktgcaaacctttactctgggaatgaagtggagagatcagcctttagaatttctaggtgta

SEQ ID NO: 723046 - DNA, 639 bp, Homo sapiens
taatctagtcatatagtggaatattatacagccatagcagcagcaaatgaacctcatgactataatgagcaaataaagaaaactgaaagaatacatacagattaattcctgttatgttaaaaaaaaaaaagtcaaaagctgttcagactaaacaagaatttgtttagtggcaaaactagaaagacaagggaataatgaactgagtggatagtagttacttcttagagggcagtaagggagccacagggaaaggagcttcagagatgctagtgggtacaaaggggtgtgtgtatgtgtaatttttaaaattatgatcaaatatacttcataaacaatttgcctttttggtcatttttagatgtgtaattcagtgagtggcattaatttcattcacagtgttgtgcaaccagcatcctgtttccatcactccagtaagaaattcttacccatttaatatcaactccccatactaaatgggtatttaactattgtaaatagttacacacattatactttactggttattatatttcataataaaaacatttaatgtaagaggtatgccaattccaaaggcttgtgcaamcctttactctgggaatgaagtggagagatcagcctttagaatttctaggtgta

SEQ ID NO: 723047 - DNA, 1152 bp, Homo sapiens
ttttaaaaatctataattttatcaggggaaaacgttatgttgcggaaattaattgatcgattgagtgattggttaacggacagtgtccgatgactcatataatcccccggttcgagtccctttaggccgcagacgtttcgcgccttctcgggtgtccaagtcgcgcatccatacaatgaggggtaatatactagattacctgaggtcttcttacggtaaaaacaccggtgtcttaaggtttcccagtggaatttgggggccgggttgacttcggagctggagctcgcaaaggccggggctgctgcagattctgacgctttgtggacccctactaccgagcgcagccgcaccgcaggttttcttcgctgctggttagatccaaagcccatcccatcctagtaaactgggacagcgccgcttctcacatcactatgggggcttctgctccatggcggggaaaggccagaactgctgccttaaatacgcttttgcatcatccggttgctaacctccggccacagcattccccactccaaaatgccacttttccaggtgtgtttgcctaaatttaccccatttacagacttctcaggtgcatcattgggaacagggcgctttgcagtttgcaaaccacctcagacaactccaggtttaaaggataaaggatgacattgtgagcaaagcggcatcaaaatttcagatatttaactttcacattctaaccatacacctttccaaggtcttgtaatactttcacattgtgaatakacatctttacaagacccagtagtacatgggtcaagtgtggcaaaacagacatcgcgagccagccaggagtcgaacctagaatcttctgatccgtagtcagacgcgttatccattgcgccactggccccgacttgctaaagccttctccgtgatagctgatcacccttatacagtttgaacgggcttccgggtaccaacgatccattttgcccttgcgccgcgctcccgctgctctgcctttccccaaaacgcgccccaccaatccgcagcggcttcgtcacggcgctcttcgtcgcactccaacccgccgcgtcggcggcatctctcgcgtgctcttgcttgcgcactaatttgtcctccaccgcctcccgttcaggccggctc

SEQ ID NO: 723048 - DNA, 644 bp, Homo sapiens
ggttatccctaatgagtagcacttttcacaaaacaaattacctcttggctatttattgcatgtagaaaaggtacaaattatataaattatctggaatgatattttaaaactaaaactttagccatctagtaaatggcaacacttctccccttattttaaatatcagtggttctcaacccccataatactcttaaaattattgaagaccccccaaaaaaactctyctttatgtgagttacgtctgttgctatttaccatattagaaattaaaactaagatattttaaaaatatttatttactgttcattttaaaataatagtaataaacccaacatatattaacataacctatttatgaaaaaatctatattttcataacaaagaaattttaatgaaaaaagtggcattgttttgtattttgcaaatctctttaaaacctggcttgatagaagacagctagattctaatatctgcttccacatttaatctgtttaaatatgttattttgattgacgtttatgaaggaaatacagcctcactcagatgtagttggaaaagggaatcatgttttagtagcctttacagataatcatagatatttatctttgacaataaaacaaaagtcagcaagtggtagtttctta

SEQ ID NO: 723049 - DNA, 646 bp, Homo sapiens
tagttttctacaaaagaagaactagaatatcacttttgctggttgtttgtttgtgaagattagatggctgtaggtgtgtgactttatttctgcgttctctattctgttccattggtctatgtgtttgtttttgtaccagtaccatgttattttggttaccgtagccttatagtatagtttgaaatcaggtaatgtgatgcttctggctttgttctttttgcttaggattgctttggctatttgcgatcttttttttttttttagaatagtttcatttatcaaagttaaaaaaattaagcatttttatattatgttatacatgttaacaggaaagtcatcatcatcatcataatgtatctacttttcttgaaaaaacaaaaacacaactaaaatagagaacgaaataagactgtaaaatgttaagacatgtaataattatgatagagagctgcattttaagtggatctcaaaggaaggatagaattttggtaagtgaagattgaggaaagggcactcatttttctagcagttagtatttcatcaccttctgaagatggaaatgagaaaaccatatttggggtyagcaagaagattggcctgtttgtaaaactgattgatatgaggagcaaagggattgggacgtgca

SEQ ID NO: 723050 - DNA, 2738 bp, Homo sapiens
ccgtctctactaaaaatacaaaaattaactgggtgtggtggcgggcgcctactgtagtcccagctactcaggaggctgaggcaggagaattgcttgaacccaggaggcggaggttgcagtgagccgagatcacaccattgtactccagcctgggcgacagagcaagactccgtttcaaaaaagataaaataataataatagttttatacaacttcaaatgcacttgggggcacacatgttttagagaattcgattttgatattgttttggatcaaactgtttgaaatctttttgcaaatatttggattgtgagttcagctagtagaaccatcatataagtaaaaacaaaacacaaaactggtgttctgtgaactgtttcctccggggtaggtggttcttttccactactttctttcacgttcattgttttgttttctgcatatctgggctcctccagtgcctgctgacaagaacgaaggcccgggcgattattctcaatagattggctttcttctgctgttgctgctgttgtgtgtacatagattttgtccccccgtggcctacctctgactggtgtgcacatcgcgggtagggcctactgcctggtagaccttgctgtggagcattgggcaggggttttcttcaatacctgtgagatctgtgctcctagacgccatcacctgcacctgcagccccggctctccccacccagtcatgtctccttagggcgaagctcctggcctctgttgtacagaaagccctggcctgtcctgcatgtgggtgagagaagccaagcctggggatcccagaggaatcgacaggcttattcttctccatacctccaacaggctctcactgtatgtttgttgaaattgccccatcctcagtccactaagaaataaaagagcatccatgttcatggattgagattcccacagatcgttgcaaatgtaatgtcatcatttgcttgatcccctgatagtactgataattacacaaggtcatttccagacagtggctactgtttccattgtggaggggttttcaaagtcttccgtacataagaacaattgtaaagcagtttctgaaatagaaatctattgcaaataacttcttttagctggactttaacccttgggcatttcattcttttatttaaacagatgatgctggagggtcttgaaatctttacagtaaaacctgcaacttgaaaactagccttctgtaaccacagtgcccaaacgaagaggaatgtatggagaactccacgtggatctctgattgcgaaaccgtcacatacaccaagagagccacatgggcatgtggccctcaaggctgggtgagagggctcccctgtgtgttgaactatgcaggagggtgaygcggacacatttcaggtggactttgcaaggactgatggatagctacctcagggaccagaatccgtgggaagggatggacctggtgttcccgttcccatctgacaggctctcttttgtcaaggtggtatttttcgtaataaaaggggaagagtaaagactgtccaagcaacagtagctgccaaagagaaaatacgaaatagacactttttttttttgagtcagagtctcactctgtcacccaggacagagtgcagtggtacgatctcaagctcactgcagccaccaccgcctgggctcaagtgattctcctgcctcagcctcccgagtagctgggattacaggcgtccaccaccatgcccagctaatttttttatttttagtagagttggagtttcaccatgttggccaggatggtctcgaactcttgacctcaggtgatccacccgccttggcctcccaaagtgctaggattacaggcatgagccactgcgcccagcaaaataaacacattttataatttgtatgtggaaacatgttactatagaaagcattttaaaggtacgttttaaaggtccactgttaaatagtaaagaatgaatccgctagcgaaaatgtttttagggagaacagctggatcaaaagggcttctttggaattaggttgttttagtaacttctgttccaaagaaacacaggtctgatattgctaagaactgaaatcggaggagccagaggcccttttcagtccaggccaacattgtgcacggccactgtgggactgacaaccgggatagctcaagttcgagagaccaggtttcaaacattataagttccaggctttgcaagtctttattctctggggtaatatccagtctttctgttattgtctcttaaaattctcttccatggcccacattaagggagtttgcagagagtgagggaggcaaaacttgaaaagggcctgcaacactttaaaccttctcaggttcacccacatgaaacggctgtgctgagtgtgctgccggtgcccggggagcttctctgactgtgacccggcagaggcttctgtggcggtgcatgagcggccctacagtggagggttctctttggaaacaaacagccctgcttggtttcagtttgaggccacttatcttcaatgtgacatttcttgccaagccctgtgacactccccattgatgactcccataggtacagataaagttaagaacaggaaacagaagggtaggatgcatagggagggagagaagccctgaaaactttttttttctttttgaagcatggaaaacaaatcttttatgccactccagccataaataaaattttaacttcaaccctg

SEQ ID NO: 723051 - DNA, 658 bp, Homo sapiens
agcttttacaaaacacaatgtctaggcctaatttcccaacaaatcaaatacgaatccctagggatgggatgtgggacaccagcactctttacatatcctaagatgactctaacaagcagccagcctagggacccctgctcttttgctccgacctgctgacctgcagtgattctaaacgaagtgactctcataggctgtaggggcaaggagaccttccagtgatcaagatgtcagcatcggctgtttatttctggtcttggctggcagcaatgtggccaacttcggaccagccagccacaggtctggggcyccaggatgcagctgtgctctggtgcactgtgggtcttcactcatacttgcagaaatccttaagttctttgggcaggtggagcccatcaatggccagccggtgcaccatgctcctttgtatcactaggcggcacagagtctgcagggatggcactgtgggaagaagactgtgaaaggcaaactgaactggagggtgggtctgaggccaagatccagaaggtctaggtcatggtccccactttgtcattaaatgtgggcaagtccttactgctctctgggcccagcctgcttcatggggctgagagaagcacctcttcctgagagctgccacaaagctgcagccctgttt

SEQ ID NO: 723052 - DNA, 1541 bp, Homo sapiens
cttttggaggaatcaagaaaaagcatcattaaggaggagttatttaagacaagccttaaagatgagtgggattttgacaggtaggattggaggaggaggttgttcttaaacaagatgcaaaggacacacaggcacgtgggtacaaggcttattatgttcaagaaatagcaaatagtcctatcagcagggatgtakgattcttgtggtgtagtaaggaaaattggggctgaaaagtggattgtggtgaaactgtggagagctgtgaatgtcacgaggaaggatttaactttgtagaaggaagttagcatcttttgtgcactttttagcagcaattgcttgatttcagccaagcatgtctctcaattgttcctgtgaataagatggacagtaatgctgttcgatggatttataactggatgtataaataaactggggcatgtccaacatcaacatgaaattgcaaagggcaccaagcttccttccttttgcatattttctaaacatcccaggggtaagtttcatgagggcagggatttaatctgatgtgttccctgctgagtccttagctaatgctgaacaggaggctttgtgagggagagaagccctgttgctgaaggaggagtttgatgatcttttgcctgtatcttcatagcaggatacttgcattttagggaagttagcaaaatgttctccagttctaagttctgccataaattaaccctgattcccctgtattctgtagtgtttgaaggaaacatgataacctagatgtaaaagcaacccctttaaagagtagcagttagaacatgacagtcatccatattggtcaaactcatggtccagccgtagttctcaggccgtacactaagaattttggaaggaaacaggcatgctcttacacacaccaactacagacagttagaccagccattaacatcattgtaaatgcaaaaaatacgagtgtgacctccaacagtgaataaatatcatcctgcatccaagagatgcaaggtaagagatgagctgcagccatccttgtttttcctttaaagtatttatggatctagcttgaacttacactgtcaccatgaatattctacctcttaatagctctctgtgtatatatatatatatatatatatatatagttttggggagtgtatgttgagatgcggtctcactatgttgtccaacttggagtgcagtggcatgatcatagctcactgcatcctcaaattcctgggctcaaatgatcatcccacctcagcctcccaagtagctgggactataggcatgcgccactactcccagctaattttttaaaatttttttagagacaaggtctctcgatgttgcccagactgatctccaactcctgggctcaaacagtcctcctgcctcagcctcccaagtaactgggactacaggcgagatctgccacatccagctcagtattttcttttatatgatctcaatttactttcaaacttcatacgtctatctcctgttttgcatgttttgagagcagatgaatgtgtcga

SEQ ID NO: 723053 - DNA, 1541 bp, Homo sapiens
cttttggaggaatcaagaaaaagcatcattaaggaggagttatttaagacaagccttaaagatgagtgggattttgacaggtaggattggaggaggaggttgttcttaaacaagatgcaaaggacacacaggcacgtgggtacaaggcttattatgttcaagaaatagcaaatagtcctatcagcagggatgtaggattcttgtggtgtagtaaggaaaattggggctgaaaagtggattgtggtgaaactgtggagagctgtgaatgtcacgaggaaggatttaactttgtagaaggaagttagcatcttttgtgcactttttagcagcaattgcttgatttcagccaagcatgtctctcaattgttcctgtgaataagatggacagtaatgctgttcgatggatttataactggatgtataaataaactggggcatgtccaacatcaacatgaaattgcaaagggcaccaagcttccttccttttgcatattttctaaacatcccaggggtaagtttcatgagggcagggatttaatctgatgtgttccctgctgagtccttagctaatgctgaacaggaggctttgtgagggagagaagccctgttgctgaaggaggagtttgatgatcttttgcckgtatcttcatagcaggatacttgcattttagggaagttagcaaaatgttctccagttctaagttctgccataaattaaccctgattcccctgtattctgtagtgtttgaaggaaacatgataacctagatgtaaaagcaacccctttaaagagtagcagttagaacatgacagtcatccatattggtcaaactcatggtccagccgtagttctcaggccgtacactaagaattttggaaggaaacaggcatgctcttacacacaccaactacagacagttagaccagccattaacatcattgtaaatgcaaaaaatacgagtgtgacctccaacagtgaataaatatcatcctgcatccaagagatgcaaggtaagagatgagctgcagccatccttgtttttcctttaaagtatttatggatctagcttgaacttacactgtcaccatgaatattctacctcttaatagctctctgtgtatatatatatatatatatatatatatagttttggggagtgtatgttgagatgcggtctcactatgttgtccaacttggagtgcagtggcatgatcatagctcactgcatcctcaaattcctgggctcaaatgatcatcccacctcagcctcccaagtagctgggactataggcatgcgccactactcccagctaattttttaaaatttttttagagacaaggtctctcgatgttgcccagactgatctccaactcctgggctcaaacagtcctcctgcctcagcctcccaagtaactgggactacaggcgagatctgccacatccagctcagtattttcttttatatgatctcaatttactttcaaacttcatacgtctatctcctgttttgcatgttttgagagcagatgaatgtgtcga

SEQ ID NO: 723054 - DNA, 1007 bp, Homo sapiens
aaaaattagctgggcgtggtggcgcgtgcctgtagtcccagctactcaggaggctgaggcaggagaattgcttgaacccaggaggtggaggttgcagtgagccaagatcacaccactgcactccagcctggtgacagagcaagactccgtctcaaaaaaaaaaaaaaaagaaagaaagraaaaagaaaagagagcagttctctggcaatgaatactgtgtaattttattgaagaaaaaaaaaaaaactaactgaattacatgccctgcaagggtgacgtgcctaagtgactcagttagctggagagtgactctcctctccagtccttccctactcatggccatcttcccagggtacatttaataatggattgtatatttcaaaattgccaagacagaagattttaaatgttttcactgccaaaacatgataagtatgtaaggtgatggatttgttaattagcctgatttaatcatcccacattacaaatatgtatcaaaatgtcatcccatgaatatctacaattattatttgtctagtaaaatttttttttaaatttaatgtttctttgtagaaagcggctctgaaactaagtcagctgagggtgccagggttgtgtatgttatcatggcccttgaggttatgattccagatctgaggacggtcctcacggaggccagatgtctgctgtggttttcacatgctgacctggcttggaagggaaagccaggtttggggcatttcacaaaaataacatttttttcattactcttgtttctctcaacatcatccctctcaccacaaggggtcagtcagcacattttgcctttgaccaaggcaaaacgccaggcgagtgatcatccctaggcgggcctcgtgttctgaaggaactgatggagctcctgttgacctctttcttgcagccaaggggaatctgatttagtagattagtgatgctagactctcatttctgttccagatatactgccaataggccctttattatag

SEQ ID NO: 723055 - DNA, 2675 bp, Homo sapiens
tacataattcatgtgtaggaacataatccttttagcctagaagtaaaaaatgatatagtcttgccctatagcactgatcatggccatatataatttataataaccaaaataatgacaatattttggtacagcatgctctattaatttgaatgctcacgagttaacacataattcaatgtgatatgtattaggttatagaaaaccatgaggtaaaaatcataggctgcattgaactttctacttccccaactttgcctcattatagggagggatgcagccctagagttcaagaattccataaagaccaaccggaaattctggtgcctggcatcttgtcacaccttcttccaatacacaaacatcaaggagtgtagaagttgaacatggtctgttgtcactgcctcaaagaatccacttctagcttgttcacactagggtgtgaacatttaaagagggtagggaagaaccacctgggtggattttcactggggatcttataataaactctcaaaatcccagattgagacaagggaagggatgctcagtcgtatgtaattaggaaaaagagagggattttgaacccacccctgcatcatctaagtcaaatagagccagtgtaactgttgggaccgttgcaggtagggtgtgctaggtaccaagccgcagttaggtaaccaatgacttttacaagcttattttcatctcagtacaccacatgcttcatgtgccacgtgcatgtatgtaagttacacatctaagattatattattgggttacactaccatgaattatctaaggaaaacagaatgatcatcattgtgtgtgcaaagacgacttctgaaattaataccaacaagagatttcttctttgcatattttcaagcagaaagtggactaaattatatcattggagcatgacgtctcaaaaaatatttattgccaaataattctttactgctaaaaattatttattgcatgaaatagaaaagatctgagactgaaacttccatttaaaaacatgatttaaaaaaatagagtaattacataacaattatgaaactcagatgccagagtcagaaatcaagaaattaactatgtcaagcaattacaatatgattacaaaggcccttatatattcatacaagctttttgcattttttgagctaattttatgaaaaacatcaaaagccagaaaactaatgcttaatgtatattttaaggccaagaacaatatagaaaaattaattttctccttaaagttttttaagatatttaaagtaaacattttaaaaattatttaatctgtgacccaatttgaatcactttgctcttcagattccgatgtctccacaaaaattccgatgtctccttgaaattagctgatacattataagaaatgaatgactgtcctgtcctatttgggatacayataaaagttaccccaaaggtttaattagatagtgaagtacaaaaatacagatttgtaaaatattaaatatataaacaatataaatctctattttgacaagtgacttgataaactaggttaaataattgttaatagagttgggtaaaggcagtgatgttggtaaactagtgatccaaatgaaaagaaagtcggctgggcacggtggctcacgcctgtaatcccagcactttgggaggccaaggcgggtggatcacaaggtcaggagttcgagaccagcccggccaatattgtgaaaccccgtctctaataaaaaatacacaaattagcccagcgtggtggcatggtgcctgtagtcacagctactcaggaggctgaggcaggagaatcgcttgaaccagggaggtggaggttgcagcgagctgagaccacaccactgcactccagactgggcaacagagtgagacgccatctcaaaaaaaaaaaaaaaaaaaaaaaccagaaaaaaagaaagtcttgatacatggtgtatgctgcatgtatgtaagttacacttcaaagagtaagtcctcccaccatagctgttttcaagttattaccatttcaagatactaactcctgtgaataggagggtgaagtctttaaattacaggaaatttcaataaaagcctgaggcaaagatatttcaagggttttggttaaacaaaagacacattggctggcatgaacaagaggaatgcactatcgaaaccatcttagtcaatggcaggaagacagtgttatgagtctactggttacagaaaatctttgttttaaaaactcaggtttatcgaattaaaatttatatatgccaaaagtcatctttttaagtatgcagtgtgttgaaaacatagatggttatataacaaataccatcctcaagatatagaacagtaccatcacctagaaaaattcccttttgtgccttttgaatcagtatttctgctgccctcagtctttggaaatcgctgttctttgtccctatggttttatattttctagaatgtcatacacaagggagcaaacagcatcctgaataggcctttaaatctggctttttaaatagcataataaatctgagacacattcatgttgttatgttatcagatttgtttctttttcttcctaacgtgatattaaatagatacagtatataactttttgactattcaccagtttttgaaattatgaatcatatggttaaagtcac

SEQ ID NO: 723056 - DNA, 2675 bp, Homo sapiens
tacataattcatgtgtaggaacataatccttttagcctagaagtaaaaaatgatatagtcttgccctatagcactgatcatggccatatataatttataataaccaaaataatgacaatattttggtacagcatgctctattaatttgaatgctcacgagttaacacataattcaatgtgatatgtattaggttatagaaaaccatgaggtaaaaatcataggctgcattgaactttctacttccccaactttgcctcattatagggagggatgcagccctagagttcaagaattccataaagaccaaccggaaattctggtgcctggcatcttgtcacaccttcttccaatacacaaacatcaaggagtgtagaagttgaacatggtctgttgtcactgcctcaaagaatccacttctagcttgttcacactagggtgtgaacatttaaagagggtagggaagaaccacctgggtggattttcactggggatcttataataaactctcaaaatcccagattgagacaagggaagggatgctcagtcgtatgtaattaggaaaaagagagggattttgaacccacccctgcatcatctaagtcaaatagagccagtgtaactgttgggaccgttgcaggtagggtgtgctaggtaccaagccgcagttaggtaaccaatgacttttacaagcttattttcatctcagtacaccacatgcttcatgtgccacgtgcatgtatgtaagttacacatctaagattatattattgggttacactaccatgaattatctaaggaaaacagaatgatcatcattgtgtgtgcaaagacgacttctgaaattaataccaacaagagatttcttctttgcatattttcaagcagaaagtggactaaattatatcattggagcatgacgtctcaaaaaatatttattgccaaataattctttactgctaaaaattatttattgcatgaaatagaaaagatctgagactgaaacttccatttaaaaacatgatttaaaaaaatagagtaattacataacaattatgaaactcagatgccagagtcagaaatcaagaaattaactatgtcaagcaattacaatatgattacaaaggcccttatatattcatacaagctttttgcattttttgagctaattttatgaaaaacatcaaaagccagaaaactaatgcttaatgtatattttaaggccaagaacaatatagaaaaattaattttctccttaaagttttttaagatatttaaagtaaacattttaaaaattatttaatctgtgacccaatttgaatcactttgctcttcagattccgatgtctccacaaaaattccgatgtctccttgaaattagctgatacattataagaaatgaatgactgtcctgtcctatttgggatacacataaaagttaccccaaaggtttaattagayagtgaagtacaaaaatacagatttgtaaaatattaaatatataaacaatataaatctctattttgacaagtgacttgataaactaggttaaataattgttaatagagttgggtaaaggcagtgatgttggtaaactagtgatccaaatgaaaagaaagtcggctgggcacggtggctcacgcctgtaatcccagcactttgggaggccaaggcgggtggatcacaaggtcaggagttcgagaccagcccggccaatattgtgaaaccccgtctctaataaaaaatacacaaattagcccagcgtggtggcatggtgcctgtagtcacagctactcaggaggctgaggcaggagaatcgcttgaaccagggaggtggaggttgcagcgagctgagaccacaccactgcactccagactgggcaacagagtgagacgccatctcaaaaaaaaaaaaaaaaaaaaaaaccagaaaaaaagaaagtcttgatacatggtgtatgctgcatgtatgtaagttacacttcaaagagtaagtcctcccaccatagctgttttcaagttattaccatttcaagatactaactcctgtgaataggagggtgaagtctttaaattacaggaaatttcaataaaagcctgaggcaaagatatttcaagggttttggttaaacaaaagacacattggctggcatgaacaagaggaatgcactatcgaaaccatcttagtcaatggcaggaagacagtgttatgagtctactggttacagaaaatctttgttttaaaaactcaggtttatcgaattaaaatttatatatgccaaaagtcatctttttaagtatgcagtgtgttgaaaacatagatggttatataacaaataccatcctcaagatatagaacagtaccatcacctagaaaaattcccttttgtgccttttgaatcagtatttctgctgccctcagtctttggaaatcgctgttctttgtccctatggttttatattttctagaatgtcatacacaagggagcaaacagcatcctgaataggcctttaaatctggctttttaaatagcataataaatctgagacacattcatgttgttatgttatcagatttgtttctttttcttcctaacgtgatattaaatagatacagtatataactttttgactattcaccagtttttgaaattatgaatcatatggttaaagtcac

SEQ ID NO: 723057 - DNA, 1044 bp, Homo sapiens
atttgaaaactctttaattttttaatattgtgtcccatttcttaaaaaggagagaagctatattaacttttgaattcagtacacagttaacagttctttcatttaatatgtgataatataaatttaacagtgaaactttcaaatactcatattaacttaccctgatagattttatagctttaatataaaacttctcataaatgtaaaatttgacaaagcacaatattctccaggaagttagaaaagtaatataattttctgtctctcagaatgtgttttctaacctctaaatataaattgatggactaatcttttaaaattcagaatcaaatataattgctttggtttgatcattgagaattctttttccattccatcattttatagtttttgcctaaataaaatacttaaggaagttattgttatgttgtatttgaaagatgcctgatggagaaacattcatagttcttttctatccttatgaaaggttatatgaaaacatatatatatgtrtatatataaacatgtggataaagtacagaaaatcctatcattgcctctgactcaaatggtaatctttaatataaagatttgaaactttcatggaacagtatatcagaactttatttccaatttgtttatgtatacttaacgtatatcctaagtatcaagaaatcacattcaattaacatatacattataaaacaattcttatatgataattctaataagtaaacatgattttagtggtagtaattattcaatcaaatattcatattttaaagattaaatcttcatattttaaagcacattacatcagtttacaattcgatattgactactggatagaatttatcaatgaaattttgaatatggcatggttaatgcagatcatgtgaattaaattgcaaggcagagagcttttaaattaaaaaaataagctggtttataaatccagtgctagatagttaataaaagcaatacatataaatctcccagacacctcccaatcttgctattttgaaatattttcctctttttaat

SEQ ID NO: 723058 - DNA, 623 bp, Homo sapiens
aaaaaggatggggactggaccgtcagggctttttccagtttaacctcaaaggtttgttaatgtccttttgtcttgatgtcttaattgcctactccaacacctggctctctctccagagtagttaagctcctgatggctggggataaatttaatgactactgttttgtataagttgaggttaatctaattaatttacctagagggaaaattctgacctctatctctgagacctcatctaaaacacagaggtcatgaagataaatctggcttctgccttcaaggagcttacagtctggtgaagatgatagctggatagctagacataacaataaaaccacagctgttcccttgtgataatttctgttatgagttatgtacaktggaatatgaaaaatatataaatggtacataaccaattctaggaggtcagggcaagcttcctgggagaaatgctgtctataggtagacacagagagacaagaatcaaagcctcttctgaagaagggttaaataaatctcaggcagataggctatgcatgacctgcttcttttatctgtcatttttgttgttcagttacttgctaaattttaagaattttatatatatatattatatttataat

SEQ ID NO: 723059 - DNA, 1387 bp, Homo sapiens
catgtatcccagaatttaaagttaaaaaaaaaatggttgtatcaaaccccaaatcttgaaaatataaaaacttaaaaaaaagtaacccactccccttgaagcaaggacaggcgcaccttacacgggaacagacatcctctgaaatgcaattattttgccttttgtttgtttgtttgctttgttttttctactatttctttttaattgaaagagtaataatgcagtaatagaattataactggtggcatcacagggctgcatattagtaaccttagctgaagagctgtataaatatctcatgcacatgttctgaaagaagtggagctttatggcccagagtgataaggaggaaaaaataaaaaatgcctccatacattcaaattttattaaaagttgaattaaaacataaacatgtgacagattttaaaatttaattatttgcaaaagcgttttttgaaatttacctcctaatgttttgcctataaattcatgtttttataaatgaaccttttttattgctagaaggtggcaggttccacatcattcttattcctatatcattatttttataagatctaagaactgagaaatcttgttctcagaaataagtggataggattggaagggctttgttataacaatgacatttgattctttgaactcctttgaagaatgacaacaaaaattgcaggtgtccattgacaattcaactaggtatttcttcaaatttttaaaagtaattaaaaatctaaaacaaaacaaaacaaaacaaaaaacacaaatgattagcaagattttgttacccagtcatcaaggtgacttacttttgagaagtggagatgaatgttttgaattgccccttcgttttgcatcctggaaatttcaacacctggggacaaagcaccaaggtaaagttaaaaaaagtggagatatatttttctcttttaaaaaaagaaacattgtgggagaagaattcttttgaaaaagaagaaatgaaagagggacagcaagaatgatgaaagaagtattcgaatgtgacacctggaaacctgttctttaaaagtctttgcctggccgcagtacgcctcacaaagtctttgtgtaatctccagggttagcaggcctcagatcaaaattagaagcctaaatggcaaactaaccaaattggttttttttttataaagtaaaatctctcaattcacttttaaaataaacttaatctggtttgaagtgtccctatgacaaccatctcaatactgaattttaattatatgataggtatgtagctaattacatcaaataatagttaacagttaaatygatctctggctgtatttttatttttatttttttgagagcttctctctctgtcatccaggctggagtg

SEQ ID NO: 723060 - DNA, 2767 bp, Homo sapiens
tatattgtcttgagagtccacactatgaaataaattggcccttatttactcctcaattgaaattcttcagactttcttaaagtttctaaataagtcccagttagtggaaatgaactgaatttagtttaattttttttatcatgcattgctgtccaaaagaagaaagcttatttctgccaacttcttcttatcctcaacttccaaccactgtcacgtctgtcttctttctttttaatattttcaggtgaattagaggtttgtcaaccgtaagaatgaaatatatggtttatggcctatttttatgtaactggtcattctgagatctggaaaacactacctgtgtttatctgcaactaaaatctagacacctgagcctacactgcatagcgaaacaggtcactagaaaaacacaagcaatttagaaaggcttttaatattgaacagttgcattttgtttctattcatgtctatcgctttctcttttttattctaaattgctttattatattctatatttaatattctatcattaacatgtcaataacagtcaataataattgaggactcaggttttgtcaatacactgatttataattagtacaatatgttatgagtttccttcgcacattaatattatcagctcttcattttttgttgttcacaatatatcttcaactacctttttatttttaggcaatgtacatattacaatttaagaataacatcttctttgttaaatatttatttccaccccttttcagaaaattagatggtttacatttattgttagaaataatataaagcttttctggttttgtgcttctaaataatattattaatatattcttttgtaattacaaaagctccttgtttttgttttgtaattcctttctcaataaaatagagctgcaaatattttgttcctttaaatatttcaaataaataattttcatttataataaaaaatataaaatatgccaaagaatttattatttcaaaaaatatgtcattcaccaatttgcttttagatttgtgaatacagtctcattttattttaatactttaatcatagatcgtgactgtgttataattaattttgatttgtatttaacatggtaataatatttttactggattttatattgttgggttagtagtcactgttagtacacataactattttactttttcaacatgtaattttcattaatcttattcagataaagttcattttcactatttttcttcaattggaaatatttcatattttaaagacttccattcctaacaaatgtggaatacaacatttttagctcaaaatatttttcaaaacaaaacagaatttttccagtcttcacatataaaactaaagcaacaagctcaagtctatccagacattttatacttcagaaacgaaaatactaatcttacgtgtttatggcggatgtttttcttataattttagttaaaaaatatttgtagaaggtttttatagtaatatagtcagaaaattagtctgcatttttacctacaaattaagcagtattttaaaaattagctcaggaaattttattttatattgtattttagtctgcatttgaatgatatttaaattcttagattttcactttagatgtgggaactccggtgcttaattctatcctctttaattttatatctgtgatttcttctgctttgttttcagttctatttttttcctgcactgcaaaagagtttctaaagattgtatttaatattacaagcttcatttagtgctctatcatttggcatttacatttttacatagttttaaaattatatatatttctttgtattttttatctaattttatacaattttaaaaatcatgcacctctaatatctattgactaggtttagctttcatttcagagataacatyaatagtgaaaaatattatcttaaatgcaaagatattcattatttaaaaattgatcaatgacattcactaaattatcacagggacgaaaacataaaatgatcatctgtagagatgcagaaaaataatttgacaaaattcagcactgatttataagaattatcagcaaaataagaacagaaatgaaaattgaccaacaaccagaaatgacagcaacaacaaaataccaagtcagtaaagatggagagaaatagggaagcagtgaaggtagatgtcatttctgtttttagtggtggagtacaaggtgttcttgtgcttgaaggtcatgttcttgtgataaaacgcactgcagagacaacacagtttaattggctgaggcaggtgactccctttaagcatcagggtggaacaaactacacgacaaaatgtaattttaaagaccactctcattcaaatgtaataatatcaaagcacccttaactcattaatgagtgaaacaatgagtgtcatggtctgaactgtgttcccctccccaaacccgtatgttcaagccctaacccctagttatacacataaggtaaatgaaacctcatttggacacaaagtttttgcagatgtaatcaagctaaaattatctctgtaggtgggacttaaaataacatgggttgtctttataagaagagggaacagaaacagataggatgtggagaggaccatgtgaagagagaagctgagactgaaaaggatttatgtattaatattgacagaagccaaggaacaccatctgaagttctgatggcaacatcagaagctaagagaaaggcatggaaaagattctcacctagagca

SEQ ID NO: 723061 - DNA, 2767 bp, Homo sapiens
tatattgtcttgagagtccacactatgaaataaattggcccttatttactcctcaattgaaattcttcagactttcttaaagtttctaaataagtcccagttagtggaaatgaactgaatttagtttaattttttttatcatgcattgctgtccaaaagaagaaagcttatttctgccaacttcttcttatcctcaacttccaaccactgtcacgtctgtcttctttctttttaatattttcaggtgaattagaggtttgtcaaccgtaagaatgaaatatatggtttatggcctatttttatgtaactggtcattctgagatctggaaaacactacctgtgtttatctgcaactaaaatctagacacctgagcctacactgcatagcgaaacaggtcactagaaaaacacaagcaatttagaaaggcttttaatattgaacagttgcattttgtttctattcatgtctatcgctttctcttttttattctaaattgctttattatattctatatttaatattctatcattaacatgtcaataacagtcaataataattgaggactcaggttttgtcaatacactgatttataattagtacaatatgttatgagtttccttcgcacattaatattatcagctcttcattttttgttgttcacaatatatcttcaactacctttttatttttaggcaatgtacatattacaatttaagaataacatcttctttgttaaatatttatttccaccccttttcagaaaattagatggtttacatttattgttagaaataatataaagcttttctggttttgtgcttctaaataatattattaatatattcttttgtaattacaaaagctccttgtttttgttttgtaattcctttctcaataaaatagagctgcaaatattttgttcctttaaatatttcaaataaataattttcatttataataaaaaatataaaatatgccaaagaatttattatttcaaaaaatatgtcattcaccaatttgcttttagatttgtgaatacagtctcattttattttaatactttaatcatagatcgtgactgtgttataattaattttgatttgtatttaacatggtaataatatttttactggattttatattgttgggttagtagtcactgttagtacacataactattttactttttcaacatgtaattttcattaatcttattcagataaagttcattttcactatttttcttcaattggaaatatttcatattttaaagacttccattcctaacaaatgtggaatacaacatttttagctcaaaatatttttcaaaacaaaacagaatttttccagtcttcacatataaaactaaagcaacaagctcaagtctatccagacattttatacttcagaaacgaaaatactaatcttacgtgtttatggcggatgtttttcttataattttagttaaaaaatatttgtagaaggtttttatagtaatatagtcagaaaattagtctgcatttttacctacaaattaagcagtattttaaaaattagctcaggaaattttattttatattgtattttagtctgcatttgaatgatatttaaattcttagattttcactttagatgtgggaactccggtgcttaattctatcctctttaattttatatctgtgatttcttctgctttgttttcagttctatttttttcctgcactgcaaaagagtttctaaagattgtatttaatattacaagcttcatttagtgctctatcatttggcatttacatttttacatagttttaaaattatatatatttctttgtattttttatctaattttatacaattttaaaaatcatgcacctctaatatctattgactaggtttagctttcatttcagagataacattaatagtgaaaaatattatcttaaatgcaaagatattcattatttaaaaattgatcaatgacattcactaaattatcacagggacgaaaacataaaatgatcatctgtagagatgcagaaaaataatttgacaaaattcagcactgatttataagaattatcagcaaaataagaacagaaatgaaaattgaccaacaaccagaaatgacagcaacaacaaaataccaagtcagtaaagatggagagaaatagggaagcagtgaaggtagatgtcatttctgtttttagtggtggagtacaaggtgttcttgtgcttgaaggtcatgttcttgtgataaaacgcactgcagagacaacacagtttaattggctgaggcaggtgactccctttaagcatcagggtggaacaaactacacgacaaaatgtaattttaaagaccactctcattcaaatgtaataatatcaaagcacccttaactcattaatgagtgaaacaatgagtgtcatggtctgaactgtgttcccctccccaaacccgtatgttcaagccctaacccctagttatacacataaggtaaatgaaacctcatttggacacaaagtttttgcagatgtaatcaagctaaaattatstctgtaggtgggacttaaaataacatgggttgtctttataagaagagggaacagaaacagataggatgtggagaggaccatgtgaagagagaagctgagactgaaaaggatttatgtattaatattgacagaagccaaggaacaccatctgaagttctgatggcaacatcagaagctaagagaaaggcatggaaaagattctcacctagagca

SEQ ID NO: 723062 - DNA, 604 bp, Homo sapiens
gagtctttgagatagaggggactagggtgtggcagtcatttaggggtgggtaaggggacagtgaaaatcggtaggcagtgggtcagcaacccttctccaggagaatgcatttgaaatttggggccaggcacagtggcttacgcctataatcccagcactttgggaggctgaggcaggcggatcacatgaggtcaggagttcgagatcagcctggccaaccatggtgataccctgtctctactgaaaatagaaaaaaattagccagacatggtggygggcgcctgtaatcccagctactcaagaggctgaggcaggagaatcacttgaacctgggaggcagaggttgcagtgagccgagattctaccactgcactccagcctgggcaacagagtgagactctgtctcaaaaaaaaaaaaaaaaagaaaagaaaagaaaagaaaaaagataagaaaattggggaaaatcctcaggaagacattgaggtggggatgaagttgcagagcccttccaagggagagatcggggttggtagggatggagaaaaagccaagtcagacactgcagcccagggaggggcccatgtatgggcacagaggatgcca

SEQ ID NO: 723063 - DNA, 2776 bp, Homo sapiens
tctttccttccatctccttaggttgtcaaaacagcttttgaaagccccttcttctcccatcattctcagcaaactaacgcaggaacagaaaaccaaacactgcatgttctcactcataagtgggagttgaacaatgagaacacatggacacagggagaggaacatcacacaccagggcctgagggggcaagaggacggagagcattaggacaaatacctaatgcatgcagggcttaagacctagatgacgggttgataggtgcagcaaaccaccatggcacatgtatatctatgcaacaaaccttcatgttctgcacatgtatcccagaacttaaaataaaatcgaaagagaaaaccccttcttctgtccagctgcactcctccacagccccaagttgcctttctgaaactttctcctctccccagctcccttctcctgctttccccagattacttccctgccctttctaaggtgaaagcaattccacctgtctcatctcccatcgatgttcttttcacccattacccagatgcacacaacagaggctgaaaaaccaagaagttctaacaaaaaaccttcctgagagattagggcagaggaaaggctgcaaatattagatatcaatattgatccatgtcacaactgaaaacaaagtaagagagtgcaggcaaatgtgttggaggaaattctgggtggaggtgacgcttcttagtttccccaagagcgaggctgtcttgaatactttaggatttccactagaaggaaacaacactaattggccagaagatggcactcttttaaaacaaattggggccgccccctagcacaggtgctggaagatagtcaatcacagtcgttaaagagctccaagtgcagagaagggctgggcagacaggggaacagtaaaagactgatggggtgaactacggtcaatgggacaaataggacttaacagtcagcacttattagttgcagatgtggttttctttaccatttagtcatgccatttctattttttacttcctgtctcactatgtggtgtccttagtctcttgccacacagtgatgcttatggaggcctgaggattctggtaacttcctcttaaatcgtgcttcccctgcattcctagcacctcatgcttttctgtaatagcactgaccagagccacaattaatgtgttccacagtatctacaatcaactgtgtgctccatgaggtgggctgtgtcttgtacactgctgaatcacagcatggtgcctacctaccacatagtaggtgctcaataagtaggtgttgaatgattgtaagaaattcaaggtaataactgctcgcaaaacttaagcagtgcttcctttctgctattctaaaaggttgatggagaagagctgatgcctactgagtgcttgctgcattaagccgttacctgcattatctctgttttcccatcaattctgtaagacaggtacttcaagccacagtacttatctaggggcatgtaaaaagtaaatgacacaaggtgcaggggtgccctatatcaatccatcaagattctcattactgcactactctgtggacctttaagcaccccacccccgccaatcttcgtctctttccctgtccctacctccccatcccccagcacacacccacacctctttcctccactctatttcacccatagacctcggtggtttgtggaaaatatatgaggcccattaataggaaaacctggttcccattgaggtgttactgtttggagtgtaaataaatagtagcctttgatggatcacacgtgcattaaggggaggtcttacttgaagggcccacagcccaccttgaatgaatggcaagtttcctcaagccagctttttcacatgaggcttccaaagctgcttttcagaaacttggctccaggctgagacaaccagttcacatcwactgtcactttgagacctgcttttgccttcaaactctgaaaagaatggccttgatcaaggaagagagccaagccctgggctctgatagaggaaagagaactgttactattacctagtaccttcctttgttttcatcctcttcctctaatgtctcagtcagcttccttaggctaaggggcatgccttgcacatttaccaccacctcagtgtaaagcaaggagtatagtttgaaaaaattaatacactcaatgttgatgtcctgtttgctgaaattatatcatagcacagaataaatgttaatagaagagcggtgatttctatctcactgcaaatatgtggtttttccaataaagtctgacactgctctcgtcaatcgtgacattcacatagcaggagataaacactgccacggtatgctgggctggggaagggtaatttcttaagggagatttctggtctaagaagacttttttctgtctttgtttttcttttttgccattccaacccaggcctctcctactcactccaggtagttttacaaagtggttgctgatctttgtgcttatttctcagaaaatcagacatccaaaaagaacttgtaagtgatggaaaatacatcatttaagtgatgcaaaaccaaaccttgcacttctttatcaaggacttgaagacaacttggacatgtgaaccaagccttcaaatgtgttttattttttattttattttatttttatttattttatttatttttatttttttattttttttgagacagagtctcactccgtcaccagggctggagtgcagtggcacgatcttggctcactgcaacctccgc

SEQ ID NO: 723064 - DNA, 1547 bp, Homo sapiens
ggatgaaaggaaaaacatcctttagtgcctctggtcttgctagtccccctagaatgcagccccttgaagggaaccatattgtcccacatgtacctccagggtctcygctaaggagaaaagatactcctacagggaaaaacatggtacactcgaggactctcttgggaggatcatcaatcccccagctccatgcatatccaattggttggaaccatttacagcatagaaggggaggcaagacttgctgtgcccaccttcccacacctccaggcctggtgccatgtgatataaatcgtgggctctgcaattgtgcctgcgtccacttcccataatcttggagctccccatgaaggagaaaacaggcagagtgtgatttcacagagtgcgattcacagcagaaactgccagaaggagactgggacaggactgggggagtgtgtcacagggatctgtttttcaatcatgctctggggaagctggtaccactttttgctagtacttaaaaaggcaagtggcatctggatgcccaaatagggaataattttctcttcaccatttttgtctctgatgaaaatctcctaattagaattggagccattcaattagatagggccagagtgtacagtgacagaatactcctcccagatatgctcgatgttcacaacagcctgaaggtttatccttccttgttttcaaaactgagaaaactgaggccctgggatttgaagtgacctcctcagggtccctggatcactcagttgcagaaaaagaataagtatgcagacctccccacatctggctttagttcttccctctccagcttcatttcctaccactctcccccaagggctttgctcagcacgagttttgaaccatgcatgcctcacaccctatacttcctcatcttcatgctgttacccatgctatttcttctctttggaattttttttcctttctggcaagttccatcttgtatttgtagacctagttcggatgttctctggctgccaagatctccaagtaaaataactcctcccctgttcttgcactggatttgtgccatttacatttattgttgtaatctcctactgtgtctccccaactacgttggtatgattgcagactgtagccatgtcctattcagtgatgctttcctagatattcgcacaggtgaatatttgtcaaatgaatgaatgaataaataaatggattggatctgtaaatagtctcataactccttgctaaaatggcaaccattatattaagctgcctcatttagcatcaggcacagacacagagacagctgggtgcgtgatgcctgatatcttaccacagtggtgctcagcagaaggatcccagataacaatgccctttattctgtcccatgccatgtgatcccccattaagcagatggaaagggcctgcctcactctcctgcttccaggaaagtgatgtgccctctcttctttgggttgtcaccagcaacatgataaagtagattgcttttcaattatatcttttataattgaaatattaattataaatat

SEQ ID NO: 723065 - DNA, 670 bp, Homo sapiens
tttttktttttttttgtttttttttgagccaagtctcactctgtcgcccaggctggagtgccatggcgcaatcttggctcactgtaacatccacctcctgggttcaagcagttctcctgcctcagcctcccgagttgctgggattacaggacctgccaccacgcccagctaatttttgtatttttatagagacagggtttcaccatgttagccaggctggtctcgaactcctgacctcagatgatccacctgcctcggcctccgaaagtgctgggattacaggcatgagccaccgtgcctggcctgaatcagatcttaatatttcaccttgctttcactccctgcgatcttaacccaaattagccatattttctactcttccttactctttgctaggaaggctattttctttatgtttctcaactctatctttcagtttatattttgctcatttggttcctcctttttttttttagagaaagagagtttcgctgttgttaacagcccaggctgcaatgcagtggtgcgatctcggctcaccacaacctctgcctcccaggttcaagcgatcctccagcctcagcctcccgagtagctgggattacaggcgtgtaccaccacgcccggctaattttgtatttttagtagacacagggtttctccatgttgg

SEQ ID NO: 723066 - DNA, 670 bp, Homo sapiens
tttttgtttttttttgtttttttttgagccaagtctcactctgtcgcccaggctggagtgccatggcgcaatcttggctcactgtaacatccacctcctgggttcaagcagttctcctgcctcagcctcccgagttgctgggattacaggacctgccaccacgcccagctaatttttgtatttttatagagacagggtttcaccatgttagccaggctggtctcgaactcctgacctcagatgatccacctgcctcggcctccsaaagtgctgggattacaggcatgagccaccgtgcctggcctgaatcagatcttaatatttcaccttgctttcactccctgcgatcttaacccaaattagccatattttctactcttccttactctttgctaggaaggctattttctttatgtttctcaactctatctttcagtttatattttgctcatttggttcctcctttttttttttagagaaagagagtttcgctgttgttaacagcccaggctgcaatgcagtggtgcgatctcggctcaccacaacctctgcctcccaggttcaagcgatcctccagcctcagcctcccgagtagctgggattacaggcgtgtaccaccacgcccggctaattttgtatttttagtagacacagggtttctccatgttgg

SEQ ID NO: 723067 - DNA, 670 bp, Homo sapiens
tttttgtttttttttgtttttttttgagccaagtctcactctgtcgcccaggctggagtgccatggcgcaatcttggctcactgtaacatccacctcctgggttcaagcagttctcctgcctcagcctcccgagttgctgggattacaggacctgccaccacgcccagctaatttttgtatttttatagagacagggtttcaccatgttagccaggctggtctcgaactcctgacctcagatgatccacctgcctcggcctccgaaagtgctgggattacaggcatgagccaccgtgcctggcctgaatcagatcttaatatttcaccttgctttcactccctgcgatcttaacccaaattagccatattttctactcttccttactctttgctrggaaggctattttctttatgtttctcaactctatctttcagtttatattttgctcatttggttcctcctttttttttttagagaaagagagtttcgctgttgttaacagcccaggctgcaatgcagtggtgcgatctcggctcaccacaacctctgcctcccaggttcaagcgatcctccagcctcagcctcccgagtagctgggattacaggcgtgtaccaccacgcccggctaattttgtatttttagtagacacagggtttctccatgttgg

SEQ ID NO: 723068 - DNA, 1322 bp, Homo sapiens
tcgagagagagagacagtcctctcctgaacacgggcagtagcagtggagtcagagagatgtggacgcgttctggctgcatgttagcagcaggactggcaatgctttgctgcaggatggaatgcgtggagtgaggaaaagaggggaactgaggacaactgttaggcgtttggtttgaacaactgggtgggtggtgatgtcatctattgagatggggaaggaacccaaatagacagaaactgagaaacagacacagagacacgtgtacacacagagacagccagataaggagacagagagagaaagtcggggtggaaagtgaaagcagcgtgagaacaaaggaaatgagattctgtgtgaaggggagggggagaagcaaggggaagggtcctggcctcagggccagctaggaggccacataaaaggataaacaccaaggccctgtccctyccttaatctttactgatccatctctggactaggccctgtgttaaattctggagaggtaaaagaagctaagagatgacctgccctcaagtataatagcaaacaagttgacgggaggcagagatcggagcaaaaaactattcggtgtgagaagtgcctgggcctccaggaccaacaacagcagcaccagcaatggcaatgatggctgctgtttagaggccattgctctctgccaggcagccagcttcacaggtgcactgaacccatgcaacgactcagtgaggtatgtcttcttgtcctcatttaatggatgaggaaactaagtaattaagtccacctggaaattggggaagcctttccaaacaggtagaatttgaagagtgagtaggaatttaacaacgggagagaatcggtaaaccaaggaaacccagttcacagccaacatgagccagagagcagtatacacactgagtgtaaaagcgagagaccattactcaaccaacgggcttctcgcgtctgtgctgactcagttcatcctcacaaccaccctgagaagcggacattattcgccccattttacaaatgggtaaatagacccagaggagggactcacccccatatcacacagtcggatggtgacagagctgggattcaaacccaagtctttctgtctgcaaagtccatgcttgctgttgcaacccgtgaaggtctagcaaacagaagagctgagcacagtcagcccggaagtcttccatgcagagcctgagcaggatgtgggtgcacggtgagtgacggggaccagcatgagtccccaggagtacctcttgaccctgattgcccaatcagagtgttctttcctcttccagacagaaatcat

SEQ ID NO: 723069 - DNA, 1216 bp, Homo sapiens
ccgcctcagcctcctgagtagctgggagtacaggcatgtgccaccacacccagctgattttgtttgttttttgttttgttttgtggagacagggtctcactctgttgtccaggctgctttcaaactcctgggctcaagtgatcctcccacctcagcctcccaaagtgctgggattacaggcgtgagctaccatactcagccagtgtttattaaaaagtaaagtttttattaagccaaagagcgaaatcaaaataaatagataaataagtaaatacattttcagcaatgttgttactggaaatgttctctgggcctttgcacaggttaccatggggaagaaagtggccatcattggagctggtgtgagtggcttggcctccatcaggagctgtctggaagaggggctggagcccacctgctttgagaagagcaatgacattgggggcctgtggaaattttcagtgagtagcatgttgttgtaatagacaggaaaataggttgggaagtgtataagagcacrctgtgtgcacacaggtttccaaacctgctaccatggcagttatcatatctgttagaattggaatccactaagtacagtgtcaagagcaggttggaaagtaacctccttgcaagtcagaagtaaattagacaatgggctttgaaattctccattacagttctcccttgatagatcattaataagagccacttggacataaaattagtggtaaatattagttaggtttatgtagttataattatttactcatttaaaacacaataacttttcacatctttttttttttttacagatttagggggtacaagtgcagttttattacatggatataatgtatagcagttaagtctgggcttttgtgtagccatgacccaaataatgtacattgcacccattaagtaatttctcatacctcaaccgcctcccactctcctacccttccaagtctccaatgtctattattcccacattctatgtcaatgtgtatacattatgtagctcccaatcgtaagtgagagaatatgtggtatttcactttctgtttctgagttatttcacttaagataatggcctccagtcccatccatgttgctgcagaagacataatttcattctgtattctcgctgggtagtattccatggtgtgtgcatatatacatacatatatatgtatatgcgtctgtgtgtatatataca

SEQ ID NO: 723070 - DNA, 1216 bp, Homo sapiens
ccgcctcagcctcctgagtagctgggagtacaggcatgtgccaccacacccagctgattttgtttgttttttgttttgttttgtggagacagggtctcactctgttgtccaggctgctttcaaactcctgggctcaagtgatcctcccacctcagcctcccaaagtgctgggattacaggcgtgagctaccatactcagccagtgtttattaaaaagtaaagtttttattaagccaaagagcgaaatcaaaataaatagataaataagtaaatacattttcagcaatgttgttactggaaatgttctctgggcctttgcacaggttaccatggggaagaaagtggccatcattggagctggtgtgagtggcttggcctccatcaggagctgtctggaagaggggctggagcccacctgctttgagaagagcaatgacattgggggcctgtggaaattttcagtgagtagcatgttgttgtaatagacaggaaaataggttgggaagtgtataagagcacactgtgtgcacacaggtttccaaacctgctaccatggcagttatcatatctgttagaattggaatccactaagtacagtgtcaagagcaggttggaaagtaacctccttgcaagtcagaagtaaattagacaatgggctttgaaattctccattacagttctcccttgatagatcattaataagagccacttggacataaaattagtggtaaatattagttaggtttatgtagttataattatttactcatttaaaacmcaataacttttcacatctttttttttttttacagatttagggggtacaagtgcagttttattacatggatataatgtatagcagttaagtctgggcttttgtgtagccatgacccaaataatgtacattgcacccattaagtaatttctcatacctcaaccgcctcccactctcctacccttccaagtctccaatgtctattattcccacattctatgtcaatgtgtatacattatgtagctcccaatcgtaagtgagagaatatgtggtatttcactttctgtttctgagttatttcacttaagataatggcctccagtcccatccatgttgctgcagaagacataatttcattctgtattctcgctgggtagtattccatggtgtgtgcatatatacatacatatatatgtatatgcgtctgtgtgtatatataca

SEQ ID NO: 723071 - DNA, 1216 bp, Homo sapiens
ccgcctcagcctcctgagtagctgggagtacaggcatgtgccaccacacccagctgattttgtttgttttttgttttgttttgtggagacagggtctcactctgttgtccaggctgctttcaaactcctgggctcaagtgatcctcccacctcagcctcccaaagtgctgggattacaggcgtgagctaccatactcagccagtgtttattaaaaagtaaagtttttattaagccaaagagcgaaatcaaaataaatagataaataagtaaatacattttcagcaatgttgttactggaaatgttctctgggcctttgcacaggttaccatggggaagaaagtggccatcattggagctggtgtgagtggcttggcctccatcaggagctgtctggaagaggggctggagcccacctgctttgagaagagcaatgacattgggggcctgtggaaattttcagtgagtagcatgttgttgtaatagacaggaaaataggttgggaagtgtataagagcacactgtgtgcacacaggtttccaaacctgctaccatggcagttatcatatctgttagaattggaatccactaagtacagtgtcaagagcaggttggaaagtaacctccttgcaagtcagaagtaaattagacaatgggctttgaaattctccattacagttctcccttgatagatcattaataagagccacttggacataaaattagtggtaaatattagttaggtttatgtagttataattatttactcatttaaaacacaataacttttcacatctttttttttttttacagatttagggggtacaagtgcagttttattacatggatataatgtatagcagttaagtctgggcttttgtgtagccatgacccaaataatgtacattgcacccattaagtaatttctcatacctcaaccgcctcccactctcctacccttccaagtctccaatgtctattattcccacattctatgtcaatgtgtatacattatgtagctcccaatcrtaagtgagagaatatgtggtatttcactttctgtttctgagttatttcacttaagataatggcctccagtcccatccatgttgctgcagaagacataatttcattctgtattctcgctgggtagtattccatggtgtgtgcatatatacatacatatatatgtatatgcgtctgtgtgtatatataca

SEQ ID NO: 723072 - DNA, 570 bp, Homo sapiens
ttttggttttcctggtatgttcatgcagtacttcttggaggaaaatttcactgtgtgagtctccacatgctgttctgtctgtctgcgtggaaactgcaagttagtcctgcctyctatccaccattttccaacaatctgtcgttaaccatttcaaagtatagaattcagtggcatttagtacattcataatgctgtgtaaccacaacctctatccagtttcaaaacactttcatcacacccaaaagaaaactccatactcattagcaatccttccccattcccttctttccccagcccctggcagccactcgatcatgcctattttaaattgaggaaactaaagctgagaaaagttatacaatttttccaacatgactctgataatagctggtgaacgcaatactcgaacccaggacttgtgattcccaagatcagactcctcccatatacctgtcttttatttcccaagtgcttgggcaatcagctgcacttaaaaagcctttacaaattgagtttactaatgtgagtaatatatgattttttaaaaataataattgtccctaaaggtga

SEQ ID NO: 723073 - DNA, 570 bp, Homo sapiens
ttttggttttcctggtatgttcatgcagtacttcttggaggaaaatttcactgtgtgagtctccacatgctgttctgtctgtctgcgtggaaactgcaagttagtcctgcctcctatccaccattttccaacaatctgtcgttaaccatttcaaagtatagaattcagtggcatttagtacattcataatgctgtgtaaccacaacctctatccagtttcaaaacactttcatcacacccaaaagaaaactccatactcattagcaatccttccccattcccttctttccccagcccctggcagccactcgatcatgcctattttaaattgaggaaactaaagctgagaaaagttatacaatttttccaacatgactctgataatagctggtgaacrcaatactcgaacccaggacttgtgattcccaagatcagactcctcccatatacctgtcttttatttcccaagtgcttgggcaatcagctgcacttaaaaagcctttacaaattgagtttactaatgtgagtaatatatgattttttaaaaataataattgtccctaaaggtga

SEQ ID NO: 723074 - DNA, 636 bp, Homo sapiens
tgttctcactcaaaaataatggtaactatgtgaggtgataartatgttaaatagcttatcatttcacaatggggagatatatatatataccatgttttgtgccttaaatatacgcagtttttatttgtcatacaccttacctcatggtttgcattctgcactctgcccaactttccgtgtgcactctcttgggtatgtgctcttgctcccatggtccctgtagctgacaacactttccacccatttcaaaccacacatttttcttcattcttcaaagtcctttctcaaacactgatgaaaatgcaaatcttcctccagtcccctcccacagagtaaatttctcacccttctaggtttaaatagccccttttaagactctgttactatgtgaatcatggtcaaaactgtagcatagttaacaatgtatgtgtcttcctctcatctatctggcctaatgctgtgactgatacctattaaatatttggtacataataattccttttcttttccttttcttttctttctcttaaggggaggcagcacatcttcacagtcctgccacatcttagttgtataattgtgccaggttaacctgctaagccccagtctttcttcagaaaaatggccacagtaata

SEQ ID NO: 723075 - DNA, 636 bp, Homo sapiens
tgttctcactcaaaaataatggtaactatgtgaggtgataagtatgttaaatagcttatcatttcacaatggggagatatatatatataccatgttttgtgccttaaatatacgcagtttttatttgtcatacaccttacctcatggtttgcattctgcactctgcccaactttccgtgtgcactctcttgggtatgtgctcttgctcccatggtccctgtagctgacaacactttccacccatttcaaaccacacatttttcttcattcttcaaagtcctttctcaaacactgatgaaaatgcaaatcttcctccagtcccctcccacagagtaaatttctcacccttctaggtttaaatagccccttttaagactctgttactatgtgaatcatggtcaaaactgtagcatagttaacaatgtatgtgtcttcctcycatctatctggcctaatgctgtgactgatacctattaaatatttggtacataataattccttttcttttccttttcttttctttctcttaaggggaggcagcacatcttcacagtcctgccacatcttagttgtataattgtgccaggttaacctgctaagccccagtctttcttcagaaaaatggccacagtaata

SEQ ID NO: 723076 - DNA, 651 bp, Homo sapiens
cacacagtgctaaattaggggagtaagccaaagcccaaaagacttgaattcatgccaagcttggtgtaatggagtccaatgaagaacatctggtgggatctcagcaagaagagtaaacccaggacctcctcaaagactgcaatcagtcccagctgtgcttcccactctcttctgtctgttctctgtaccttctagtacacagggggaagataaataatcccagataaggtaagagtgatgtcaaggagaaaccacatacaccatttcctagtaaatataagatattaacaaaggtacaagaggaaaaaaatggtttgagagtgatgaaaatatattacagcccccaaataaaaatatattaatatataaatggagaaaggcattgattttaaaacataacacagataatccaatttgaaagaatatacaatccraggaactaaaattcctttgctggtgttttgcatttattgaataatccaataaggacatagatttagtaaaacaaggaaaacaataatgtaataaaagatcagaattatgagaaaaggaatattataaggaaaagaaaaaactgatacaaaacaaacagtataaattagaagcagcaggaaacagaagtcatcatggagataatgatttatttagtta

SEQ ID NO: 723077 - DNA, 1232 bp, Homo sapiens
acagtcatttatttgattaaatgatggcccacaatttagcggttaaagaaggaaagatttactttaatgtcagtagtgaaagtaagacatgaaagatggctctgtagaactatatgcatttagtcaggaaagtataaaattaagataatgattcaggtaacttgtacacaaaggggccaggttgtaggggtgggccgggttcttttacttcaattttctagcaaagctaaattttttaaatactcaaaattcgaagtcacctggtctaggcagatacagatttttaaaatgttaagtatctaaaaactggatccagtaatacaagtaatattaatttggccaatgttttggaaatccagtctacttaatttatataagtttaccaagatagtttctatacagayttcatggcagccaggatcgtgccaaataaatcactgaaacacagcacaatcagcagatctattaatcactctgctcgaactgaaaagagtcttgtagactgattaatttaactaaagtcttcaatagcttaaagaagtctgattccaatcagaaatctactggcattgctgatttctcaaacgtcagccgctttaccacatcccacacttcaaaacctgctttgaagaccaaattactttctacctggaaatacattttaagaaatcatagtttataatcaggggctgctgttttcatggtctttccaaagccaacttctacagccttcattttacctgagagtgtagttcatcgtcttcttctaagagattgggatcatagtccatagaacagggaccgatttttttaggaatgctccctagggttaaaaacaaaaaagtggaaaaaaatatatgacacattttcacttcagaggatgtgtaagcttacactgctgaaatcaaagagcttatatatgccttgacaaatgggggtagaagaaagaattctaaaacgaaggccctaagttgtgctaggtcgctggttttaattcagccagtgtatgaacttcaagtagaactctaccctcagccacaccatgggatgtaatttacaagcagtagctgtgtctggtctgctttcctacctcatctgggtaggattctctatcatcagctgtttctgggatcacattttcaagaaagcctccctgcatcttgtatcaatggtccaatatgaaactctgagattagagaggtttggtccctgcctgcaaccagtgcttctca

SEQ ID NO: 723078 - DNA, 1433 bp, Homo sapiens
tcttctttgtattcattcatgcaacctaaattgtctatgtttattcgtttawaattttttaaaagctcaagaaatggaagaaatgagagagatgtttcatgtactcttaggtgatgtggccaacacaccctaaggtcacccctccccggtgatctatgttttggataatccactcccctgagcataaaggggcttgtgacataattctagataatagaatacagcaaatgtgatggttacatctgatgtgagattctgccttagcaagtgggggcaagagagactccctcttgctgacttgtgtaagaagggctgccgtcctataggaaggactgtgagaggccatgtggcaggaaccatggcagcccctggatgctgagagtggtccccagctgataggtttggctgtgtctccacccaaatctcatcttgaattgtagctcccatatttcccacatgttgtgggagggaactggtggaagataattgattcatgggggcagtttcccccatactgttctcatggtagtgaataagtctcatgagatctgatggttttataaggggaaaccccttttgcttggctctcattctctcttgcctgctgccatgtaaggtgggccttttgccttccaccatgatggtgaggcctccccagccacatggaactgtgagtccattaaacctcttttttttttttaataaagtacccggtctcgggtatgtcttgatcactagtgtgaaaatagactaatacaccagctgactaccccccaaaaacaggaacttcagtcctacaaccaccaacaacctgagagagcctctgacaggaccacagccctgactgagccctgattgtagcctgctgagactcagagtggaggccacagctggtctatgcctgaacttctgacctactgagagcggaggtaactggtgtgtgatgttttgagtcactaggctgtggtcatttgttatgcagccgcaggtaacaaacacagacagcttccctctcctttgaaaacacatcagccaaatgcctttcattcttgcagccacctctaggctaagagaatgtgaacccttgagtattcagtatctgccagatcagaacttacaggatattgagggggacatgcagcctggaagagccggaagctgacctgccttgccgctctgcttgccgctctgccgctctgccttgatggactcctatggacacaagcaatgccacacagcaccaacactggacagggacacactgtgatggtgggggcgggggcaaggcaaatcaatacccctctgtaatctggtctggtcacaaacaaaaacaagaacatggtcaataccacaaatacgcctaggcatcctccaccccggcttatgtgagcagctgctgcttttacatcaattgtagcaccagcctcattcca

SEQ ID NO: 723079 - DNA, 1433 bp, Homo sapiens
tcttctttgtattcattcatgcaacctaaattgtctatgtttattcgtttaaaattttttaaaagctcaagaaatggaagaaatgagagagatgtttcatgtactcttaggtgatgtggccaacacaccctaaggtcacccctccccggtgatctatgttttggataatccactcccctgagcataaaggggcttgtgacataattctagataatagaatacagcaaatgtgatggttacatctgatgtgagattctgccttagcaagtgggggcaagagagactccctcttgctgacttgtgtaagaagggctgccrtcctataggaaggactgtgagaggccatgtggcaggaaccatggcagcccctggatgctgagagtggtccccagctgataggtttggctgtgtctccacccaaatctcatcttgaattgtagctcccatatttcccacatgttgtgggagggaactggtggaagataattgattcatgggggcagtttcccccatactgttctcatggtagtgaataagtctcatgagatctgatggttttataaggggaaaccccttttgcttggctctcattctctcttgcctgctgccatgtaaggtgggccttttgccttccaccatgatggtgaggcctccccagccacatggaactgtgagtccattaaacctcttttttttttttaataaagtacccggtctcgggtatgtcttgatcactagtgtgaaaatagactaatacaccagctgactaccccccaaaaacaggaacttcagtcctacaaccaccaacaacctgagagagcctctgacaggaccacagccctgactgagccctgattgtagcctgctgagactcagagtggaggccacagctggtctatgcctgaacttctgacctactgagagcggaggtaactggtgtgtgatgttttgagtcactaggctgtggtcatttgttatgcagccgcaggtaacaaacacagacagcttccctctcctttgaaaacacatcagccaaatgcctttcattcttgcagccacctctaggctaagagaatgtgaacccttgagtattcagtatctgccagatcagaacttacaggatattgagggggacatgcagcctggaagagccggaagctgacctgccttgccgctctgcttgccgctctgccgctctgccttgatggactcctatggacacaagcaatgccacacagcaccaacactggacagggacacactgtgatggtgggggcgggggcaaggcaaatcaatacccctctgtaatctggtctggtcacaaacaaaaacaagaacatggtcaataccacaaatacgcctaggcatcctccaccccggcttatgtgagcagctgctgcttttacatcaattgtagcaccagcctcattcca

SEQ ID NO: 723080 - DNA, 671 bp, Homo sapiens
tattctgcattgtggctgcaacatctgtgggaatctgaatatgacagcctgaaatctactgcttttttaattaatcccagaaacgaattctaaggctttaatgcagagctaggttttgtgttatttagaagatatataaagaaaaccttctttgactcctttctaggcactgattatcaaaccagacaagaatgagaaagcatgaatttttacaatccattatccttcagcttcccttttctttccatctccactcaaggtatccacagttacatttaaaaatgaggagctatccagatgccttgctcaaaggtatttgcaaagtctcagaagaataaaacaacaggttttgaaggtgaattaacaatgattttgttttctgagagtgtgcataggattgaattccaggagtaaagctgcgagagaggccagctttttatgaagggctttgaatgtcaggataaaatgtttaagcactgtaagcaaagtttgctggtaaatgaatttaggagacactgtaactgaatttgcatttcagtaccattccaatagggcacagagttgagaattgagtgcaaagatcatgaggaaggtcagggtattaccataatggtctaggcagakaaagtatacatctttaatagggcaagacaatggagttagacaccttc

SEQ ID NO: 723081 - DNA, 924 bp, Homo sapiens
tttttwaaaaaaaatcacgcttaagtgaaagcactaaaagcacaattgcacggacactaggattgcagctgcagaaagcctccatgcaagcaaaccagagctagagggaaacgtggacaaacgaagcctgctgggccgggcgaggtggctcacacctgttatcccagctatctgggaggctgaggcaggagaatcacttgaaccctggaggcagaggttgcagtgagcggatgctgcactgcagcctgggagacagcgagactccatctccaaaaaaaaagaaaaagaaaaaaaatgaagcttggtgggctgggtggttggattctgggcccctgtttttctgtgcttttgatttcctttaatataacttaaatgactcaaatgaggtttatggaattttccagcgtatcatattgaaaatccaggcttggctctgtggttccacataaggtctgcttgaagcttttgtcccaggttcttgaatggacgaatgcccacccactctacctgttgtgaatcaccccaggtgattccctgctctttttcttttcttttctttctttcttttttttttttttttgagatggagtctcactctatcgcccaggctggagtgtagtggtgcgatctcaactcactgcaacctccgcctcccgggttcaagcgattcttgtgcctcagcctcctgagtagctgggattacaggcgtctgccaccatgcccagctaatttttgtatttttagtagagacggggttttgccatgctgaccaggctggtctcgaactcctgaactcaagtgatctactcgctttggcctcccaaagtgctggtactacaggcatgagccaccacaccgggccaattccctgctcttttgaagaagcccccacctcatcttgcccctgtcattaagagtcttaca

SEQ ID NO: 723082 - DNA, 924 bp, Homo sapiens
tttttaaaaaaaaatcacgcttaagtgaaagcactaaaagcacaattgcacggacactaggattgcagctgcagaaagcctccatgcaagcaaaccagagctagagggaaacgtggacaaacgaagcctgctgggccgggcgaggtggctcacacctgttatcccagctatctgggaggctgaggcaggagaatcacttgaaccctggaggcagaggttgcagtgagcggatgctgcactgcagcctgggagacagcgagactccatctccaaaaaaaaagaaaaagaaaaaaaatgaagcttggtgggctgggtggttggattctgggcccctgtttttctgtgcttttgatttcctttaatataacttaaatgactcaaatgaggtttatggaattttccagcgtatcatattgaaaatccaggcttggctctgtggttccacataaggtctgcttgaagcttttgtcccaggttcttgaatggacgaatgcccacccactctacctgttgtgaatcaccccaggtgattccctgctctttttcttttcttttctttctttcwtttttttttttttttgagatggagtctcactctatcgcccaggctggagtgtagtggtgcgatctcaactcactgcaacctccgcctcccgggttcaagcgattcttgtgcctcagcctcctgagtagctgggattacaggcgtctgccaccatgcccagctaatttttgtatttttagtagagacggggttttgccatgctgaccaggctggtctcgaactcctgaactcaagtgatctactcgctttggcctcccaaagtgctggtactacaggcatgagccaccacaccgggccaattccctgctcttttgaagaagcccccacctcatcttgcccctgtcattaagagtcttaca

SEQ ID NO: 723083 - DNA, 603 bp, Homo sapiens
tggtactagtgaaggttgttgtcatagttcatgcagacctgcacagtgtatcgacctcatgttcacatgaagatctagatacctgatcaacgaagtgtccactcagcccctgtcaggtgcattctgggaggtgaagtggyatgtgactgccttgaaggaaggtgaaagcctagagacagattgtaatggtttagaactttctctttagaaaatagtgaataaggaaacaaggctttgctggggcagggggtgggagctctggcaaataagaggttcttctagaacccacttcctttgttctactaagtaaagtcttgctaacgctgaataattatagtcaagaaagcctgaatgaggccatccttttacttgttcaataaaggttaatttaaggacccaatgggacttgagatagagcttgaatttagggatttttgcaaattacctgttaaagccatgaaaacagaagtgtatttgttccttaatatgtgcatgacctcttactatttaagagtgattactgattaaccagggagtttcaaaggagatgttttcatattcagatttaaagaagttgctccagctcagagaactggcttctgt

SEQ ID NO: 723084 - DNA, 680 bp, Homo sapiens
cttcaactttaaaaaaaattcattttttaaaaaatagcataatagcatataaatgcatggtttccattattttctttttgagatgggatctcattatattgcccaggcccaggctggtctagaactgctgggctcccacctcagcctcatgggtagcttggcctacaggtgagtgttaagacgtgcagctaattaaaaaaatttttttttcttgtagagacaggtcttttttgctgcctagtctagtcttgaactcctgacatgaagcaatagtcccacctcagcttcccaaagtattggcattataggtgtgagctatcatacctggcttcctgcagattttttaattgtatttttggttattccaaaaagatcatttggctgggcacggtggctcacacctgtaatcccagcactttgggaggctgaggcgggyggatcacttgaggtcagaagtttgagaccagcctggccaacatggtgaaaccccgtctgtactacaaatacaaaaaaattagccacacgtggtggcgggcgcctgtaatcccagctactcgggaggctgaggcagagaattgcttgaatctgggagacggaggttgcagtgagccaggattgtgccattgcactccagcttgggcaacagagcaagactctgtctcaaaaaaaaaaaaaaaaaa

SEQ ID NO: 723085 - DNA, 1200 bp, Homo sapiens
gatccttctcccatttgagtgtacatgaggaaaaacaaagataggaagctgagttgggtttcatggttaaccctgaacttccttgcatgatctaagcaaagcgcaaattcatgcagttttgtttgtacttaaattacatgacgcacctctccaaagttctctaatcctcacccatgctgagagccacgtgcagggtcatccagctagcaagaataaataaccattcagggcctttggctttctgtgtatgtragtcacggaggggttcttgctggagtgtaaagaaagagaaacacatggcagctctctaaagcctatttctggaaacctgacaggagggaacagatacccattgttcaaagcctgtacagtgtttggagtctggagtgggaaatgcatgcttagtgaagaccaaacctttgatggatcagaaattgaaaagacttgtaattaaactgaaattaaaccagtggtgacagagtgttttttaggtaaaaagacatagagacatgagagcaagaaaaacaggggtcaagatcaaggagttgccaaattcaattggatcagaaattctcataagaaaacaaaaacaaaacactggaggagacctgatttcgcctgccacagacttgatcatgtccatgaggaaaaaaaaacatcggtgcaactcttttgctataagtgatctacagctctattcccgtatggcaatggccaccttggcaatacaacatagtacatagaattatcaaatcttagcctgccaaagaactccataatactgacatctttctttgaaagctgttcatgccttaaggctttttggattctgaacatctagaaagcacttgacaaaaaacctagacctagtactacctttacttgcacataagagaggcccctgccattaactgcatatcacaaacacatgacaaatacttttagtaaaaaacacatgagtgcccttactgtggatccagtcctcagcactggcacagcatgacctataaccctaaccactgctctcgtgactaaaatggctcaggctccagggaaatgcttctgcctatctcatgccctgtatcctagaaaaagtgattgtgtctgtgctgttgctgatgtagaagagagaaactgttttggagtagaggcaagatttgaacagcagaagcccttaggtaagagaacaagaaaatatta

SEQ ID NO: 723086 - DNA, 2907 bp, Homo sapiens
gccctgcccagtcacaggcacaccccacccagtcttgccccttccctgcctgccaaaggtcaccaccctctggtgaacacatctctgtgcctccctctgctctccccatgcaggctcaccatacgtcaggcacgtcagcaagagcagcggcagcaggaaccagaggaacgtcttcagggacgagaagcgcctggaccacgcgggagggcaggacgggggaggcggaggtgtgaggggagctccaggcctccacgttccacccagggagtaccctgagatgttttcctgggtgctgaactagagctaaggaggatagcttgagcttctcactgtgccagggccagcctggacacgtcagagcctttcctgctgggcaggtcttagagtgatgggacaattttgactgaattttactgatgttattaaaaatagtgtggtctttgaaaaactcaaaaatttttatatggacaggtcctctaagtatgcaaatatagaaaaaaaaagtaactccttaaataacaacaaggaacctgtttttggtgacacaaacccatccttgccccttgtttcagtatggccagctgtcccctctgcccggacctggattacggccagagggatcctgacttctgggttccgtgttcttctgcctaaggggcacattctcaaatcctggttctgctggtttagggacttggggaatgaacccatagcatcctcaggcagagcctctttgtggctctgaccatgagtggggaactcggggggttagattgtcccaggcccaagaaggaagatggactttctgggaaaccccacttcttgcctggagtcagtgggcctaccctgcaggaggaaagccatcgtgtgtctgagagccaggcacggctagactagtgtggcgtttagtagaatgtgtccaagaagaaataatctgtgctctggaatcctgcctcgaagggctatcaattcggggagaagaacctgactctgagtccatcctctgtcaggcaggggtgggctttggggaagctactccgtgatcgctaataaaggctccagggaaactggggaaaaccctcagagaatcgaccattacaggttgacacactttacccgtcccttcaccccagggccttgcgatttattggcaagggtggagtctcgctcacctggttaaaacgaagacgtcaaggagggaggcagctgtggtcaggcggtaccaggtggtgccagcccaccagtagagaagtctgaagagccggcctggaagaatgaccatcaagccgaaggctccatatggtgtttgggggcaccgctcctttgtcccgtctgccgtcctccctgcccctaccccacccccacctgccagtatgcctctgtcctgccctaccgggacccaggtccttggatcccacctgcccacaccctctgtcctgctctgcagctactccttcccttccacgcaagggggtccccacagctctgggctcccagtgattattctagaatgacctttccccaatggtcctacagtctctctgcatgggcaggatgcccaactgcagagagatgggtaagaaagcactatcaccaagaatggaagtaactgggcacgggttgcagcccacctggcgaagtggccaccatccagagtaaggagcccgcccgtgagacggcgcttcggagccgcgagctggaactctgctggtccacatccgagtagcctgcggggaacgaggacactggctcagtctctgtcactttcgagcctcttccttcactgtcttctgtgagccaagaccacaagtcacccaccctccttcacatccccacagcyccacacaggcccggtgtgcagtaaggaatgaaatgggagctctttgacattctgtttcttctgacagcttcctgtttgcatccctctcctcaccagccacccctcaagctgctgttcagaactaggtgctggggtctgacatgcacaccactcagaatgactgagcacccaccatgtgtgagccccacaggaaagtgctggaatgggcctgaatgcaaggatgttggccttaggttgccatagactcgtggggtggggaggacagacaagtgaagggcagtcacagcccagggcaccaggggccaccgcaggccaggctggggcgcacccagggccgggcatgggaggggcgctgtgcctgccacatgctgccctctctccagctccccggggctccctgcccagccttcctgaggcctcccagcagcctcggatctgctcaggagggaggaagcatcgcctacccacgtagtcgtcctcagaggagtagcccgaggaagagcccaggaagtcctcggtggccttgcgccccacaagcccgctggccctgctgctctctgagccacccgtgcctctcctcctccgcacccgcaggtcctcacctgtgcagggaagaaccaggggctcttctgggcctccaagagcttctgaaaagtggggtctgggcagagaggtgctctgaggagggaatcccggggactgcaggggacactgtgaggagtatctcgcgggaggccgaggaagcaaagccccgggacggagggctccacactcaccccagttggcgtcaccatgcagttcctccagggagctcctgggtgggaaccaggactcgtggaccagcgactcactgtagtaggaggtgtgtgcatcagaggacgggcccagctgtggcgctggggacaggcgcttcatgttgctggatttcctcttcaaggtcctgtgggacaaccatgagggcagaggtagggagcagggaggtgagcccagccaggagcatgaaggaaagccacagcctgcggccctgcctagtgcagggtgtgggttcccttgttgctaggcaactc

SEQ ID NO: 723087 - DNA, 640 bp, Homo sapiens
tgaaaaccagagattccgcccttgttttcttagaattaaagtaagataatatattttatggcctgttgcaaacggaaaacctttacacaatgattagtgattagtatcagtatctgtggactgggaaggctctacttactcgatcctcttcccagggtcgttgtgaggatcaagtgcacagcttcctataaacactaaaacactataacatcttgtgagccaggtactattattattcctcagtgcaaagaaagaagccgaagtccaagggggrtaaatgctggggtcccactgtgggtgagccgcagagtgatcattggaagccaggtgctcccccttcacttcctgtgtgcggagcacgctcgccctgggagtttcactagaaagaaggttgccatgggccagtgggacagcttgtatctcaagtgcacgcggatgccccagaatcccaggatctcagctgagctgtttgtggattattagatctgacttaaaaggtagctaatccagacccttcctcatctgtaatacatggatgacagctcccagctgtagtgttatgagaattagtgcggtcatgagtaaggtgcccagttaaagcccgagaagtaaagcagctgggccaaggtctagcaggcaa

SEQ ID NO: 723088 - DNA, 669 bp, Homo sapiens
ctgtaggagccctagtttttatttttctgtcctatgaatgctgtgaaatgatttattcctttcaggccaggaatctcacaggcatatatacctctaggttaggattatcctaactcactaaagatgtcaggatattggggctgagaggagtttgggctgttaaaaataacagtgtttgtctctcaaactggcgaccaagaaatagctaagacaattttggtgcwttacctatctctgcaaagaatggaaaatttggcataccattaattacaacctccagtcatatcaaacaaaactaccctaaaagaaaaactaatgggcactcttgaaaaagtttaaatatcagaagattaaaaagactttagaatttgggaaaaaaaggaaaacagaaaacactaattactaatatctaaaatgaaaagcagacatcactataaatcctatggagattaaaatgatactaagcaattttttttcaactttcattttaggttcaaggggtacatgtgcaagttagttacaagagtatattgcatgaccctgaggtttggggtattaatgatcccatcacccagatagtgagcatagtacccagtaggtagtttttaaaaaaattctcaggcatcccaatccctctgtcatctagtagtccccagtgtctattgttcc

SEQ ID NO: 723089 - DNA, 1383 bp, Homo sapiens
tacttctttattgtatgttggttataagaggaaatattttaggatcaaatggcccatgttttaatcataaatgcctcacttactagttacatagcattaggcaatttarttcatcattctgggcctcaaattcttctagtttagacatggggacactaatagtacccaattcgttgcattgttacgaaaattagtaaatacacataaaacacttagaatagtgcactcaataagtgttagctattattcattattatttattgtttgggcaaaggaaatcataggtacaaagtcttcagagtttgaaagaacattgcatattgggcaaaattaagatgctaagtgaggaagaaatatgaaaataatgggaggtgggaagaggtagagatcacatctcattgttttgcccaattgagagcccaaaacataatgggcattcattacatcttagtagactaggtgaataattgaatgaatgaataaatatttccgtcttagtatgttcctgctactataacaaaataacttacactgggtaatttgtgaatgatggagattttatttctcactgttctggaaggatgagatcaagatcatggcaccaaaacattcaatgttgggtgagtgcctgtctcactgatggtgtctatttgcagcatcttcgcatggtggaaaaggcaaaagggcaaaggggcccagctagttccttctgattcttttacaagggtattaattccactcatgacagtggggccctcatgacctattaatcccccaaaagtcccaccttttaatactggaggaacacaaacattcaaaccatagcaactcccaaggctctcattggctagggggtccagctaccaagtggcctgaaaaagaactgaagatattggttcatggttcatgctttgaggatctcctgtgtgtgccaagcactgtattaggggcttatatcattgaaacaaacaaagatctcttccttcctggacattctagcaggggaaggtaggccataaacaatatgcacagaaattaagtaaattatgtagtatacttgcaaataataagtgatccacattctggttgctatgagaaatataatggtggcaagggtacaagcagggatcctgttaggaggctatggtgcgatttgggtgaggggtaatggtggtcacagtaatgttgggctaggggaatcaagagggccaagagatttggttggcagaggcaggtagctttattaaatagggtgtttggtgtaggtttcattgagaagagctatttgagcaaagacatgaagtaggtaagtgggttactaaagtgggtaaacatgggaagggcatcctaggcagaggaaatagctaaagcaaaagtgctgag

SEQ ID NO: 723090 - DNA, 1383 bp, Homo sapiens
tacttctttattgtatgttggttataagaggaaatattttaggatcaaatggcccatgttttaatcataaatgcctcacttactagttacatagcattaggcaatttagttcatcattctgggcctcaaattcttctagtttagacatggggacactaatagtacccaattcgttgcattgttacgaaaattagtaaatacacataaaacacttagaatagtgcactcaataagtgttagctattattcattattatttattgtttgggcaaaggaaatcataggtayaaagtcttcagagtttgaaagaacattgcatattgggcaaaattaagatgctaagtgaggaagaaatatgaaaataatgggaggtgggaagaggtagagatcacatctcattgttttgcccaattgagagcccaaaacataatgggcattcattacatcttagtagactaggtgaataattgaatgaatgaataaatatttccgtcttagtatgttcctgctactataacaaaataacttacactgggtaatttgtgaatgatggagattttatttctcactgttctggaaggatgagatcaagatcatggcaccaaaacattcaatgttgggtgagtgcctgtctcactgatggtgtctatttgcagcatcttcgcatggtggaaaaggcaaaagggcaaaggggcccagctagttccttctgattcttttacaagggtattaattccactcatgacagtggggccctcatgacctattaatcccccaaaagtcccaccttttaatactggaggaacacaaacattcaaaccatagcaactcccaaggctctcattggctagggggtccagctaccaagtggcctgaaaaagaactgaagatattggttcatggttcatgctttgaggatctcctgtgtgtgccaagcactgtattaggggcttatatcattgaaacaaacaaagatctcttccttcctggacattctagcaggggaaggtaggccataaacaatatgcacagaaattaagtaaattatgtagtatacttgcaaataataagtgatccacattctggttgctatgagaaatataatggtggcaagggtacaagcagggatcctgttaggaggctatggtgcgatttgggtgaggggtaatggtggtcacagtaatgttgggctaggggaatcaagagggccaagagatttggttggcagaggcaggtagctttattaaatagggtgtttggtgtaggtttcattgagaagagctatttgagcaaagacatgaagtaggtaagtgggttactaaagtgggtaaacatgggaagggcatcctaggcagaggaaatagctaaagcaaaagtgctgag

SEQ ID NO: 723091 - DNA, 1383 bp, Homo sapiens
tacttctttattgtatgttggttataagaggaaatattttaggatcaaatggcccatgttttaatcataaatgcctcacttactagttacatagcattaggcaatttagttcatcattctgggcctcaaattcttctagtttagacatggggacactaatagtacccaattcgttgcattgttacgaaaattagtaaatacacataaaacacttagaatagtgcactcaataagtgttagctattattcattattatttattgtttgggcaaaggaaatcataggtacaaagtcttcagagtttgaaagaacattgcatattgggcaaaattaagatgctaagtgaggaagaaatatgaaaataatgggaggtgggaagaggtagagatsacatctcattgttttgcccaattgagagcccaaaacataatgggcattcattacatcttagtagactaggtgaataattgaatgaatgaataaatatttccgtcttagtatgttcctgctactataacaaaataacttacactgggtaatttgtgaatgatggagattttatttctcactgttctggaaggatgagatcaagatcatggcaccaaaacattcaatgttgggtgagtgcctgtctcactgatggtgtctatttgcagcatcttcgcatggtggaaaaggcaaaagggcaaaggggcccagctagttccttctgattcttttacaagggtattaattccactcatgacagtggggccctcatgacctattaatcccccaaaagtcccaccttttaatactggaggaacacaaacattcaaaccatagcaactcccaaggctctcattggctagggggtccagctaccaagtggcctgaaaaagaactgaagatattggttcatggttcatgctttgaggatctcctgtgtgtgccaagcactgtattaggggcttatatcattgaaacaaacaaagatctcttccttcctggacattctagcaggggaaggtaggccataaacaatatgcacagaaattaagtaaattatgtagtatacttgcaaataataagtgatccacattctggttgctatgagaaatataatggtggcaagggtacaagcagggatcctgttaggaggctatggtgcgatttgggtgaggggtaatggtggtcacagtaatgttgggctaggggaatcaagagggccaagagatttggttggcagaggcaggtagctttattaaatagggtgtttggtgtaggtttcattgagaagagctatttgagcaaagacatgaagtaggtaagtgggttactaaagtgggtaaacatgggaagggcatcctaggcagaggaaatagctaaagcaaaagtgctgag

SEQ ID NO: 723092 - DNA, 1538 bp, Homo sapiens
agattttaaacatgtttctcaggtatccatttatgaaactaaaccggtaagcagtgtatgccaacagtaagccttaaaagggcgaggcaattgtcatcatccaatatttgtcagtaagccaaactgtcatttctctatgtaccaggatgttaccttttaaggaggagtactccacaaatatgaaatatgcaactgggggaaaattagctgatcctaaccattttgtagtatctgaagcaagaatcaaccttattaatttacctagatttatcctgacatttatgtgttttcatctttttgcatttttctgtgctggactctccttaagatttttggaaacctgtgttctgaattcctccctttccctgggctagagtggctggaggctttggctcttgggaatggtctcgcgtccttcaccagaacttacgggaatcatgtttggctgaagagtcggagacctctccagagtcatcttttccagttaggatagaaacgagcccccctcctcacctcgcaagcccgcgccagtccagttttagccgttcttttggaagagcaagtcagttgaacgccatcgaagaggctcctgatttagatattaattgtgcttaaatgcagatgactccccactctcatgcgttcccttatttcccgttgcttctcccattggcatttacagacttgaggttgcttggactctcaattcaatactccttttctgcgggttcgtgagaattaggtgtgaacgtgatgtccgcggatatcagtggctagtgggcaagctccagcgcccaggaactttgagtcgcttgtctaggagtcctgtattgaattgcaacactaagtgcaatattctggttcttgttgtgttctgaaagagctctttcactcatgaggagagacctgcacgagactgtgaagaccaactgcttctcagcgctccacgcatccattatgagttcaccgcaggattttacctgmaaaaattttgcgtagattaagtcacgcttattgcctcctacttttgtcagtgaacattatgtcacaagcattttcccagaactattacagtcttccagcatgtcgtttctagtggcttggtaatgacctattaggcagatggagcaataataataataaacaactctcattttaatatctatttttcactatcacaattagaaataaaaataaagattcctgcatagtatatgtcttcctttggttaagcttatttcctggctgggtgcagtggctcacacctgtaatcccagaactttgggaggcggagatggaagaatggcttgagaccaggggtttgaacaaggagtttaagaccaggctggtcaacacagtgaggcgccgcatttctatttataaaatataaaacaaacaaacaaataaaaagattatttctctaggagagcggttctgaaacttcagtgggcatcagtaccagcaggatgacttgttttttgtttgtttgtttgttttttgagatggagtctcactctgtctcccaggctagagtgcag

SEQ ID NO: 723093 - DNA, 502 bp, Homo sapiens
taatgcttaaggaaacccggagataatattcccatgttttgccacttagtaaagcattttatatgcctgtgtcagcgagcacatagctgcaagtgtagcccatggccagtctgtcactgtgtccttggcagaaaaaaagaatccaacaaatcggtaggtttttatatttaagacatggcacttgcattttattatgctggcgtgcatccccagcatttggataaggggccaaggtcaagtctctcagactgttggctgacaaacattaaacctggaaatcctaacagagtgtrtgaaaaacaattacagtcaagggaacatgatagagaaagcttcggtcatcttagagaatgcatatattgccatgaagagaacattggtttaaaaaaaaatgttcaagagaatgaaaagacaagtcacagactgggagaaaatacttgcaaagtacatatctgataaagaactgatatccaaaatatataagaactcttaaaactcaaca

SEQ ID NO: 723094 - DNA, 621 bp, Homo sapiens
aaaaacgtgtttattttcaagtagaaaactcatatctgtccaccaaggaaagctgtaacaaatgtaaaatacataaaaaagataactgctaaatttctaaagcattccaraaaaagacaaatagaagggtgtcagattaggaaagtatgtcttgtaaggtgtaacggacagactgatgagcttagagatgtggatctcaaagtggttctcagagcaacagcatcagggtcacctgggaacgtgttagaaatgcagattctcaggtaccatcccacatttaatgaatcagaagctcagagtagagaccagcaatttgttttaacaagtccttcagggattctgatacagctgatgtttgagaaacactagctttaggtaaacgtaagagggtcacgttagtatttttaaatcattggaagttggtttgttttgttttttcttaagtgggactcatttatacttcaatacacagaatggatatttagaggaagtcgtttttgacctaacacggatgagcatttccaattgaatagcgctttctgataatggggctgcccactacaagtgaataactgggtttctctaggctggagctgcagacaggtcactatgtgtatggag

SEQ ID NO: 723095 - DNA, 627 bp, Homo sapiens
tagtaattacaggtgtgtagagaccctcctgcttcatacgctcagtcatcattatttacttttaccaggcaccaggggcgtgatgagagcttagctgaaaggagagaagactcagcaagcacatcaccttgaagctgacctgtcagccagatttcgcagcacctgcctgttccagcctgaggggctgcgattcattccttgggaaagagagctgcaaattccctctctaggccacagtccaaatccttgctcttctctctcaggttctggaagacagaatggaggcatctacagagcaaggacatgttttctacctgaattagcttttctgacaccttgaaaccatctctaagaaattgattttttaacatacacatatacaggtaaacatttaaatctgtgccataatgtatttgcacttygagtccccctgaagtcctaagtcacatgcttctcttcctaggggttctgtctgaagcagagacccctggattggagcagtgggaagaatcctgatgaatcaggtgttcctgcctgtttacattaactgggcaccctgcctgcccaccccacatgctgaatactgctggggagaagagaagaaacatttattaaaggcaaggaaaa

SEQ ID NO: 723096 - DNA, 1500 bp, Homo sapiens
taagattttttgtaacaatttatgtgtctattgctttatgtgaaagacgcttttcaaaattaaaatcagtaaacagtgttctgtgattaaccaggaacaaaagtagatggacaactgctcaatgaacatgaaacgatgaagatcaatttttcttctaggtcatggacaaattaaagtarttaagtgttaaaaacagagaccatgatgtcattcctcatgactacaatagaccaatatttaactctaagcgtatttcctttaaaaaaaaaaaaagttaactacaaaaatgtagttaaaggtgctaatctactacttttttggtactgtaatatttactgtattatttatttttctattttatgggcataaccatccacagaagggtcagtaagagagaaatatcactgctttcctcttctatccattatttttgttgtttcgtttcatggctactactaaaaataatgttgtcacagagaagcaaggtgataaaaggattctctctgggggtcaatccatgaagaaagctggagaaatatctgctgaacagagttcatggcttcatgttctatctgagcaagtctcatcctgcagtcagctctcttgaggctgagccaggtctttgcacacctttcctctggctgatgcttttaaattccctctgtcttcgtctctgctattgagttcggtctcctccgtgagtcccccacggggcctggtgaggacaggctctgtgggagcagctttctgttttgagcctgtgatgtctggccaaggagcgcctgtcagctgcttgggctccatctcagcccagagacgtcgtgctgtgtggtcttaaagcaggtcacttcacctctcggtatctctctctgtaaaacccagataataatacttcccaaataaagaaagggttttctttaagccctttgagctcctcagatggagcgcaccacagaaatgccaaatgcggcattgtgatccgcgctgcctccatgtgattaggtaatgtgagattgtggttcattatgctttgtctggaatgaatgcgagccctgccacaaagcactgggaactctcagttacacagaaaccccatggtaagcttggattggcttacacttaaataaagcacaccagaaaagagcagtagttttgacgaacccagctctgaattaacactcatttgatttcttctgctgagtgcgggcgataagtaagagatgacccagttacaggtgcggggggcacaaccaacactgaggtgactgagtcgggggaagggcagcccctctgcaaaatgcttcaggctcccaaggaggcaggcccagagtgggcaggtctggacttactgctgtacagacaagggggaaattcaatagctaccatttattgagtttctgctaggtgccaggaactctgcaatgtatgccattcttctaaaccctccagacaacggtattaaaccatattaatattctgaaaaccaaaacaaacacccac

SEQ ID NO: 723097 - DNA, 1046 bp, Homo sapiens
tttcttacgaagccttggatacatcccacttagcttgacaaacttttaccggaattctctgatcccatttcacagctgttgcaaaggtagggtcttggttgtgtcttccttcaagctgcttatgaaccaggggtggagactaggaagtaaggaaccctggaatcagagaagtcaggagcaagcatcttgttggcttgaggttctccaggcaccataaaccaagtagtgcgcatactaagaaaacaagctggacaacaagaggagagcaggagggtccttaggattggctgcttgtaccatggcccccagtggctcagtagagacaaggggaatcccaggtaagtagactccttcgctccccagagaggaatctattgtgtcaattgctgggaaacacgctcagttgaactgaccctctatagccgtatgtgcatgtggaatccattgttagggaaaccatggtgagaagggaagtgagatgctctggatgggtgctgagctgagtgctgatggaacagaccttccagaaaaggttgcatattatccaaggaaatatcattgcctggagagtcctaggctgacttgctctcttgggagctgatgtttagggaatgggagaagcagctggtttaaagcatcaaacaatgaaatgaacttcagaatctgccaaatcctaaacatttcttgctaagcaccattttttctgtattgtgaacccatctgtgcttcaaaagcaattttgtttaaatggcttcttccccttactcctaatccttgggaagctgtaatacacaggtggtaaaggggactccccaagagatgctcactaggactgctgtgagccagatactgggctracactgcatagcaccgagggtgtgggagatcagaagtcaggagcctgcattctcaggggagggactggatccctgcaaggaaacaaagtgtggtgtgtgtggcttcatgatccactggcctaggtctaatagcggatctttttgcaaatttatttatttttcttttcttttcttttcttttcttttttc

SEQ ID NO: 723098 - DNA, 1046 bp, Homo sapiens
tttcttacgaagccttggatacatcccacttagcttgacaaacttttaccggaattctctgatcccatttcacagctgttgcaaaggtagggtcttggttgtgtcttccttcaagctgcttatgaaccaggggtggagactaggaagtaaggaaccctggaatcagagaagtcaggagcaagcatcttgttggcttgaggttctccaggcaccataaaccaagtagtgcgcatactaagaaaacaagctggacaacaagaggagagcaggagggtccttaggattggctgcttgtaccatggcccccagtggctcagtagagacaaggggaatcccaggtaagtagactccttcgctccccagagaggaatctattgtgtcaattgctgggaaacacgctcagttgaactgaccctctatagccgtatgtgcatgtggaatccattgttagggaaaccatggtgagaagggaagtgagatgctctggatgggtgctgagctgagtgctgatggaacagaccttccagaaaaggttgcatattatccaaggaaatatcattgcctggagagtcctaggctgacttgctctcttgggagctgatgtttagggaatgggagaagcagctggtttaaagcatcaaacaatgaaatgaacttcagaatctgccaaatcctaaacatttcttgctaagcaccattttttctgtattgtgaacccatctgtgcttcaaaagcaattttgtttaaatggcttcttccccttactcctaatccttgggaagctgtaatacacaggtggtaaaggggactccccaagagatgctcactaggactgctgtgagccagatactgggctaacactgcatagcaccgagggtgtgggagaycagaagtcaggagcctgcattctcaggggagggactggatccctgcaaggaaacaaagtgtggtgtgtgtggcttcatgatccactggcctaggtctaatagcggatctttttgcaaatttatttatttttcttttcttttcttttcttttcttttttc

SEQ ID NO: 723099 - DNA, 1891 bp, Homo sapiens
cgggggcggggaggcggcatttgtctgttacagagtgtctgtccccactgaacatagcagggctatggcaagctcctgaccctgatgcatgaccgacaccccaacaccccaccgcccagacaaagagagggctcaatgcccctcaaaggcaaccacagagcagaaatgtgataaactcgtccaaatgattgctttttggcccttacacaacatgcccccggtatgaatctaaaagcaattaagtcattccagctgggagtccaatgacatgctgtttaaaaagtcttctgagaaacatccctcttcagaaaacgatatgcacaaaagaaacaacagccactcttcttccttccgtttttaagttataaaaagcatttaaaagatacacatgcagctgacctagcaacaagccttcaccaaggtctcctcctcaaagcactcaaaaagccaaggtaaactcattccaaaggcatttattaattcctctagtctacctcacttaccccctggaaaaaataaccaattatgagagcttaagaaaaatctaggcatctcaaatatcaacttgtaatataaatacccatgaagcagtgttctgattgtgttatttggtttccaaatagtcattacctaagggctccatttttagaatcatttgagattctgtatatggaagagtattttggaaactctgatgtgctattgaaatagaagttgctggaagcattgttattgtaacccttgagtgctaacccaaggttaaaagctcatgtgatgctgtccaaatcatttcagattatatattttaataaatccatttccattaggatgttcagtggattacaaatgagcacattagagtcctgtgtaatgtttgcaaaacaaaacatctgcctggggacagcaggctcttgcaggaaactactggcatcaggactcctgctcggaggaagaagggtacagtctcaggcccatgtggaagctgatggcaggacactgtggatggygtgtgtgtcctctcctgccacctctgccatgaggccagaggtcccggctccatgaccagagccactctgctcttttgtggagaaacaagatgaaacaggacacccctggcagtctgggttctaggttcttcagctagctgctgaaataaagctgttctccttgaaatgtggcctaattaaaatattggccaaacccaccccagtggtaaagcatcagttttccatacttttgttttctgtgtgtttatctccccacatttcagcaggggtgatccctctggggaggatacagatgttgctagatttcctgacacgcctcaacagctcgagcatacaaaatagggaaaagcacaaatctgataagagaaataccctgtaatggaaaagtcacaaaacaaccagcttgctctcccctttcgcttgtgaaagattaacaattctgagcagttgcttgaatacacaatcgtgatgccctcacccaggttctccctgcaagaaaacctattttaagacctgtgccttcttcacccaagtcagaaaccaaaaggacacgaagatcatctgcctctatatttgaatgttttcaaaaaatgagggagtaaaactgaggtgtgaggagggaagactgagctctcaccttcttaactaactatatccaaaccgttctttccatgcagccagagaacttattttcatctaaaagcacagctcgtgttttgcttctattcaccaaggcactccaaaatcagggaacaggggtaagggcagagcatcacagcttcctgaggtcgcaggtgcagcacggcctggctcaggtgccttgtctcatggcacaatgtggggctagtgggtttatgttgaagaacaggtggtaggcgattatg

SEQ ID NO: 723100 - DNA, 1891 bp, Homo sapiens
cgggggcggggaggcggcatttgtctgttacagagtgtctgtccccactgaacatagcagggctatggcaagctcctgaccctgatgcatgaccgacaccccaacaccccaccgcccagacaaagagagggctcaatgcccctcaaaggcaaccacagagcagaaatgtgataaactcgtccaaatgattgctttttggcccttacacaacatgcccccggtatgaatctaaaagcaattaagtcattccagctgggagtccaatgacatgctgtttaaaaagtcttctgagaaacatccctcttcagaaaacgatatgcacaaaagaaacaacagccactcttcttccttccgtttttaagttataaaaagcatttaaaagatacacatgcagctgacctagcaacaagccttcaccaaggtctcctcctcaaagcactcaaaaagccaaggtaaactcattccaaaggcatttattaattcctctagtctacctcacttaccccctggaaaaaataaccaattatgagagcttaagaaaaatctaggcatctcaaatatcaacttgtaatataaatacccatgaagcagtgttctgattgtgttatttggtttccaaatagtcattacctaagggctccatttttagaatcatttgagattctgtatatggaagagtattttggaaactctgatgtgctattgaaatagaagttgctggaagcattgttattgtaacccttgagtgctaacccaaggttaaaagctcatgtgatgctgtccaaatcatttcagattatatattttaataaatccatttccattaggatgttcagtggattacaaatgagcacattagagtcctgtgtaatgtttgcaaaacaaaacatctgcctggggacagcaggctcttgcaggaaactactggcatcaggactcctgctcggaggaagaagggtacagtctcaggcccatgtggaagctgatggcaggacactgtggatggtgtgtgtgtcctctmctgccacctctgccatgaggccagaggtcccggctccatgaccagagccactctgctcttttgtggagaaacaagatgaaacaggacacccctggcagtctgggttctaggttcttcagctagctgctgaaataaagctgttctccttgaaatgtggcctaattaaaatattggccaaacccaccccagtggtaaagcatcagttttccatacttttgttttctgtgtgtttatctccccacatttcagcaggggtgatccctctggggaggatacagatgttgctagatttcctgacacgcctcaacagctcgagcatacaaaatagggaaaagcacaaatctgataagagaaataccctgtaatggaaaagtcacaaaacaaccagcttgctctcccctttcgcttgtgaaagattaacaattctgagcagttgcttgaatacacaatcgtgatgccctcacccaggttctccctgcaagaaaacctattttaagacctgtgccttcttcacccaagtcagaaaccaaaaggacacgaagatcatctgcctctatatttgaatgttttcaaaaaatgagggagtaaaactgaggtgtgaggagggaagactgagctctcaccttcttaactaactatatccaaaccgttctttccatgcagccagagaacttattttcatctaaaagcacagctcgtgttttgcttctattcaccaaggcactccaaaatcagggaacaggggtaagggcagagcatcacagcttcctgaggtcgcaggtgcagcacggcctggctcaggtgccttgtctcatggcacaatgtggggctagtgggtttatgttgaagaacaggtggtaggcgattatg

SEQ ID NO: 723101 - DNA, 1891 bp, Homo sapiens
cgggggcggggaggcggcatttgtctgttacagagtgtctgtccccactgaacatagcagggctatggcaagctcctgaccctgatgcatgaccgacaccccaacaccccaccgcccagacaaagagagggctcaatgcccctcaaaggcaaccacagagcagaaatgtgataaactcgtccaaatgattgctttttggcccttacacaacatgcccccggtatgaatctaaaagcaattaagtcattccagctgggagtccaatgacatgctgtttaaaaagtcttctgagaaacatccctcttcagaaaacgatatgcacaaaagaaacaacagccactcttcttccttccgtttttaagttataaaaagcatttaaaagatacacatgcagctgacctagcaacaagccttcaccaaggtctcctcctcaaagcactcaaaaagccaaggtaaactcattccaaaggcatttattaattcctctagtctacctcacttaccccctggaaaaaataaccaattatgagagcttaagaaaaatctaggcatctcaaatatcaacttgtaatataaatacccatgaagcagtgttctgattgtgttatttggtttccaaatagtcattacctaagggctccatttttagaatcatttgagattctgtatatggaagagtattttggaaactctgatgtgctattgaaatagaagttgctggaagcattgttattgtaacccttgagtgctaacccaaggttaaaagctcatgtgatgctgtccaaatcatttcagattatatattttaataaatccatttccattaggatgttcagtggattacaaatgagcacattagagtcctgtgtaatgtttgcaaaacaaaacatctgcctggggacagcaggctcttgcaggaaactactggcatcaggactcctgctcggaggaagaagggtacagtctcaggcccatgtggaagctgatggcaggacactgtggatggtgtgtgtgtcctctcctgccacctctgccatgaggccagaggtcccggctccatgaccagagccactctgctcttttgtggagaaacaagatgaaacaggacacccctggcagtctgggttctaggttcttcagctagctgctgaaataaagctgttctccttgaaatgtggcctaattaaaatattggccaaacccaccccagtggtaaagcatcagttttccatacttttgttttctgtgtgtttatctccccacatttcagcaggggtgatccctctggggaggatacagatgttgctagatttcctgacacgcctcaacagctcgagcatacaaaatagggaaaagcacaaatctgataagagaaataccctgtaatggaaaagtcacaaaacaaccagcttgctctcccctttcgcttgtgaaagattaacaaktctgagcagttgcttgaatacacaatcgtgatgccctcacccaggttctccctgcaagaaaacctattttaagacctgtgccttcttcacccaagtcagaaaccaaaaggacacgaagatcatctgcctctatatttgaatgttttcaaaaaatgagggagtaaaactgaggtgtgaggagggaagactgagctctcaccttcttaactaactatatccaaaccgttctttccatgcagccagagaacttattttcatctaaaagcacagctcgtgttttgcttctattcaccaaggcactccaaaatcagggaacaggggtaagggcagagcatcacagcttcctgaggtcgcaggtgcagcacggcctggctcaggtgccttgtctcatggcacaatgtggggctagtgggtttatgttgaagaacaggtggtaggcgattatg

SEQ ID NO: 723102 - DNA, 1891 bp, Homo sapiens
cgggggcggggaggcggcatttgtctgttacagagtgtctgtccccactgaacatagcagggctatggcaagctcctgaccctgatgcatgaccgacaccccaacaccccaccgcccagacaaagagagggctcaatgcccctcaaaggcaaccacagagcagaaatgtgataaactcgtccaaatgattgctttttggcccttacacaacatgcccccggtatgaatctaaaagcaattaagtcattccagctgggagtccaatgacatgctgtttaaaaagtcttctgagaaacatccctcttcagaaaacgatatgcacaaaagaaacaacagccactcttcttccttccgtttttaagttataaaaagcatttaaaagatacacatgcagctgacctagcaacaagccttcaccaaggtctcctcctcaaagcactcaaaaagccaaggtaaactcattccaaaggcatttattaattcctctagtctacctcacttaccccctggaaaaaataaccaattatgagagcttaagaaaaatctaggcatctcaaatatcaacttgtaatataaatacccatgaagcagtgttctgattgtgttatttggtttccaaatagtcattacctaagggctccatttttagaatcatttgagattctgtatatggaagagtattttggaaactctgatgtgctattgaaatagaagttgctggaagcattgttattgtaacccttgagtgctaacccaaggttaaaagctcatgtgatgctgtccaaatcatttcagattatatattttaataaatccatttccattaggatgttcagtggattacaaatgagcacattagagtcctgtgtaatgtttgcaaaacaaaacatctgcctggggacagcaggctcttgcaggaaactactggcatcaggactcctgctcggaggaagaagggtacagtctcaggcccatgtggaagctgatggcaggacactgtggatggtgtgtgtgtcctctcctgccacctctgccatgaggccagaggtcccggctccatgaccagagccactctgctcttttgtggagaaacaagatgaaacaggacacccctggcagtctgggttctaggttcttcagctagctgctgaaataaagctgttctccttgaaatgtggcctaattaaaatattggccaaacccaccccagtggtaaagcatcagttttccatacttttgttttctgtgtgtttatctccccacatttcagcaggggtgatccctctggggaggatacagatgttgctagatttcctgacacgcctcaacagctcgagcatacaaaatagggaaaagcacaaatctgataagagaaataccctgtaatggaaaagtcacaaaacaaccagcttgctctcccctttcgcttgtgaaagattaacaattctgagcagttgcttgaatacacaatcgtgatgccctcacccaggttctccctgcaagaaaacctattttaagacctgtgccttcttcacccaagtcagaaaccaaaaggacacgaagatcatctgcctctayatttgaatgttttcaaaaaatgagggagtaaaactgaggtgtgaggagggaagactgagctctcaccttcttaactaactatatccaaaccgttctttccatgcagccagagaacttattttcatctaaaagcacagctcgtgttttgcttctattcaccaaggcactccaaaatcagggaacaggggtaagggcagagcatcacagcttcctgaggtcgcaggtgcagcacggcctggctcaggtgccttgtctcatggcacaatgtggggctagtgggtttatgttgaagaacaggtggtaggcgattatg

SEQ ID NO: 723103 - DNA, 1310 bp, Homo sapiens
ccctaaattgccatcaagggccagatcttctctttttgaaaaatgaccctaaagacctgagtttcatcaatcattcagagactatcagtggtttcttccagatgggctacccctggtcccccactgactaaggacgacacaattgggactgtttgtgttggcacttctggctataaaccagaggcaggccttttccaaagagaatgtttgcctgtggaaatcactggcattcttccatatcacccttatttgctgatctttatgttttgaaatttggcttcccctctctactggtggtatctccatgctgacttctcaagttcattaatttcatgtggatgcactttcaccgggactgcatttgcatattcatatccacaatgtttagactctgtgtccacaatttctcccaggttataatttttcaaaaatggggtagtaactaacaatatttcagagtctgattgtgctatgcctgtactgagcttctcttcaaataagaacttattctgtaacttacatggcagaaatttacttactttctccaaatgtgctttacttatcagagcacctatgctcaccagtggatcagagggaatgccgactttccactttctggtagcttctacaaatctctttaaaaattcactatagatgctcttctggacaaagatcctgctggtacagagacagatttcaccctgccaagaatgagaacagggataaggctgcggacactctccttcatggatagagcaccctgcacttttgagtacctgccatgtatcaggcactggtctaggcaatggggtacaatggtaaataagacaaagttcccaccatgtggaacacatagtcttgtgggaaagacaaataaraacacaagtaaataaactcgataaataatataacttcaggttgtgatcaaagccataaaataaaattaagcagaggatgggaatggcaactgattgcatggggaggggagctattttatgaaagggagtcttggagggcacttgcaaagaggggatatttgcatggaatcttgactgatgtgaaggcatgagacgggaaaagatctggaggtggggaattaattcttcaaagtacagaggacctgcagcaggaatgaactggtgtgcatgaggaaaagcaagaaggtgggtggggctgaggctggaagaggaggcaaggacaggaggtgtgtggtaagagaggaggtcaggaggccagcaaggctctatcgtgcagtctcataggttcataaagagattacgttttattctcagtatcatgaaaaaataagg

SEQ ID NO: 723104 - DNA, 1310 bp, Homo sapiens
ccctaaattgccatcaagggccagatcttctctttttgaaaaatgaccctaaagacctgagtttcatcaatcattcagagactatcagtggtttcttccagatgggctacccctggtcccccactgactaaggacgacacaattgggactgtttgtgttggcacttctggctataaaccagaggcaggccttttccaaagagaatgtttgcctgtggaaatcactggcattcttccatatcacccttatttgctgatctttatgttttgaaatttggcttcccctctctactggtggtatctccatgctgacttctcaagttcattaatttcatgtggatgcactttcaccgggactgcatttgcatattcatatccacaatgtttagactctgtgtccacaatttctcccaggttataatttttcaaaaatggggtagtaactaacaatatttcagagtctgattgtgctatgcctgtactgagcttctcttcaaataagaacttattctgtaacttacatggcagaaatttacttactttctccaaatgtgctttacttatcagagcacctatgctcaccagtggatcagagggaatgccgactttccactttctggtagcttctacaaatctctttaaaaattcactatagatgctcttctggacaaagatcctgctggtacagagacagatttcaccctgccaagaatgagaacagggataaggctgcggacactctccttcatggatagagcaccctgcacttttgagtacctgccatgtatcaggcactggtctaggcaatggggtacaatggtaaataagacaaagttcccaccatgtggaacacatagtcttgtgggaaagacaaataagaacacaagtaaataaactcgataaataatataacttcaggttgtgatcaaagccataaaataaaattaagcagaggatgggaatggcaactgattgcatggggaggggagctattttatgaaagggagtcttggagggcacttgcaaagaggggatatttgcatggaatcttgactgatgtgaaggcatgagacgggaaaagatctggaggtggggaattaattcttcaaagtacagaggacctgcagcaggaatgaactggtgtgcatgaggaaaagcaagaaggtgggtggggctgaggctggaagaggaggcaaggacaggaggtgtgtggtaagagaggaggtcaggaggccagmaaggctctatcgtgcagtctcataggttcataaagagattacgttttattctcagtatcatgaaaaaataagg

SEQ ID NO: 723105 - DNA, 628 bp, Homo sapiens
tatcagaaccacacaactagagagcgagaccacccccaaaaggccccaggtgtgtctggcaccaaggtccatgtgctttccatttctgcaccttgtccctgggagacaccccggtcctgccagaatgtgtcagaggctgagccaacccgtgaggtcaaccctgtagacagctcaaggaaccaggacttggatctggcttttgccctctgctgtccacaaaactgggtgatgctctttccgatacggtacgtgtttataggatgctacagctcagatcacaaagcatcttcctttgttttctttttatttatttattttttttgagatggagtctcactctgtcacccaggctcccaggctggagtgcagtggcgcaatctcggctcactgtaacctccacctcccaggtttaagcaattctcctgcctcagcctctcaaatagctgggactacaggcatgcaccaccacgcctgggctaatttttgtgtttttggtagagacagggttttgccatgttggccaggctggtctygaactcctgaactgaggtgatctgcccgtctcagcctcctaaagtgctgggattacaggcgtgagccaccgcgcccagcctatcttcctttattt

SEQ ID NO: 723106 - DNA, 628 bp, Homo sapiens
tatcagaaccacacaactagagagcgagaccacccccaaaaggccccaggtgtgtctggcaccaaggtccatgtgctttccatttctgcaccttgtccctgggagacaccccggtcctgccagaatgtgtcagaggctgagccaacccgtgaggtcaaccctgtagacagctcaaggaaccaggacttggatctggcttttgccctctgctgtccacaaaactgggtgatgctctttccgatacggtacgtgtttataggatgctacagctcagatcacaaagcatcttcctttgttttctttttatttatttattttttttgagatggagtctcactctgtcacccaggctcccaggctggagtgcagtggcgcaatctcggctcactgtaacctccacctcccaggtttaagcaattctcctgcctcagcctctcaaatagctgggactacaggcatgcaccaccacgcctgggctaatttttgtgtttttggtagagacagggttttgccatgttggccaggctggtcttgaactcctgaactsaggtgatctgcccgtctcagcctcctaaagtgctgggattacaggcgtgagccaccgcgcccagcctatcttcctttattt

SEQ ID NO: 723107 - DNA, 585 bp, Homo sapiens
ttcagatttaaatcaagattttttaagtccattattaactctggaaaaaagaaagtatttcttacttccatctttaagggtttacctattgtattaattttaaatgacttagtcagaaaattcagagattcagtcaaagaaaagaaaattgggccagtgtagtgactcatgcctgtaatcccagcattttgggaggctgaagcaaaaggcttccttgagcccagcagttcaaggaactgggtgacacagggagatcccatctctacaaaaaatttaaaatattgccaggcctggtggcatgcacctgtggtcccagctacgcaggaggctgaggagggaggatcatttgagccagaaggttgaggctgcagtgggctgtgatcatgccactgcacttcggcctgggcaacagagccagactctgtctcaaaaaagaaaagaaaaatatgttttcactcatggttggaaaygcagttatattttaaagacctgacccatatattgagagaaactttcaaagcttgggaataagtggttgcgaaggaatcaggctgggtttcccaaaaagataatttctgtgaatca

SEQ ID NO: 723108 - DNA, 652 bp, Homo sapiens
ccccctactcccctaaaaaagatatatcactacagaccagagacaaacgcaaagcagagtgtgaaaccagacactgtgggctgcaggatcgctagccgggaggtggaaacagaggcttagctctggtggcagtaagactaaatgtgccaggccagagcattactctgcttgaaagcrggcagggtagtggtcctgtcctctgatctagaagggaggcccgaatcactgcctgccctaacctctagcctatagaaagctttgatcctgggaagagcacaggacagagacaaggcctccttctcaggaactgagctaagcaccccatgtcatcatcagccgtatcaccattgggcaagaacccagaccaccaagtcaactccattctgtgtgaggggttcgagcagaggaaccataaaaacctctgagcagggagggtgatcagcaagagaacattcacaattatctcccatgcaggccaagcctgcccacccaaattccatgccacgtgaggaactctgaccttggggtgtcagccatccaaatcagcaatcagaatgtgaattcactggagactaaagtaaaataaaaaagctatcttggaaaaaaaaaatgcctgatgccctcaaagagaccattggagaaataataacca

SEQ ID NO: 723109 - DNA, 652 bp, Homo sapiens
ccccctactcccctaaaaaagatatatcactacagaccagagacaaacgcaaagcagagtgtgaaaccagacactgtgggctgcaggatcgctagccgggaggtggaaacagaggcttagctctggtggcagtaagactaaatgtgccaggccagagcattactctgcttgaaagcgggcagggtagtggtcctgtcctctgatctagaagggaggcccgaatcactgcctgccctaacctctagcctatagaaagctttgatcctgggaagagcacaggacagagacaaggcctccttctcaggaactgagctaagcaccccatgtcatcatcagccgtatcaccattgggcaagaacccagaccaccaagtcaactccattctgtgtgaggggttcgascagaggaaccataaaaacctctgagcagggagggtgatcagcaagagaacattcacaattatctcccatgcaggccaagcctgcccacccaaattccatgccacgtgaggaactctgaccttggggtgtcagccatccaaatcagcaatcagaatgtgaattcactggagactaaagtaaaataaaaaagctatcttggaaaaaaaaaatgcctgatgccctcaaagagaccattggagaaataataacca

SEQ ID NO: 723110 - DNA, 928 bp, Homo sapiens
ttcgtcccagtccagctatttagaatcatttttccagtgggaagagagatgaagagaaatcctgtccaaaagaacaaggaagatgtctttgaaatgatatgaggggagccagagacagacatggaggtgagcaggaccaggtcttgctccttagatctccagggaagatgtactcagcactactgtgcgcacctgggctgcactggtgtctttactgcaggcagaaaggatggatgcacgctggccagggccatggactgcaggtgcttaagtggccccacagtagatggctgtgttcacagctcagatctgtggcccccctggcctcctcagcccctctgaacagtatcccactgttagcagctctgcagtgaaagtgcaatctgaacacaaattaagtggcagctttggggttttaaagaaaaaggaaaactttttcattttagaaacagaaagcttaatgtctcctgtgtcagttcattctatgctccctgaaatggtttcatctctatgctaattttatgctgaaaataggaaytcccctgtgctggagaggagagaaagggcttggaagtcaaagactatccaagtggctgagaatcaagtggacccccttgactcatttccacttagaaaatgctttcaaggcagccagtgttacaccgagggtcctgccaggggagccgaggcctttgcctgtcaccctgggagctggcttccaggccttgggcatggatccctcgcccagagtctgcttggtcttgcaccaatgatttcacaggttatatccagacctcatgcttgataataaggtagtaagctgacttcccttggtttcctccacttctgttttaaatgaataattaatccattaaaagcatcatctcaaaagcacaaaatatcctataatctatgactataagttctt

SEQ ID NO: 723111 - DNA, 652 bp, Homo sapiens
cttgaagattcacacagcccattagtattttaaagattctgagaatcttatgaaagaaacctgaaacgaatatttccctaacttacttgacatgaaaaatccttttaaagagagcatctgttaacattctttgggtcaaatatcccatactaccttaagttcatgagctccgggggtggactgcccttgttcagatctccattgtgtgaccttgggatcataactctctaaacctcaacactctcatctgtaaaagggggacaatgatatttatctcataaggttgttaaataaggtaatatatcttttaatacgtgttgtttaatgggatagtgtatgtaaattatgaaacaacatattttaagataggtaaaaccctgactgtggtgggaatgggaggtgggagaaggctggaatcactcatgggctagtggtcctttctggcctttaactccccartgaaggtgacagctaggcctcttcataatcgagtttccccttactgtaaaacatgggtccttgttctaccccaaggcagccatattccctcctcttcttagtatctgaacttagggtcacctattcaaatgtgcacatgggccaagcaggggatgcaaacatgttaaggggcccagggtgaagggcgggggaa

SEQ ID NO: 723112 - DNA, 1858 bp, Homo sapiens
gctccaaaaaggccacaatattggggaatgggggaatgtcaaaggggaacaggagccaactgaaagagttccaacagccagactggaacacgtaagaagcaaaataaacaatagagtgctggattataacacaaagtataaaataaaaatccatccgattataccaatataaatgaatgcgggatggatgaatgaatgaatgaatgaatgaatgaagagagaaatctcccatgcacaggaattccaagtaattcatactcttcccccaacaaggtggaacataactccccacgctttagtgtgggctgtacataaaggcttccttccagagagaacgggttggaaagggaggaaagaaagtaacttcacagtggaggaagctgacgaccactgcttccaccacgtgaccaaggccaacgtcaagagtgaagccaggctgacagtatgtcccctagctctggtgtgatgagaatggtactcaacctctgcgatcttccacaaaaaagaatcccataaccccggtctaatcacaaggggaaaaaataagacacatgtcaatagagggccattatgcaacattcctgaccaatgctcctcaaaatagtcaatgccacccaaaccaagggaagtctgagaaggtgtcacagccaagagagcctgaggaggcatgacaactaaatgcagtgtgggatcctggacaggaagaggacagcaggggaaaagtgagggaatctgaataaagcgtggatgctggtgaaaataatgtagtgacgttggttcactccttctgactaacatactcgtgtaccaggctaatgtgtgatgttaatatcaggggaacctcagtgggggaaatatggggactctgcagtatctttccaatttttctgtaaatctaaagcttctaaaataaaaagtttattaaaaagtaattatataaacttaattacataattaaaacaaaggcaataaatattttttaaagcgttcactttaccagattattttaaatattaaaaaaataccaagatgaaacaaaatacacagcacagctgaagtagctacctcccccttattctttacctccttctcctttccatcctcactatgacagcccttcctaatatcacaagtgatgttagtggctccatagagtaacataatgaatttagattgaaaaacctgagttacttcattacaaaaataaatcaggccactcagtgccttcagcttgagctatcccttgagataagcagtcagcctgtccaggacccttctggtttccaggcctcccagtctcttgcgagtggcaagtgtccatgagggagtgggtaggtctgggtacctggcatggacctccatggcttctgcacccaccttttagaaccaccgtttcccctactgttcacctgctgttcactttccatctcctcagcaactcggaaatgtagacagttcctgtttctcatgtgagacacacagggctaggagaagcgaattcactcccctacttacaaagctggaaagcggcagagccaagcttccagctaaggcacgtctgatcataaagcctgcagyctttctgctgcagcacctgcctgtcttccagctccctccccacctgtcccagtccttgccgtccttgctttgtaatcctgaacagcttggcctagggagctcctgcactcacactgccaaatcactgctctgtagctgctgtggtcacacagacacagtcaggcatgcacagaggaacctgttacgaatgcttagtcctggagctcacacagtagacacacctagctgtatctaaaatggagtgtacaaaaagcgtacctgtagaactttcactgtcacc

SEQ ID NO: 723113 - DNA, 2513 bp, Homo sapiens
tgtaataacgcaccatcctgaatctctccttcaggcctctcttctctgtgcggccctctaggagtgatagtccccaggatcctaccatcttcctatctatcttttttttttttaatttatttttttgagacggagcctcaccctatagcccaggctggagtactcactgctacctccacctcccagtttcaagcaattctccttcctcagcctcccgagtagctgggatcacaggcccgcacccccatacccagctaatttttgtatttttagtagagacggggtttcaccatgttggccaggctggtctcaaactcctgacctgaggtgatctgcccgcctcggcctctcagagtgctgggattacaagtgtgagtcaccgtgcctggccccctatctcatttaacaagctctgtctggcagatgttataagctctcttgctttaactgccagctctaggctcatgactataaaatctctgtcttcaacattctctctctctgaatctcagacttgggatatataactgcttacagattctctccccattggatagtctccacatgaaactggaacttaacatgccgcattcaaattcaccatttcccccgtagacttaattcttaatttcttctttctcagaatgatactagcatccatgcagtctccagaggttttatccaggagacatttattaccaacggctccgtctcccaccttgtaattcaaatcagttactatgctctttcggttctccttgctaaatatccatttcctctcctcttcactgtccctgtctccagcttaatccgaaccttccttataattctcaactggagtatagctttataatggatttctctccacctccatttcaactgccccttcaatgaattagtgactattttcagtgtgattcttatgcaagaaaatgtgatcgagttaattcccactgaaagcatttccaagcctaccccattgcctttaggatacaatatgaagacaattgcaacagtccaggagagagactgtgagctaagacagaggcaactgagatggagacacaggacagaatgaagggagctgggagatcctacaagctagaaatgccaagaccccattacccatgagacgatcagacgtgggagtgagagtaaagggagatgaaggaaatcctctccatcctgactttgatgataaagtgagtcatagtcttgttctctgagctggggaactctagatcctgactttcctcaaagcaaacagcaagtgaacttacttgggtggggcaccctgtctggggaagcaaagccttcaggaaactcaaaggtctgcrtagagatgaatcagagactcaataacgaagaaataaaaattaataccagatgggtgaaggaggcagttgaaagtccttgtaaatagtcagcatccaagagtgctgcagaagtggaaggtgccacaaacaatgctcttctgccaggagattcctaaaaatctgctggcaaagaccagagaaagaatcagagccacgtgcccagcaagacattacctaagctcaaaagggtttaaaggacttataaccctgccttttaccctcaattatttcatgatcaccaccatgccctttttcctggtcaggtggttggcagtagtttggaataccttgctgtttgtagaacatgttaaagcatgaattatttgttgctatgccttctgggtgcatatttggatgccctaacagatgaactaatagctcttttcatctcactctctttattgagtcttgcccatttacaacaaaggagagacttgttttgtagatctttaaaacacacctgaggattttgaattcatttataagccaatcccctccagtgatcattcagtaagaaccaaagtcatttgcaaagctatacaccaacaacatttaaactggttaaattgagccaaaccacccaatttggctgttcagccaaattcaagtatgtccaatgcattgggatattaaatccccaacaaattcttctttggcatggcctgacaagatcactggtatttattggttgcttttatacaaatggaaagaaatatatcataaccaaaaagttttcacaggcaacctcattagaatcttgcatgggacccaagagtgggctgaagaacacagtctttcctgccaaagagcagccttttgctctgcaagcaggtggctgatgggctgttttatgaagggtttaatgatctctgtctgccttagttacctaccaaaataaactgtgtgaatcccaacgtggtagaaggactccctcattaactgtcaagcaaaatcttggtagggctccacagcctgaggaaataaagttgctaaggaagacaagtcagtgattctgtagtttctacagacctctgcttcagatactgttagcagcccaggaagtagttctgttggctgcattgatcctgggcccagaattaccctaaggcagaaccatcagggagacagagctagatc

SEQ ID NO: 723114 - DNA, 2313 bp, Homo sapiens
gtcaagtcctgaaatctcagtgcagcagaattgagaaagtgaataatggcccacaggtcacaggaaggcaatgaatacgctaatcaaaggttgtgattaatgaatgttgtctcacatttcatctggcataacatgtgtccaattgatcatttttagcatagctcatcagaggagaaaaacttggtgaaatatgatctggtggggcaggatgcaccagttgcacaacagacrtaagctgctccactttggccacacctgtataaaacatgagaaaagtaggttttcatagaggttgaggcatatctaactacctcaagtagaaaaagagtatccatttatttaatgagggagagagcagtggaaaggctcagcctcatccaggctgagaagtgattaccttggaaatgctgtttgttttgattgagaaagtcagctgagaatgtattttaaataggcagaaaatatatctatcaaagaaatactatgcagtcatcaaaaagaatgaggcatgtttggtattttaatagttatctccaatgtttataataaagtgataaatgcaatatatagataattatatagtgtatgacaattatgagaaaaatgaaatgtacatctgcacatacataaggttgcacacacaaaggatgcctctgggggagggaaattgggtagctgggactgaaaataaagataaacaggagacttatgtttcagtctatatcttttgaatttatttgtatatgcacctagatccagatagttttatttctcggttgaaaaaattaaaaaagaataggaaaaaagaaaataacaaccatagtttaattttttttttttttttttgagacagagtctcgctctgtcgccaggctggagtacagtggcacaatctctgctcactgcaacttctgcctcccaggttcaagcaattctcctgcctcagcctcccaagtagctgggattacaggcacacaccactacacccagctaatttttgtatttttagtagatatggggtttcaccatgttggccaggatggtctcgatctcttgaccttgtgatctgcctgccttggcctcccaaagtgctgggattacaggtgtgagccactgcgctcagcctaatttaatttttaaaagagctggaatgcgtccattcctttcccatttgcaaagggctccagaatcatcccagatgatggctttcaaaatgatagttcaataagggagatttaggataaagtgcttctttctgatgcttcacttaagggtccctgagagtattagtttgctagggctgttgttaaaaaacaaaaacacaaactgagtgacttaaacagcaaacatttattgtctcccagttctggagactaaaaggctgagatcaagggtgtcaggaggattggctcctttcgagggctgcaagggagaacctgtggctctctcctaacttctggtgtttgctggccgtctttggcattccttggcttgtagaggcatcaccctaatctctgctttcatgttcatgtgtcactgtccttgtgtgcatgtgtgtttatgtccaaattttccacttttataaggacaccagtcattggattaggggtgtgctctagtgacttcaggttaaccaatgacatctgcaacaaccctatttccagataagatgacattctgaggcactggggcttaggacttcagcataagaatttggaggggacagcactcaactcatgacaccaagggacacttacccagagttaaactgcttactgaggggaggtttttgctatgtgtctatgaagcacagatagtaacatgcatctcctcatgcccgagatgtataaagtgaatacacgctggtatgattgaaaaccttaatattttttaacgcactaccatcctctgaggaaagaagagagcttaaacttgcttaactaagaacaacagcttgttggagcgataaatccatgaaacaaaactcagatcccctgctcttccctccccatccatgccagctaaaggcatgtgcacacagcaatgtttattaaacacctactgatgcccgatactgcactgagagccagggacggagttggacagaacatcctcctgcccttcaggtggagaaaagacacataaaataatgcaggcatgcactaagtgactatgcttcagtcaacaacagaccgtatataggaccgtggtcccgcaagactatgatgaagctgaaaatttcctatcacctagtggcattgtagccatcctaacatcacataataatgcattgctcacatgtttgtggtgatg

SEQ ID NO: 723115 - DNA, 967 bp, Homo sapiens
tttgtgtctttcaaactgtctttgtgtgtatagccccagcttattttgttactggtgtacctaaattttattacattatacataacggtctaatttgttttttttttttactcaacaatatgtgctggaaatcttgcaaagttattttacatagatacatttctgataaatagtgatccataagattcatatttcatatttattcatacttcatatttttaaaatctaccgctgcacctacggataatttaattgttgctaaatttctatttaaatgactcagtaaaaatgtgcatactttcttattatgttcacatatttctgtacagaagaaaaagaattcaaaatgcttagatatgtagaatataaatttaaaactttaatctatcctcaaatcaatatatgagaatcctttttccacaccctcatctacactcaatctcagcaaaycaaataatatatttttaaaatgagtataatgagtaaaacttgctatatttacaaaattgcactatgttggttaaatgctgttgagaatatagagaaagggcaattcatacactgttgattggaatgtaaattagtacagccattatggaaaacagaatggaatttcatcaaaaaattaaaaatagaactaccaaataattaagcaatctcagtactggtagaaaaaaaatatgtcaaaatgatatctgcattccccagtttattgaaatgccattcacaatgttcaagatacgaaattaacctaagtgcccatagataaagaaaatgtgtacttatatacagtggaatactattcagctgtgaaacagaataaaatcctgtaatttgaaacaacatggatgaacttggaggacattatgttaggtgatataagccaggcacagaaagacaaatactgaatgatctcattgatttacttttaaaactatttccagagatttggttccaaaagggaaaa

SEQ ID NO: 723116 - DNA, 1731 bp, Homo sapiens
aactactacttcaatcttccttttttatcagtaacttttgaaataatttataataactcatgcttcttttctctatcattaggttttagaattcttgcagactttactggcaatggagatgtttattgcacatttagacatcaggtaaaaaatgttcataaacaaaagaaataatatttaatatggtaaatggtcaataggaaacatgttatttaaaaaaaaacctcagaggaggagtaaaataaataaacagtcttcaaaaattattgaaaacaaaacaaatatttcatgttacaatatttccgtatatggaaaaatcagttctcatgaacctggcagattactgcatggccagaatgggttcccacttgtagtactccggcatcattttcaagttgactcatttctcaatcatagttacattgataagtttaacttggttgaaaacaacagcataaaatgactaagacaccaggaggctctattatgaggagacaaggtagtaaaaacaatgtacaaatgtcttctaatacatcttgggcagagtcaattatgtcttatgaaatcattatgtcttatgaaatcaccaagaaggtaatgaaagcaggtttaagaaatctgaatcaagctaaaagcagtaaaaagcaacaagtaaatgaaattaacttcaagtcattggcccatggcaacttctaacttactgctttgctctaggttcataaaagaaaaaatttttaaaaattgcaacattaaaatagttggcagttttactgcagtttaggggcaaagttctcaatatgatttacaaattaattaaataaatgcttggcaacactaacagaatattataggggaagtcagaaaagattgttatataagccagtttatttcttttagagaggctattgaaaacacatttaaaatgtgttttccaacatttaaaaaatagcaataaattaaagtcagaaaaaacttaccagtctctgaatttactgcatcattataatgtatgctatgaatctctaaagcagttttgtccaatggaactttttgagatgacaaaatatttcatatctgcacttgaccaatgcagtcaccactagtcatgtgtagctattgaacaataaaatgcaactaaagtgactgataaactgaaaatttaattttactttatatcaattaattttaaatagccatatgtgactaagggttactgtattagacaattctgaagcctaagttggattttatgaatatttgagcttttcaaaataaactgagtctgtttgctgtgatgaattaatgtagttaaaaaacaacaaaatatattcagtgaatctgagaaattcaatgtggaagtatattaagctaattttactgcatcggaatactttaaaatgcaggacagccakgttcacattaggtggcaaggtgaccttcaatggagccctaggcaaatcgttaaacaaatgaaatattgtatatgtgttgatatggtttggatttgtgtctccacccaaatctcatgttaaactgtaatccccagtgtcagaggtggagcctggtgggaggtgattggatcagagggatggatttcccccttgctgttctcatgatagtgagtaagctttcatgagatctgattgtttaaaagtgtatggcacctctcccttcactctcttcctcctgttcctgccatgtaagatgtgcctgcttcccctttgccttttg

SEQ ID NO: 723117 - DNA, 862 bp, Homo sapiens
ttttattttatttttgagacagagtctgactctgtccctcaggatgaagtgtagtggcacaatctcagctcatggcaagctttrcctcctgggttcaagtcattctcctgcctcagcctcccaagtaactggtgttatgggtgtgggccccaagcccggctaatttttgtatttttagtagagacagggtttcacgatgttggcggaggctggcctctaactcctaacctcaagtgatctgattgccttggccttccacagttccaggtttacaagtgtgtgcagctgggcccggtcagccgtttcttaaaggaagcacacagctgtgtgtttcaggtacgtgctcaccgcgagtggaaaaacaaaggtgactcagccgggggcaggactgggtaaaaatgctgacttggaatcaatgaggccttcagggacctgtgttctagactcagaaatggagcctgaagttctagactgatgcaggagttgccaccgcaaggatggttatttaaaaatgtcaaaaataaatggaacctgaatggaaactttctggtgtcttccacgattgatcaacttgttttagacatttatgtatcagaagtctctagaaatcaccctcctgggttcaagcaactctcctacctcagcctcctgagtagctgggactacaggggaccgccaccacacctggctaatttttgtattttaagtagaaagggggtttcaccatgttggccagtctggtctcgaacccctgacctcaggaaaaccacttgcctcagcctcccaaagtgcttggattgtagacatgagccactgcacctggcctgatattctgatacaagcataaaatgtgtaatattca

SEQ ID NO: 723118 - DNA, 862 bp, Homo sapiens
ttttattttatttttgagacagagtctgactctgtccctcaggatgaagtgtagtggcacaatctcagctcatggcaagctttacctcctgggttcaagtcattctcctgcctcagcctcccaagtaactggtgttatgggtgtgggccccaagcccggctaatttttgtatttttagtagagacagggtttcacgatgttggcggaggctggcctctaactcctaacctcaagtgatctgattgccttggccttccacagttccaggtttacaagtgtgtgcagctgggcccggtcagccgtttcttaaaggaagcacacagctgtgtgtttcaggtacgtgctcaccgcgagtggaaaaacaaaggtgactcagccgggggcaggactgggtaaaaatgctgacttggaatcaatgaggccttcagggacctgtgttctagactcagaaatggagcctgaagttctagactgatgcaggagttgccaccgcaaggatggttatttaaaaatgtcaaaaataaatggaacctgaatggaaactttctggtgtcttccacgattgatcaacttgttttagacatttatgtatcagaagtctctagaaatcaccctcctgggttcaagcaactctcctacctcagcctcctgagtagctgggactacagggsaccgccaccacacctggctaatttttgtattttaagtagaaagggggtttcaccatgttggccagtctggtctcgaacccctgacctcaggaaaaccacttgcctcagcctcccaaagtgcttggattgtagacatgagccactgcacctggcctgatattctgatacaagcataaaatgtgtaatattca

SEQ ID NO: 723119 - DNA, 882 bp, Homo sapiens
gacaaaataagttgattttgagaagccaagttccttgagagaaagcctagagaagaagtatgcctgacagccagcaccttcatcacgaggcactagccaaattcttgattcatgcagggcaacagtctgagaagcaaaaataaaaacctgaaaaacaggacaaagatattggcagtctcataagaggaaacaaacaaacaaacaaacaaggagatcagagagaccaaattaaaaggggcctaataaatacccttgactttaagttgggagccttagagtgggagtgaacaagaggtagactaaccttacaaagaatgaaatcaattcatttgttaaaatgcaatagaggctatcagtcctactttctctgcctgccagagaataaagtgggtcatctgtggaggtagatctagctcttccataatttgtcataaaaaagtctggcattcagtcaaaggttgactgaattataaatattcagcggcttatagaatatgagtgtaacaaaaataagatcaagaaacaaacagatccacaagtattggatatggatcttaaaataactaagagtaatatgttcaagaaaatagatgctaagatggaggattttaccaggaaaccagatatatacaaaataatcaaatggaaaattttaaactgaaaaacacaagaaattaagaactcagtagatggttttactgtagtttgaaaacagttaaagagagaattactgaactgaaaaatargtctatagaaaatatccagactgaaacacaaaagacaaataaggaaataaaatatagaataaaaagctaaggaatatctggggtatgacaaaaagcattgggaagagagagggaatagggcaaaagtaatatttga

SEQ ID NO: 723120 - DNA, 580 bp, Homo sapiens
atattatatgttatcatttagactttggcctatgtcaatgtggaactgatgtgtttcttagaaaaagattaacatgcatgtttgtgtttggctcttctttattttattttaatttcattttamaatttcttgtatttaaattttttagaatttttacttttatactaatcataatacttcagttcaggaaaactgagctgtttttcaggccatactgcctctctctctcccccatctagtattcccccccatctactgttccaaatttatggttacatgtattcaatgtttagctcccacttataagtgagaacatacaatagttgttttcctgttcttacattaatatgcttaggacagtggccttgagcagcatccatagttctgcaaaaggcaagattttattcttttttatagatgcatagtattccatggtgtacatgtaccatattttctttatgtagtccaccatcgatgggcatgcagattgatttcatttttttgctattgtgaatgattttttgctattgtgaatgattgatttttttgctattgtgaatgattgatttcatttttttgc

SEQ ID NO: 723121 - DNA, 507 bp, Homo sapiens
cttaggaagactataaatgtaaataaaatgtacacataactaattttgccatcatgtcatttttttttactgtttatttagaattttagtagctgtaagtaagaccaacaagaacattggaattcatgagtcctaagttttaagctcatctttatttcaaaagatacagttaagatagttttcttattctaaaaatatatcactcacttttgtaaacatgtctttatgtgtctgtggactctggttccttctatagtgtttggctactagtatatatttgatttttaggaaaagccatgtagaattttatttgaaagtatacataataaaatatataagttaagcttgaatgatagaaactggtatcttcaamgattacattttgatgttttacaattttaatcataaaactttaagaaaaaatgaggaaataaagcaataacagtgtatttgaattggtagtatcgatataggttaaacttatatttctgtaactaaaatggacag

SEQ ID NO: 723122 - DNA, 1981 bp, Homo sapiens
ctgtccgcaagtgtgtggtcttctcatacagcaaggctgcctgccttttcagtttcgcagatgaaggggacactgtaaagtagtaacacttttccaggaaaatacatcttcattccaaaataaactatgagattctacaaacagagcagagcagctatttcccctagaagatgactcgtggctaaacttctgggggagctaacgaatatttgaaaggcaagcgataacaggtgaaaatgcactcagatactgcctgggaaccgcagggcaccaggaatgcaccttcacctctgcctctcgtattttgcatgcaaaaacaccaaactgagcctctgtgatttttccaggctcagcaaagtttcagtgtcaggaagagtggctttagatctgccttataatgattggaaccaggtctgaagaaagcctggtgaaggagaggagatcaagcagaagggggaaggggctcaaacgctctcctttcactgtagttaccaagccaggtttggggtctccctagaggaaattgccttgctaataaacttaatctccccaaccccattctgtccttcctcaggaacatgatcaacagggctgcttgatgacagccatgagaaggaggccaggtaaaagagacatttcaaggaagtcaagacaggcccaaggccagccctgcccagttacagatgttcggtccagttccttccagatccgaggctctctacttggttagctaagcagccagcttctctcctttgtttgccccttattggccccctactagttagagcttcttcacttacttttcctagtctcttctttttcctagtctcccagaaaatagctcccttttacttgttttcctagtatcttgctttacctctaggtctctagctctgccatatctgcaagatatgacctaatggacacccatacaagagaagggccctatagaagttgacatgcatggtacagaaaatggggtgtgaaggcagcagacgtgctttattttattttattatttgagtcagagtcttgctttgtcacccaggctggagtgcagtggcacaatctcggctcactgcagcctccacctctctggttcaagcgattctcgtgccttagcctcctgagtaactgggattacaggtgcccaccaccattcctggctaatttttgtatttttagtagagatggggtttcgccatgttggccaggctagtctcgaactcctggcctcaagtgatccacccacctcggcctctcaaagtgctgggattacaggcatgagccacagygccaggtcctcagatgcattttagaatttcaaaaattttcttagaattgccagctgctgtcttgggtaagtgatttcctgagcctcagcttccccgtctataacatacgtatacaaatactaatctacctcagagaattatgagtagcattacatgaaatagtatttgtgagccctctgcacaatgcctggaacataggaaggactaaaaggttattgtttttattaatcaggaggtgtgactttgacacatgcttccctgtacaaagaaacagcttaaaaacagctctcactggccatggcaggggataaaactccaggctgttatttttattactaaatcaaaactatattgataatttatatatgaaaatcaatgctgaactaaaataattggctttatttacacctttgagcctatgcctgttataaaagtgtgactccagtgaataaatatggcaaaaggactgttgacaggttttctcccttaagcttcttctctgagcttgggaggccaaaagattctgtgggagttcacagctcagtgacactgccatgattgtctcttgttggccatatccattgccaccatccactgcttagaaccctgccccgagcaagtgtgcagatacctggacaccacataccacctagcccagaggaaacacatgcaccagaggctggaag

SEQ ID NO: 723123 - DNA, 586 bp, Homo sapiens
aatgagaacatgtgctatttacctttctgttcctgattcatttcacttagcataacattctccaggcccatccgtcttgccacaaatgactagatatcattttttatggctgaataatattccattctgtatacataccaaactttctttatctgttcatctgttattggacaccttggttgatttcaaatcttggctattgtgaatagtgctgcaattaacatagagggtacagatatctctttaatatactgatttcccttwggttatatacaaatacacttgtatacacacattcttgaaaagtatacaccaaaaatttacaaatttttgttttctagtgttctttcttttgtaagttttgtaaaatgagcatgtgttaataaaaaatatatgtattattttaaaacctataattctgtatcaaaatataaatatttaaaggaaaactagtaaaatatcccttaaataatccacatgaaacatttagctaatagaaagtgctatataaatattagttatgacttattactattatcatcatcactgattttcagcagaaatatttaaagttccttttttgtac

SEQ ID NO: 723124 - DNA, 586 bp, Homo sapiens
aatgagaacatgtgctatttacctttctgttcctgattcatttcacttagcataacattctccaggcccatccgtcttgccacaaatgactagatatcattttttatggctgaataatattccattctgtatacataccaaactttctttatctgttcatctgttattggacaccttggttgatttcaaatcttggctattgtgaatagtgctgcaattaacatagagggtacagatatctctttaatatactgatttcccttaggttatatacaaatacacttgtatacacacattcttgaaaagtatacaccaaaaatttacaaatttttgttttctagtgttctttcttttgtaagttttgtaaaatgagcatgtgttaataaaaaatrtatgtattattttaaaacctataattctgtatcaaaatataaatatttaaaggaaaactagtaaaatatcccttaaataatccacatgaaacatttagctaatagaaagtgctatataaatattagttatgacttattactattatcatcatcactgattttcagcagaaatatttaaagttccttttttgtac

SEQ ID NO: 723125 - DNA, 586 bp, Homo sapiens
aatgagaacatgtgctatttacctttctgttcctgattcatttcacttagcataacattctccaggcccatccgtcttgccacaaatgactagatatcattttttatggctgaataatattccattctgtatacataccaaactttctttatctgttcatctgttattggacaccttggttgatttcaaatcttggctattgtgaatagtgctgcaattaacatagagggtacagatatctctttaatatactgatttcccttaggttatatacaaatacacttgtatacacacattcttgaaaagtatacaccaaaaatttacaaatttttgttttctagtgttctttcttttgtaagttttgtaaaatgagcatgtgttaataaaaaatatatgtattattttaaaacctataattytgtatcaaaatataaatatttaaaggaaaactagtaaaatatcccttaaataatccacatgaaacatttagctaatagaaagtgctatataaatattagttatgacttattactattatcatcatcactgattttcagcagaaatatttaaagttccttttttgtac

SEQ ID NO: 723126 - DNA, 1210 bp, Homo sapiens
ctatatatttgatagcatgctacaaataaatttcaatatgaaattagagaaacatgagtaaatttcaccattcactcaagagagaaatacataagtggaattctttctggatgtatacaaaatgtttttttttttttttgagggaggagaggtttgttatagcaaaattgctaaattagaatacttgattccctggtctctcactttatcctgacatcattaacatgaatagggggagaaacatttggagccatatcagggatataacagtagacatgtcagaaataaaactctactatgcaaaaccagtcattcttattcatagctctaattttcctagatccactcaactcagattcccaccccacgtttaaggactatcacactattttacattcttaagtctgtggctgttctactagactgcatattttgaacaccaaaatcatgttttcataaattctatgtagcttgcacataatgaaagctaaataaatatttgtagaatgaaattgcctctatatcccctgcttccatagttataactaaatacagttgttctcaacctttaccatacatcagtatttcctggacagcttgttaaaacacaaatttcttggccctccattcacagtttttgaatctgtaggtagggatcaagattttacatttccaaagagttctcaggtgattttgatgttgctggtccagggaaaacatgttgagaactattggcttagttaaagtagaaaaataacccagaaatattagtaatacatcacttctgaaaaaccgtagtggcactcaagaattggttttatttcaaaaattttctaggtgaacaagtcatgtatacattgtctataaaatgaggtatcttaataagtgaaatacaaaatagaaatttagtgttctgtagaggctatttatggaataattagagaaggacagtgtctactaatgattcagaagggttttctatcatagggtttacttttacctggccacagtaagagcagaaaagttccttcaaatggcatctccactaaaacactaataacatggctgcaatggataattgaaatccacagagaaaccataactttaacatgtaatttaaaawttattttcttctgctccaaatcagaagtatttaaaaggacaacacttaatttcagctttctcatcattttttggtggacaactttga

SEQ ID NO: 723127 - DNA, 2811 bp, Homo sapiens
ggtaattttaccatgtttgcccatgaacagaaaggaaccaaaatcattagaggaatgaatggctctttgggaagcctttttccttctttttgtgcacaagtgattgagggttaaaataatagaaccctgatcatttttaattacagaatttctgagtttttattaaattgtatgtgtgtggwcatcatttttcttttaaagcttttattttgtaggatttagggttcttttcacagtctgttgcatttcagtgttattaaattcctgtatctcattgatgaggaaattatctatacaggttgattatccattatccaaaatgcttgggaccaaaagtgtttcagatttcaatctttttcagattttcaaatatatgcattatatacttaccagttcagcttccctaatctggaaatcggaaatctgaaatgcttcaatgagcatttcctttgatcatcatgacagtactcaaaaagtttcgagttttggagcattttggatttctggattgggaatactcaacctgcattactgtggagcagtaaacaagaaatctaaaaacaattagtatcccatctttaataccttctcactctgttgtgacttgattttgaccttctgaaatgattcctcaggtatagtattcatgttttttttccccaagacccaatatcgtatttcaaatctcatgagatgatgctgttaataatggtacctgccctctgttgtattatttgctctaaaattttggtaaagccagaaacgagttcaatgtatgtgttgtctctctatgtactgttttagaaagatccttatgcactgttttagaaagatccttatgccacaccatcttcccaccaaatgcagaatgaaataactgacataattatttttcatccttccagcccttttcataatagtgactttgccactcctagaatagttgagattagcacaagtgggaaacggatgaaaatctaccatttgtaatcatctttattgtttttcagaattaagatagatttttctgttatattaactagaatattaagtagcaaataatcctcaatattgattcattacacactggatacaaagtattatggagtttatgtgagttcccataatttagtggtgatgaaagtatatttgcacataaaatatggctaaactttaagtcatggttaatagggagtttggttaaagataatctgaacattaaccacctttactggctaatgtctggtgtgcttggtaagtcagtattttggaaagtcgtttaaagtgactgctatgaaggttgtagtttgtattaacaataggttcctttcctatgttgtttattcaagcccttatatgctataaaagcttattgactgaccagctaatccctatagaaatcagaatcagcctgttttcattttaatgaatatttgatacatgtaacattaacatgactgagaaataagtttagcacataagaataaagtgaactaggaaggtgatttggagttagttatagaagtattttcagtcaagtccaagtacttaagaaacacttattaatatagtgggtgagcaggctcttccaggcttagaggacatcttgaataaagggtagaaggtgaaagtgaaaagaccatgtatgaaaaactgtaagatttccctgggacaagtgaagatcaaggataagaatgtatgaagctggttagggagaatggggcaggtggtagagagtcttgaagtcaatagataagtttatgcatgagccagagggtatctagaaccatcagaagggtttgctgattagtatgaggttgcaaattgatatagttggaagaacattctggtgttacttgtagaatggactaattgaaaggagacaagacttgaacttgccagatgtggctaagttgtaaatacggagatgaaaaaagttgagggatgggtagagaaactatatttgcttggggacatatctgttgggagaacaatatcaaaagtttgaaataacaggaataacttgttaatttgtccgtagtgtttttttcactatgtttttactttgtcttactaatctaaccatccatttcttactctgttaagtatatggcttgtatttcttctctatttcatatgaactaatcctttttagaacttcattttccattcagttttcggctatttatttatttatttttgagatggagtcttaccctgtcggccaggctgtagtgcagtggcacaatcttggctcactgcaacctccatctcccagttcaagtgactctcctgcctcagcctcccgagtaactgggactacaggcgcgcgccaccacgcctggctaatttttgcctttttagtagagatggggttttactgtgttggccaggctggtcttgaacacctgacctcaggtgatccacccgcctcagcttcccaaggtgctgggattacaggcgtgagccaccgtgcccggctatgctttttatttttaaatttgcatcttccacctctaattgactcttttattttagctgcatttaccacggggaacagtcttctgagggtgaatgttggggtaaagaatgatttgcattgcatttgctatgtgccagtgttgtcccactggggaaatcctgaactaagttctctttttaaatgtaatccatatatagccttttgcagagaatgggcatctctgctctttaaaattggttgaactaagtgattcatagtagaaaccttaggattattataggagtaagctgtttactaataaaggttaagtgatgcttctgttttcaaaa

SEQ ID NO: 723128 - DNA, 631 bp, Homo sapiens
ctcacttagtggatcacaaacatctgcaggtggcttgtccaaatatatattataaaatactgagtcagttcctttattggagttgggagcaactttactcacaaaagcaattaggtatgcaaactaaatttatatcttggagcagctcaatgaaaggaaaaaacaaaagtcaactaggcaaactcagctgtttccaagtttttttttttgtttttttttgagatggagtttcactcttgttgcccaggctggagtgcaatagcacgatctcggttcaccacaacctccgcctcccaggttcaagcaattctcctgcctcagcctcctgagtagctgggattataggcatgcaccaccacacccagctaattttgtgtttttaatagagatggggtttctccatgttggtcaggctggtctcaaactcccgacctcagctgatccacccgcctcggcctcccaaaatgctgggattacaggcgtgagccaccrcgcctggctccaggttttattaatactggtttggtgtgcatccatttgttctcaagtgagctcaaaagtttgggaaatttttagctggggtgggtatcataaaactggagagatgttattatcttattctattctagaa

SEQ ID NO: 723129 - DNA, 1129 bp, Homo sapiens
caactagaagtcagcccatctggctgggcgcggtggctcacatctgtaatcctagcactttgggaggctgaggcgggctgatcacctggggtgaggagttcgataccagcctggccaacatggtgaaaccctgtctctactaaaaatacacaaattagctgggcgtggtggtgcacgcctgtaatcccagctactcrggaggctgaggcacgagaatcgcttgaacccaggaggcagagattgcagtgagccgagatcattgcactgcactccagcctgggtgacagagctagactctgtcaaaaaaaaaaaaaaaagtcggcccacctggaaattggtttttattaaagactgaaatttgacatggtggctctttatgtaagtaacctgttgtggaggctaaagtaactccatcttggatgctaatccactatgttgacttgtgattaaccctggttccaggaatgcctctgagatttccagttcatctattgttccttgtgttaagagcacatccttaccataaatcctgcccttagatcaaactcctactcattccctctgaaacacgtgtaccttttcctgtggtttataatccctgggtctgggggtggggggtaatggtgtggagatctatctgccttgcagctgctcaagaccatacttctgtccataagttccccgataaaatcaccctgtgatgacaagctggacttatctgcctccttctttggtttctcagccccttctgcatttgggggtcactttgcttatatagccctttcatgaaacatgtgtactagcaaaatactaaagatttatagaaaggggttgggcacagtggctcatgccagtaatcctagcactttgggaggccaagatgggtggatcacttgaggtcaggagttcgagaccagcctggccaacacggtgaaaccccgtctctactaaaaatacaaaaaattagccaggtgtggtgctgcacacctgtagtcacagctactcaggaggctgaggcaggagaattgctggaactcaggaggtggaggctgcagtgagcttagatcatgccactgtactccagcctgggcaacagagtgagactctgtctcaaaaaaaaaaaaaaaaa

SEQ ID NO: 723130 - DNA, 1872 bp, Homo sapiens
ctctactaaaaataccaaaaattagccaggcgtggtggtgggtgcctgtagtcccagctattagggaggctgaggcaggagaatggcgtgaacccgggaggcggagcttgcagtgagccgagatcgcgccactgcastccagcctgggcgacagagcgagactccgtctcaaaaaaaaaaaaaaaatctgttttcataggatgctgcatttttaggtatttagtactgaggaggcttcttagtttgtcatattgccccaaattgaagttcatccctttttatatttccattctgagctttccaaaaggacacttttgatgaaagcccactcaatgggctttcactgaaaccattgtggccctccttaagtggctccaagtgaatgcagtgatccatttctggtggattgtgcccaaaattgctctcaccaaagaaagcctaaagtttccatcaaaagtggaatttccattcagttaagtactgttttcagatgctgaactgtagtagataccacataattattccaagttatctgaggataaattaattagtgacttttgtgtatttcagatttggcgcaaatatgacgctgacagcagtggctttatatcagctgctgagctccgcgtgagtgtcactgggtgaagggtgggtttgtttatcattgggaatttgatatgtgtgtatcatgagtttgatttctgtgggcccaagaaagatgtatttgaatatgtgactcaaaaaatacatacatatgtacatatatgtatatattttcatttttaaaaggtttagaaagtgcaagtcacattgctctctctggaaaagaagcataattgagcatttatgataactttttcacgctggagctattccctgggtcccgtgagctccctataaacagtgacagccctccattcttggatttattgcttgctaaaagcattttatttcctcctggaaacaagcaactcacaattcttgaaataaggccttttaagacctttgcagtttatttgctcactatataaagtatgattcttctcttggcgccacagaacttcctccgagacctctttcttcaccacaaaaaggccatttctgaggctaaactggaagaatacactggcaccatggtaagtaatgagtaatgtaatctccatgagggcagctcccccactccctccccagaccccagaaacagtgtctgctagagagttcgtccttgagaaattgaagactaaatgaatgcaagaggaaacctcaactctgaaaaatactggctaaaactgaactgttttagcctctctcttgtgaccaggttgcatctatttgagagagaaagctgttcaccagtctgtggggaaacctgaaaagttcagtcaacattaggtttctaagcatcaggccaataacctcaatgttaattgaagtcacatggaaacaagtaaacatggacttagacaatcaggaccaaacagatggaagctgcctctcaccacagtggatgattctcctcatttagcatgttgatttagtgcagttggagagtcagatagatgaaggatgcatgtcctacctctgccacttactagctatgatgtaagaaaactgtcaagcctctcaactttatttacttctcctataaaatggggacgaataacacctaattcctgtgagggaaaatgtgttaatgcatatgaagcacttgcatactgtccagaatataatgagttagctcttattgcagtagttgtcattatttcctgttcccctcatgtcatccttgttccaagtgaccttgagactatttttgtgtcaagctccatggagagtagtaaagtagggagctgcctttggcgaactcatcct

SEQ ID NO: 723131 - DNA, 1872 bp, Homo sapiens
ctctactaaaaataccaaaaattagccaggcgtggtggtgggtgcctgtagtcccagctattagggaggctgaggcaggagaatggcgtgaacccgggaggcggagcttgcagtgagccgagatcgcgccactgcagtccagcctgggcgacagagcgagactccgtctcaaaaaaaaaaaaaaaatctgttttcataggatgctgcatttttaggtatttagtactgaggaggcttcttagtttgtcatattgccccaaattgaagttcatccctttttatatttccattctgagctttccaaaaggacacttttgatgaaagcccrctcaatgggctttcactgaaaccattgtggccctccttaagtggctccaagtgaatgcagtgatccatttctggtggattgtgcccaaaattgctctcaccaaagaaagcctaaagtttccatcaaaagtggaatttccattcagttaagtactgttttcagatgctgaactgtagtagataccacataattattccaagttatctgaggataaattaattagtgacttttgtgtatttcagatttggcgcaaatatgacgctgacagcagtggctttatatcagctgctgagctccgcgtgagtgtcactgggtgaagggtgggtttgtttatcattgggaatttgatatgtgtgtatcatgagtttgatttctgtgggcccaagaaagatgtatttgaatatgtgactcaaaaaatacatacatatgtacatatatgtatatattttcatttttaaaaggtttagaaagtgcaagtcacattgctctctctggaaaagaagcataattgagcatttatgataactttttcacgctggagctattccctgggtcccgtgagctccctataaacagtgacagccctccattcttggatttattgcttgctaaaagcattttatttcctcctggaaacaagcaactcacaattcttgaaataaggccttttaagacctttgcagtttatttgctcactatataaagtatgattcttctcttggcgccacagaacttcctccgagacctctttcttcaccacaaaaaggccatttctgaggctaaactggaagaatacactggcaccatggtaagtaatgagtaatgtaatctccatgagggcagctcccccactccctccccagaccccagaaacagtgtctgctagagagttcgtccttgagaaattgaagactaaatgaatgcaagaggaaacctcaactctgaaaaatactggctaaaactgaactgttttagcctctctcttgtgaccaggttgcatctatttgagagagaaagctgttcaccagtctgtggggaaacctgaaaagttcagtcaacattaggtttctaagcatcaggccaataacctcaatgttaattgaagtcacatggaaacaagtaaacatggacttagacaatcaggaccaaacagatggaagctgcctctcaccacagtggatgattctcctcatttagcatgttgatttagtgcagttggagagtcagatagatgaaggatgcatgtcctacctctgccacttactagctatgatgtaagaaaactgtcaagcctctcaactttatttacttctcctataaaatggggacgaataacacctaattcctgtgagggaaaatgtgttaatgcatatgaagcacttgcatactgtccagaatataatgagttagctcttattgcagtagttgtcattatttcctgttcccctcatgtcatccttgttccaagtgaccttgagactatttttgtgtcaagctccatggagagtagtaaagtagggagctgcctttggcgaactcatcct

SEQ ID NO: 723132 - DNA, 1872 bp, Homo sapiens
ctctactaaaaataccaaaaattagccaggcgtggtggtgggtgcctgtagtcccagctattagggaggctgaggcaggagaatggcgtgaacccgggaggcggagcttgcagtgagccgagatcgcgccactgcagtccagcctgggcgacagagcgagactccgtctcaaaaaaaaaaaaaaaatctgttttcataggatgctgcatttttaggtatttagtactgaggaggcttcttagtttgtcatattgccccaaattgaagttcatccctttttatatttccattctgagctttccaaaaggacacttttgatgaaagcccactcaatgggctttcactgaaaccattgtggccctccttaagtggctccaagtgaatgcagtgatccatttctggtggattgtgcccaaaattgctctcaccaaagaaagcctaaagtttccatcaaaagtggaatttccwttcagttaagtactgttttcagatgctgaactgtagtagataccacataattattccaagttatctgaggataaattaattagtgacttttgtgtatttcagatttggcgcaaatatgacgctgacagcagtggctttatatcagctgctgagctccgcgtgagtgtcactgggtgaagggtgggtttgtttatcattgggaatttgatatgtgtgtatcatgagtttgatttctgtgggcccaagaaagatgtatttgaatatgtgactcaaaaaatacatacatatgtacatatatgtatatattttcatttttaaaaggtttagaaagtgcaagtcacattgctctctctggaaaagaagcataattgagcatttatgataactttttcacgctggagctattccctgggtcccgtgagctccctataaacagtgacagccctccattcttggatttattgcttgctaaaagcattttatttcctcctggaaacaagcaactcacaattcttgaaataaggccttttaagacctttgcagtttatttgctcactatataaagtatgattcttctcttggcgccacagaacttcctccgagacctctttcttcaccacaaaaaggccatttctgaggctaaactggaagaatacactggcaccatggtaagtaatgagtaatgtaatctccatgagggcagctcccccactccctccccagaccccagaaacagtgtctgctagagagttcgtccttgagaaattgaagactaaatgaatgcaagaggaaacctcaactctgaaaaatactggctaaaactgaactgttttagcctctctcttgtgaccaggttgcatctatttgagagagaaagctgttcaccagtctgtggggaaacctgaaaagttcagtcaacattaggtttctaagcatcaggccaataacctcaatgttaattgaagtcacatggaaacaagtaaacatggacttagacaatcaggaccaaacagatggaagctgcctctcaccacagtggatgattctcctcatttagcatgttgatttagtgcagttggagagtcagatagatgaaggatgcatgtcctacctctgccacttactagctatgatgtaagaaaactgtcaagcctctcaactttatttacttctcctataaaatggggacgaataacacctaattcctgtgagggaaaatgtgttaatgcatatgaagcacttgcatactgtccagaatataatgagttagctcttattgcagtagttgtcattatttcctgttcccctcatgtcatccttgttccaagtgaccttgagactatttttgtgtcaagctccatggagagtagtaaagtagggagctgcctttggcgaactcatcct

SEQ ID NO: 723133 - DNA, 658 bp, Homo sapiens
gacagaattaaaacagagtattggattcctgaggttgtttgtatcaggagtgccggactattactccatctagaacaaaatgtgtttatctcagtgtcaaagaggagactaatttgccttagactgacttacttgcatctcttgcagatgattggtataggagctttcttgaaaaatatactaattcagtgattattcaaccagagttataatggggacagagcactgtcaaaataggaaaggcttttggaaacttctcaaacggctgcctccctcctctcttcccctggttttccacattatccttgtaaacagcctgctactctgctgctcacactgcagtgcaatgagaaattttattggtggattgtgctttgcattttaatatgtgagcagatagaccactgtaccagtcttttgataacagtgcttcattggtcctaattcacagtggaccagtaataggatccaagccttgctttcaaaaactgcgtttcttatcattaagaacagtcttcgaaatcagattaataataatgtctgtgatgtattgagcttttaatatctgtgatatactgagctcttactgtgtgctrgacactctgtggaacacattagacatgtaatattatttattctcaataatcctatgaggtga

SEQ ID NO: 723134 - DNA, 1896 bp, Homo sapiens
gacagaatctcgctctgtcgcccaggctggagtgcagtggcgcaatctcggctcactgcaagctccgcctcccgggttcacgccattctcctgcctcagcctcccgagtagctgggactacaggcccccgccaccatgcccggctaatttttttttttttgtatttttagtatagacggggtttcaccgtgttagccaggatggtctcgatctcctgacctcgtgatcctcccgcctcggcctcccaaagtgctgggattacaggcgtgagccaccgtgcccggccggggcccatctttttgtaccgccacaacccggcaccataatgtgctcatcaaacgtttcctgagcaaagaacctgctttgcaaatgccaaaagggctaacaatgataagatactttcacttccagaattaatctcctctaatgccccagctactctatggaaaaggatgactaccccgccctgccctcttagctgatagggaatcagagaggggaaatgtcttggtccagtcatctagagggaagacacaaggctcttgtctcctgccctgagttctctccacaggtacattgcgccctgcaaaagatgccaacagaaacaacacagattgcaaacgaatgggaaacgtgtaggaacaatgaaagtctgggataacaaataataaacataatgatgcaattgcaacagtcggacagcacgaggtaagtcataggaactcagcggacggagaaaggcacggtggttagcgcgggcttcctggaggacgcggatccggcaagcagcatctgaaccgcattttcgcagccgcgtagacactggcgcccacactctctcacccatgcgcactcgccagcccgcgcgcagccacaccctcggtgcccgggaggcggcggcctgggggacaggacctcacctgtgggctcagagcgccgagggactcggaggagcgccctgcagggatgcctcgagccgcgccctcgccccgcctccagcccctctccggcgctcgcaggagtacgcagccgactgccaggcgcaccggcccgccccgccccgcgctgcactctacttccagggcggcgccctggcaacccaggacgcgaccgccggcgctgcgactatttccggagtcagacttgcctggggctcctttgggctccatacctcgggcggccgctatgcccagggcttggatcctaggaaatgccaggccgtccaccctctcggggcccagaaaggagattgagaagggtctggagcacgggattaagtctaaaaagaaaggtagagcggtgtgatgattaggtccgaatcctgggttcggtctcaatccgctgtttagcctctcctaccccttctacctcggcttccttatctgaagaaatggtgatgttgcgccactgcactccagcctgggcgatagagcgagactccatctcaaataataataataataataacataaaaataaaataatttttttwaaaaagtgtttatctgggccagactcggtggctcacgcctgtaatcccagcactttgggaggcagaggcgggtgggtcgcgaggtcaggagatcgagaccatcctggctaggctgaggcaagagaatcgcttgaacccgggagacagaggttgcagtgagccaagatcgtgccactgcactcaagcctgggcgacagaacaagactccgcctcaaaaaaaaaaaaaaaagacgtttattattctcgttatagacctgtgttacctcgaattctctatacaattattcatttttaatttcatcaatttaaagagttatgcaaacttgtgcaacttgtaagtgacagagtctggctttgaacccaggacacctgaccattcatgctgctgcctctcaggaggggtgg

SEQ ID NO: 723135 - DNA, 1614 bp, Homo sapiens
aggcttatgtctacaattttacttctttgatttgaggccttggcatcagctccttgatctttcctgatctttcttcttcatttaccctgaagtttttactttttttcccacggcttagctcgaaatattttttgagcatctatagggtggcaagctagttttgggggacatagtgttaacaaaaatagacataattcctgcctcctttgcactaaatctggtgagaaaaacagactaaaacaaccatcatggcagccaaacacatgagctaaccaaattgcatgtgttttgaaggaaatatagatgttataatatgatgataatgcaaataaaaagtgttctgaaggaaacacaagggatcgattggataaaaatggcaagctatgtacagtagtcagagaagacaactgaagaggtgacatttggactgaaaggtgtcactcttccctctctattcccacttctctcccagttttcactcattcttctttgtttttgagacagtctcgctctgtcacccaggctggagttcagtggcgtgatcttggctcactgcaacttccacttcccaggttcaagggattcgcctgcctctgcctcccaaatagctgggattacaggcatgccaccacgctcgactaatttttgtatttttagtagagatggggtttcaccacattggccaggctggtctcgaactcctgaactcaagtgatccacccgccttggcctcccaaaataactgggattacaggtatgagccatcgtgtccagcctccactcgttctttaggccttcctttaaacattagttcttccgagaaagctgtcactcaaaagcttctctcgcccagttgggtatgtgtcccaccccatcccactcagatgaatgtaaaattgggtccaatcagggctagtccaacagccctatcccataggtcctccagtcagtttggggtacagagggggaacccagagtcaaatataatccagattcacaaagcagcctattgactgaggtcatggccctcgggcccacagtaagcacaaaaactgcagcccaagggccttcagccagttattcagccattgtctttggctccaaacatgccctctgtatcttgctttacggtgctaaggctaggatggcacaaatcacatgtgctctactgtctggctgcatgctagtatctgcccatagggggcgatagagggagcctgcggggcaggaggacggggagacttcagcatcaggtatccaagtagccagttcattctgtcacagcatttggatctagcttgcagtttccccaacacttacagagccagcctcattgcagcacctcagagacaccagcaccagcctcttttcgttcttttcaaccctggcagtagctgctccccacagttgccacctttgtctagtgttttcatgttctcttttaatgttttccattttctaggcaattctttatatacagttaaccagaggttcacagtgcccttggtgttttggtaatttttttttcccacagatcctaagccaaaaaacatacccaacagtttcatgtattagttgttscaaacaacttaataagtatttgcgtcctaacaa

SEQ ID NO: 723136 - DNA, 2052 bp, Homo sapiens
aaccatcaaaaacatttttagtgcaatatttaacatgagctatacaacccttcctaaatgccaaaggcacacacagacacacacacagacacacacacacacactcacactcacgaagaatacaaatgactagaaccaagcaatgtaaatacattctgctacgtatggtaaacatagcctacaatgtggaagagattagaaaataaacatggaaatgaaatgtttttattaattcgcatcagtacccaccaaaaccaatcagcataatcaaatattataacactgaatgtaaaaaacaatccaaaagtccagagtgatagcaaaaggttttaattgtatagattaaaattaactttggacaaaaattaaaactcaggcagagaatgttttcttctttttgcaacagcagacactagtaaaaacaaaggcacagtaaaaattgagacccaaaatttgcagtgtagagatatgaatataataatagacacaggcagggaggattaataaatgataaaatgtttagaggatgatcattagaatacaggatatttatactcttgaaaaccgctttcccaagtacttcattataagtaaggtgtctctaaaagggacagatctcctagacccctccttaaccaagtaaccagtcctgatatcataatggtgatggacaaactagaccttctctgcccgcagatgggctgaggttggaaactcacagcattgtctctgcagtgttcccggcaaaacgtttaggctgaatttaatcatgaagacattttcagacaacttcagaatgtagatcattgagccagacagctgacctgtcctctataaacaagtccatgtcaccaccatccatgacaacaacaaaaagatgaggaaatatttggggttcaaaataactaaagaaatgcagctacattatctttttackttttttcaaccgaaaatatctcttctcctttttgttgtgtgatttgtggtgatatggactatgtgaaggagacaggtcagttgtcctgctcagtgttctacattctgcagttgtctggtgattacctcctatgaaactcaggttaagcgttttctgcaagaacatggcattgctcatattctgcaccggcagagtcctgggtgacatgctgtctcctgccagcggctcctgactcctgttctctacaggatggaattgagaggagcagggctaaggcctcccaatgctgtttgtccatctagctgtggtcttcctaagtactgacaccaattggaggctgaaggactgtggcttctctaaccaaaggagcctagcgggttaacaattgtcaagagcagttggtggttctgaaatacaatcctcagccaaggatccctcctgtgttacagatggatcagctaaaacaagccaacactgaagacacaaagaatgaggttaggttcattgaaaccagggtaacacctttggatgagctaaacacaaagatgacaatgaccttgagcaggtatagaagctcagagacatgcctgcaaaatgacatccctgaggaattttgtagctacccagagatacgtggttcaaattaaaatgtctgactgatcactcccggcatgtgctgcacagttatgtgaacgtgtcacacctaacgtgggtccattgtcttcagactgagcacaggttgccactggcatggtttgagaataggaatagagccatgcccactgacccatcctatgtctgggcttccaaatggaactgtactttcattcaaatcttcacgtgcctataggtcctgcctgcaggaatgacacctctcggcttagtaagggctgcttattgtgggaatatgactcccatctggaacaccaggtggagacttgtcaccgtcaaagtaaaaaacctattgtccacgtaaagggcgaagctgatatgctcttcctcaaatgagtaaaacacacttctgtagtgctggaatgagtcaggtagttcaaagtacattgacggagtcgaataacatatatccagtgagtcctgcaagacttcaggctcttcca

SEQ ID NO: 723137 - DNA, 635 bp, Homo sapiens
tttcagcatgtactgttttccctggacttggcatctccaggtgtcaacatcaaattaactgtccacaatttctcagactcacctgggacctgttgcctcktggtcctcctttttcacttgatcccaccgatgtcctgcaaataaattcagatgggccctcttacattaagcagttcttccttgcacacagaaacattcctctgtccaatcctaacacagggacatcagtcttgtcagtgtgagaacaggagactttgagagaaatattccagtaggcctgaggtcaagtcttgagaaaactggcttgggttctttcatgagccttgggcaaaattcccctgtgttggaatgttatcttccctatgtgctctgtcctaggtttatgtacacaaatgagcaattttttccccaataaattgtaggcaaatagttctaacacctcataggagagatacttcaatattaggcttttctcattaaatacccagaatttgatagtttatgagattgtggacacagagatttgatgaaagggtgcaatgtaccagctcttgagtcaaaatgaaacttggttctacacagaagcatcagctattatggcttttgtgggtgaaaagtcagccatttatctagaa

SEQ ID NO: 723138 - DNA, 635 bp, Homo sapiens
tttcagcatgtactgttttccctggacttggcatctccaggtgtcaacatcaaattaactgtccacaatttctcagactcacctgggacctgttgcctcgtggtcctcctttttcacttgatcccaccgatgtcctgcaaataaattcagatgggccctcttacattaagcagttcttccttgcacacagaaacattcctctgtccaatcctaacacagggacatcagtcttgtcagtgtgagaacaggagactttgagagaaatattccagtaggcctgaggtcaagtcttgagaaaactggcttgggttctttcatgagccttgggcaaaattcccctgtkttggaatgttatcttccctatgtgctctgtcctaggtttatgtacacaaatgagcaattttttccccaataaattgtaggcaaatagttctaacacctcataggagagatacttcaatattaggcttttctcattaaatacccagaatttgatagtttatgagattgtggacacagagatttgatgaaagggtgcaatgtaccagctcttgagtcaaaatgaaacttggttctacacagaagcatcagctattatggcttttgtgggtgaaaagtcagccatttatctagaa

SEQ ID NO: 723139 - DNA, 635 bp, Homo sapiens
tttcagcatgtactgttttccctggacttggcatctccaggtgtcaacatcaaattaactgtccacaatttctcagactcacctgggacctgttgcctcgtggtcctcctttttcacttgatcccaccgatgtcctgcaaataaattcagatgggccctcttacattaagcagttcttccttgcacacagaaacattcctctgtccaatcctaacacagggacatcagtcttgtcagtgtgagaacaggagactttgagagaaatattccagtaggcctgaggtcaagtcttgagaaaactggcttgggttctttcatgagccttgggcaaaattcccctgtgttggaatgttatcttccctatgtgctctgtcctaggtttatgtacacaaatgagcaattttttccccaataaattgtaggcaaatagttctaacacctcataggagagatacttcaatattargcttttctcattaaatacccagaatttgatagtttatgagattgtggacacagagatttgatgaaagggtgcaatgtaccagctcttgagtcaaaatgaaacttggttctacacagaagcatcagctattatggcttttgtgggtgaaaagtcagccatttatctagaa

SEQ ID NO: 723140 - DNA, 526 bp, Homo sapiens
tggggtctcctatgagctttcaaaaatacttcgatttatagactgttttgaaatatawatatatatatatatatatgacttattagtttccagtacatctggcttattagtttccagcatcaagatgccagtaagttcttatactcatagtttataccatggtttaagcagtattatctcagaagaaccagacacaaaccaattttttctttagaaaataatgacaatcagtatgaatcaaaataatcgaatttgaagtttggatgtttgtcttcaggatctccaacttcttcattattatctcttctccttcagtagcacctattctttcttctagtgctcactaggaaaacattttctaattctatccctccctaaagaaagagtaggtttaaaaaaaagtgaatatggacaggtactcatttacagcaaccttttaacttctatgagttaccaatttaacatacagatagtcccttctttgaaaagtaattataggccataaaaagcagaatgtaaagggagt

SEQ ID NO: 723141 - DNA, 1357 bp, Homo sapiens
tttcctttttagtggctgttgattataggtgaggtaagggatgatcagagagagagactagagctcagattgccctgatagccttcagcttccagatacaatcagatctactcttgacccgtgtctgcttaaaactcattgccatcaggataaagtacacattctttagcagatgaaggctttgcataacctgactctcttcttcagatcagattaggatttttcaacctcagcactactgataatttgggttggcaagttcttcgttgttaagaagctgtccctggcccctacacatgagatgttagcagtacatactcctctccagttgtgacaaaccaaaaatgtcttcagacactgccaagtgtctccgagggagaaaaattcctcttccttgaaaaccactggactagaggagggtcagtcgttgyaaacctcttttatttccaggagtttgcctcaccatctctttcctcccaggttttgcccatgtttctcctctctttaccaggtggatcctactagtcctgcagatgtcagatgttccctttcctgggaacccctttttgaacctcctcagacggtcaggtgccacctctgggcttccgcggcacccccccaccccgccccagctatgatttccctacccctgccctgctcattctgggtggtcactgtgcagtgactgagctgtctttctccccaacaccagactgagggccccaggagggcagagccaggactgtctcagtcaccaccctaatagtgctgtcttcagcactgtcaggctcaggggcaggcacagagcaggtgttcttcaggtgggtaatgaatgcatcgtgaaacatcttgggatgaggtgggattatctgatactcttggtatattcagatgaccagtgaggatgtgctagaaagcctggattcctgtggcccctgtacatccgttatggttttggctacctcctggggcccttaggggatgtccctggaaattgtgagatgagatatgcaggtccaagatcagaaagtgtcttagccatcactgtccacagctaccaccatcgtcccctctacctccatgaaaactagcacagatatggcagtccctgggcccagactcacgccctagaccatctgctcctgctttatccagaggttcagacacagagcccaccgctctgccattcattcctttaactaaggtgttttgagctactgctacacgctaggctctgtgctaatgctggggacacggctatggacaaagaagaccctgctttcttggagcccaggtttctagttgaaggtaggatagggaggtggaagatggacagggacaaacagtataccagaca

SEQ ID NO: 723142 - DNA, 1357 bp, Homo sapiens
tttcctttttagtggctgttgattataggtgaggtaagggatgatcagagagagagactagagctcagattgccctgatagccttcagcttccagatacaatcagatctactcttgacccgtgtctgcttaaaactcattgccatcaggataaagtacacattctttagcagatgaaggctttgcataacctgactctcttcttcagatcagattaggatttttcaacctcagcactactgataatttgggttggcaagttcttcgttgttaagaagctgtccctggcccctacacatgagatgttagcagtacatactcctctccagttgtgacaaaccaaaaatgtcttcagacactgccaagtgtctccgagggagaaaaattcctcttccttgaaaaccactggactagaggagggtcagtcgttgtaaacctcttttatttccaggagtttgcctcaccatctctttyctcccaggttttgcccatgtttctcctctctttaccaggtggatcctactagtcctgcagatgtcagatgttccctttcctgggaacccctttttgaacctcctcagacggtcaggtgccacctctgggcttccgcggcacccccccaccccgccccagctatgatttccctacccctgccctgctcattctgggtggtcactgtgcagtgactgagctgtctttctccccaacaccagactgagggccccaggagggcagagccaggactgtctcagtcaccaccctaatagtgctgtcttcagcactgtcaggctcaggggcaggcacagagcaggtgttcttcaggtgggtaatgaatgcatcgtgaaacatcttgggatgaggtgggattatctgatactcttggtatattcagatgaccagtgaggatgtgctagaaagcctggattcctgtggcccctgtacatccgttatggttttggctacctcctggggcccttaggggatgtccctggaaattgtgagatgagatatgcaggtccaagatcagaaagtgtcttagccatcactgtccacagctaccaccatcgtcccctctacctccatgaaaactagcacagatatggcagtccctgggcccagactcacgccctagaccatctgctcctgctttatccagaggttcagacacagagcccaccgctctgccattcattcctttaactaaggtgttttgagctactgctacacgctaggctctgtgctaatgctggggacacggctatggacaaagaagaccctgctttcttggagcccaggtttctagttgaaggtaggatagggaggtggaagatggacagggacaaacagtataccagaca

SEQ ID NO: 723143 - DNA, 1780 bp, Homo sapiens
gaagtggaaggagtagatggacaggtgggtgagtagatggccacgggtgtgggcagtggatcaaacaatgctgggtagagtgggtgggtgggtgtacaggtaggtaaatggatgatggggtggaaggatgcatgggtgtgtaggcggctggatgggtgcataagtggatggatggatgaatgggggataggcaatgggtcaatggaagggtgggtaagtaagtggttgagtgattggatgtatgtgagtagcagatcaagacatggacaggaagtaggtgggtaaatgggtgcatggaagggagggcagatggatggacaggggagtgggcagtgggtagatggatgaattagcgatcgcatcgacrgatggatggaccagtggacactcaagagctggagaacgggaaagaccaatcagtggtcaatgagcagatgcattaactgaccaaaagcccagccagactttggggtacaaaggggacatgcaccctagggaggggctgatagttgtggcctcagttgaaggctcccatcccaaacctccctggaacctggaagcagccactggcattcctgggtccccaaggaggaaatacttctccgtagctctgccctgccccctcctccctggctccatagactgctccctgcccaggacctgcctccttcccttaggccccttgccttggccaacccaatctgctgggctgagtggagggggcagctgagccctgggactatagcctgaggagcctggttccttcaagacagggaggtaggggatcctgagctctgggcggttggttcacctagcagctccccgtccccagctgggaggcatttgttctgcattctgcacgatgattacagccctgccaaggttaacccctgcactcctgggcacagcctctcaaagggaaggaaggggaccgcaggaaattgggggaggagaaaagcatgataaagggagactgcccaaccctggatccttcttggggatattgaaacttctccctttctcccgttttccagagggaaaaactgagtcagatccttaaatcaggagtggagccaggaacaagggcacagcctacatggagataggtttctatctggaggcaggctgcaaaggagggagagggctcctctctgcctcagcttacccagatgtaaaagggggcaagaattcctgattcacaggttgcctgtcaatgagctggagaagacaaagcgtgtggcatatatagtagggaggttctcaacctcttgttctttcctgcctgccctccctgcccgcgggtgaagaagatggagcaagcatggggcaggttgtaaccacttccatcaggactgcttgctcagtcatctgcctggggctcacaacaccccaactagtaaatacccacactgctattatacccatttcagagatgagaaacttgaggctcaaatgggccaagtgctttgcccacggtcagccactgggccaggatttgagctcagggcctttgacattgcaccagactgcctcctttaccagccgctctagggatcctctgactagagtgacgtgtaattgattgtctaaccaggtcacctttgagaatgaaaggaagtgctattaataattacactggaacagtatgtgtaatctgggctgtcctaggcaaactggaaagtatggccatcctgccaaagtagggagctttacgcaaatcacttcacttatctgcaaaagggacaccatggcaggactttccctatggggctctcacaag

SEQ ID NO: 723144 - DNA, 1780 bp, Homo sapiens
gaagtggaaggagtagatggacaggtgggtgagtagatggccacgggtgtgggcagtggatcaaacaatgctgggtagagtgggtgggtgggtgtacaggtaggtaaatggatgatggggtggaaggatgcatgggtgtgtaggcggctggatgggtgcataagtggatggatggatgaatgggggataggcaatgggtcaatggaagggtgggtaagtaagtggttgagtgattggatgtatgtgagtagcagatcaagacatggacaggaagtaggtgggtaaatgggtgcatggaagggagggcagatggatggacaggggagtgggcagtgggtagatggatgaattagcgatcgcatcgacagatggatggaccagtggacactcaagagctggagaacgggaaagaccaatcagtggtcaatgagcagatgcattaactgaccaaaagcccagccagactttggggtacaaaggggacatgcaccctagggaggggctgatagttgtggcctcagttgaaggctcccatcccaaacctccctggaacctggaagcagccactggcattcctgggtccccaaggaggaaatacttctccgtagctctgccctgccccctcctccctggctccatagactgctccctgcccaggacctgcctccttcccttaggccccttgccttggccaacccaatctgctgggctgagtggagggggcagctgagccctgggactatagcctgaggagcctggttccttcaagacagggaggtaggggatcctgagctctgggcggttggttcacctagcagctccccgtccccagctgggaggcatttgttctgcattctgcacgatgattacagccctgccaaggttaacccctgcactcctgggcacagcctctcaaagggaaggaaggggaccgcaggaaattgggggaggagaaaagcatgataaagggagactgcccaaccctggatccttcttggggatattgaaacttctccctttctcccgttttccagagggaaaaactgagtcagatccttaaatcaggagtggagccaggaacaagggcacagcctacatggagataggtttctatctggaggcaggctgcaaaggagggagagggctcctctctgcctcagcttacccagatgtaaaagggggcaagaattcctgattcacaggttgcctgtcaatgagctggagaagacaaagcgtgtggcatatatagtagggaggttctcaacctcttgttctttcctgcctgccctccctgcccrcgggtgaagaagatggagcaagcatggggcaggttgtaaccacttccatcaggactgcttgctcagtcatctgcctggggctcacaacaccccaactagtaaatacccacactgctattatacccatttcagagatgagaaacttgaggctcaaatgggccaagtgctttgcccacggtcagccactgggccaggatttgagctcagggcctttgacattgcaccagactgcctcctttaccagccgctctagggatcctctgactagagtgacgtgtaattgattgtctaaccaggtcacctttgagaatgaaaggaagtgctattaataattacactggaacagtatgtgtaatctgggctgtcctaggcaaactggaaagtatggccatcctgccaaagtagggagctttacgcaaatcacttcacttatctgcaaaagggacaccatggcaggactttccctatggggctctcacaag

SEQ ID NO: 723145 - DNA, 2108 bp, Homo sapiens
gcctgttttatggtgtaaactggcctgtgaagtgttctgttgtgcttttatatgtttcttaaataaatcttttaaaattgtaaataaacatcttttaaagacttttaaattattttttccagaagtgatagctttgggatttcaacattcaggatgaaggtgtccagaattaagtcttttgggatgataactggctcccctctaaatgccatgctggctacagctctgggtctcatgctgtcctccaccccacaccccggcggcccgaatgtccttcccctcccaacctcctgtgttttgccaaataattcctatgagtcttagaaggacttctaatttttaagatgctccagtggcattgccttctgcaggaagccctccccgagctgcaaaaccctctccgctctcactgcactaggtaatgccaccgcctgtctgggacttgtctgtccccagtgtcccatctcctccagaacactagctctgtcccaaattgcagcccatgagattgcccgaatctgccgctcccgggaaccctgctgtagatcagaaacttccactcagatggagcccccaaaacagaggagaagcttgcccagaaccagcagggtcctgaagctggatcctgaaggaaggcggccagcctccgggcrcccaggttacatgcccctcagctgccagcacccgctctgctctctctctccttggagaacaggtgccctgccctgagggcatggaggtgccacctgggatttctgctccggggcaaagagctctgaggccaaagctgctcagccagctgccttttctcccagattctgctcaggcacagctgccctcaccgtgtctttggtgaaagttgtcagggtaaaaatggagtcacttgtgtttaaaaccctgacaaacagagccagagaaggctacaaagggagggttctcgtgcatgaatgcctgataccaagaactatcataaaagtctctttaaaaaccaccactttgcacaaaggccattgcaaccttacacagaaaaccgctcctggaggacatcggcccagcagctgcctgtccagccttggattggtgccacccttgttcctgattctagcagccaaggatacttatcttaaaatgatgacctaatcctcttcattttcctttaaaaacctttgccttccttgacctccctggacgcacatgcagtttaccacggcacacatatttccacgtagcgcccgttcccaaatgaacctcattttttgtagaaagcctcttccagtttgttaggttgacacgtcacatccacggcagggagccatgcagctcttagggtccccgtgctctcagctcactcactgcagactcgcaacattttacttttcattgcatgttctcactgggaggacctggggtggaccccagtggcgtcaggattggatccatctggaaatccctcaggtgcttggacaagtgggtccccgattctaggagcctaagaagaggacctggcaaggacccagatggtcctcgtcaagatgaggacggggccgcctgtgccttgaaacctgcctggcaagaagtgtccctgctcgtcagggggtggggggagcggggcgagggtgggaaatgtcttgctaggagagagttttttattctttaacttatataagctgtggccacagtgcgctccttcgagacgcagtgttccctgtgcccatactgcaggagcctcagaaggacaataaacttcctgctcattctggaacaggctggtttccatcgtgtcttcctcattaccccatagcctcaagggcccagcaaggctctgtgtgcagcagaaaaggtgcttacagcccccgccttacaggctcagggggcatccaggctcaggtgttatgggtggcatcgggctgcccagcctgcttctttccagaccctggtattggccttgcttatatgtttttacattccttccattcctcagaaatgctactggtgcgaatcaaacctttctgtgaagcaagaaacagagggatttaggattcaagcctaggtcaggcaggctgagcatagctttgatagcagtggaggggctggaagtggaggtgatg

SEQ ID NO: 723146 - DNA, 1256 bp, Homo sapiens
taaatgarctgatatttaaattttagtaaatacatgggaagtacagtaccaggacctacctcccaggatttgatgctgtgaaatgcttaacaattgggaatgggggaattaaggtgtctggtcgcctggggggcgaccgagacaaagaacttcatagagatgtgggctttggggtttttcaggcagccattcagctcaatgctgcctctttcaggaagccctccccttctctccccaggcaagttaagctctgtatgcgtttcctattgtgctgtaacagattctcacaattcagtgatttaagcaaatttcttacttcacagttctgatggtcagcaagagtgtgtcccttctgaggctcttggggagaatccatttccttgccttttctgttttctagaggctgcttcattccttgggtttcggccccacatcactctgtttctgtcctcacgttctctctctttgactctgactttcctgcctttctcttataaggacccttgtgatgacattgggctcagagaatccaggataatcttcctgtctcaagagccttaacttaatcacatctgcaaagtcccttttgctatgtaaggcaatatatctgcaggttttcgggattaggacctggacatttttgggaagcattattctgtctactgaaagctcttcttcttgtgggtttcagttatgcctctgagcctcacactgctgtggtcaccatctgtggccatgcctgcctccagcaccagaccatgcctcaaggacaaggatgttctgcccccaaaacttgccagaacacctgctgtaagctgggtgggacctgtgctaccctggagttacaaggtctgctagtgttagccaggtgcggtggctcacgtctgtaatcccagcactttgggaggccgaggcgggcggatcacgaggtcaagagatcgagaccatcctggccaacatggtgaaaccccctctctactaaaaatataaaaattagatgggcatggtggtgtgtgcctgtagtctcagctactggggaagctgaggcaggagcatcacttgaacctgggaggtggaggttgcagtgagccgagatcacgccatggcactccagcctggtgacagagtgagactcggtctcaaaaagcaagggaaaaaaaaaaaaaagtctgctagtgttgaggtaggaggcgggacttgactctggaggtggggctcagactctggaccacactgaagactagctgaaacaggga

SEQ ID NO: 723147 - DNA, 1256 bp, Homo sapiens
taaatgagctgatatttaaattttagtaaatacatgggaagtacagtaccaggacctacctcccaggatttgatgctgtgaaatgcttaacaattgggaatgggggaattaaggtgtctggtcgcctggggggcgaccgagacaaagaacttcatagagatgtgggctttggggtttttcaggcagccattcagctcaatgctgcctctttcaggaagccctccccttctctccccaggcaagttaagctctgtatgcgtttcctattgtgctgtaacagattctcacaattcagtgatttaagcaaatttcttacttcacagttctgatggtcagcaagagtgtgtcccttctgaggctcttggggagaatccatttccttgccttttctgttttctagaggctgcttcattccttgggtttcggccccacatcactctgtttctgtcctcacgttctctctctttgactctgactttcctgcctttctcttataaggacccttgtgatgacattgggctcagagaatccaggataatcttcctgtctcaagagccttaacttaatcacatctgcaaagtcccttttgctatgtaaggcaatatatctgcaggttttcgggattaggacctggacatttttgggaagcattattctgtctactgaaagctcttcttcttgtgggtttcagttatgcctctgagcctcacactgctgtggtcaccatctgtggccatgcctgcctccagcaccagaccatgcctcaaggacaaggatgttctgcccccaaaacttgccagaacrcctgctgtaagctgggtgggacctgtgctaccctggagttacaaggtctgctagtgttagccaggtgcggtggctcacgtctgtaatcccagcactttgggaggccgaggcgggcggatcacgaggtcaagagatcgagaccatcctggccaacatggtgaaaccccctctctactaaaaatataaaaattagatgggcatggtggtgtgtgcctgtagtctcagctactggggaagctgaggcaggagcatcacttgaacctgggaggtggaggttgcagtgagccgagatcacgccatggcactccagcctggtgacagagtgagactcggtctcaaaaagcaagggaaaaaaaaaaaaaagtctgctagtgttgaggtaggaggcgggacttgactctggaggtggggctcagactctggaccacactgaagactagctgaaacaggga

SEQ ID NO: 723148 - DNA, 1256 bp, Homo sapiens
taaatgagctgatatttaaattttagtaaatacatgggaagtacagtaccaggacctacctcccaggatttgatgctgtgaaatgcttaacaattgggaatgggggaattaaggtgtctggtcgcctggggggcgaccgagacaaagaacttcatagagatgtgggctttggggtttttcaggcagccattcagctcaatgctgcctctttcaggaagccctccccttctctccccaggcaagttaagctctgtatgcgtttcctattgtgctgtaacagattctcacaattcagtgatttaagcaaatttcttacttcacagttctgatggtcagcaagagtgtgtcccttctgaggctcttggggagaatccatttccttgccttttctgttttctagaggctgcttcattccttgggtttcggccccacatcactctgtttctgtcctcacgttctctctctttgactctgactttcctgcctttctcttataaggacccttgtgatgacattgggctcagagaatccaggataatcttcctgtctcaagagccttaacttaatcacatctgcaaagtcccttttgctatgtaaggcaatatatctgcaggttttcgggattaggacctggacatttttgggaagcattattctgtctactgaaagctcttcttcttgtgggtttcagttatgcctctgagcctcacactgctgtggtcaccatctgtggccatgcctgcctccagcaccagaccatgcctcaaggacaaggatgttctgcccccaaaacttgccagaacacctgctgtaagctgggtgggacctgtgctaccctggagttacaaggtctgctagtgttagccaggtgcggtggctcacgtctgtaatcccagcactttgggaggccgaggcgggcggrtcacgaggtcaagagatcgagaccatcctggccaacatggtgaaaccccctctctactaaaaatataaaaattagatgggcatggtggtgtgtgcctgtagtctcagctactggggaagctgaggcaggagcatcacttgaacctgggaggtggaggttgcagtgagccgagatcacgccatggcactccagcctggtgacagagtgagactcggtctcaaaaagcaagggaaaaaaaaaaaaaagtctgctagtgttgaggtaggaggcgggacttgactctggaggtggggctcagactctggaccacactgaagactagctgaaacaggga

SEQ ID NO: 723149 - DNA, 940 bp, Homo sapiens
tgccaggcatcatgtcatgtgctttaatttaatttgaatttgtgtaaagtctccctggaggagggagggggtgtctccacttggggagggctagctgagaagcaggagttcgagaccaaagagtctgagttctaagtcttgaaggctgagcaggtgtttgccaggtaactatggtctggggaacagtggtttgcccctgatcgagggaacagcatgggcagaggtttagaggcgtgaaattgtgctctatacaacggatgtcatctggggtcctttaaacttgacttccacgtgaccctcctggacacccgcagtgtttggtttwacactgagctcagactttcccacatctctaactggtgaaactgtggccctttgcttctgaggctggtgctgtgtcatcgtcatgccagcatctttgtacgcaggatctgccagggcaaaggttgagaggtttgagagcatttggacctgatgactttgttattaagactggaaaaaggaggggaggaacatttggattctgctgacagcagtggtagtccttgtgagtgtaatcaacttgaaataagtgggaacttgtgaggtggcccccgcccaagaacatatcctggctgctagttagagattccctctagatttcagttggttgacagcgagtccaaatgagaaggaaacaatcaaaatgaaagaccacacaaggactgctgaaagtaactcatcaaaggttgtgactgaaaaaacaagttgtgggctgggcgccgtggctcatgcctgtcatccagtgactcaggaagccaagataggaggattgcttgaggccaggagttccagaccagcctgggctgaacatagtgagacccctgtctctaaaacaatgaataaataaaaatttaaaaattagccatggtagctcattgagatatttattttcatttcc

SEQ ID NO: 723150 - DNA, 940 bp, Homo sapiens
tgccaggcatcatgtcatgtgctttaatttaatttgaatttgtgtaaagtctccctggaggagggagggggtgtctccacttggggagggctagctgagaagcaggagttcgagaccaaagagtctgagttctaagtcttgaaggctgagcaggtgtttgccaggtaactatggtctggggaacagtggtttgcccctgatcgagggaacagcatgggcagaggtttagaggcgtgaaattgtgctctatacaacggatgtcatctggggtcctttaaacttgacttccacgtgaccctcctggacacccgcagtgtttggttttacactgagctcagactttcccacatctctaactggtgaaactgtggccctttgcttctgaggctggtgctgtgtcatcgtcatgccagcatctttgtacgcaggatctgccagggcaaaggttgagaggtttgagagcatttggacctgatgactttgttattaagactggaaaaaggaggggaggaacatttggattctgctgacagcagtggtagtccttgtgagtgtaatcaacttgaaataagtgggaacttgtgaggtggcccccgcccaagaacatatcctggctgctagttagagattccctctagatttcagttggttgacagcragtccaaatgagaaggaaacaatcaaaatgaaagaccacacaaggactgctgaaagtaactcatcaaaggttgtgactgaaaaaacaagttgtgggctgggcgccgtggctcatgcctgtcatccagtgactcaggaagccaagataggaggattgcttgaggccaggagttccagaccagcctgggctgaacatagtgagacccctgtctctaaaacaatgaataaataaaaatttaaaaattagccatggtagctcattgagatatttattttcatttcc

SEQ ID NO: 723151 - DNA, 1275 bp, Homo sapiens
tttttttttgtgacagagtcttgctctgtcactcaggctggagtgcagtggcacaatctctgctcactgcaacttccgcctcccaggttcaagcagttgttgtgcctcagcctcctgagtggctgggattacaggtgtgcaccaccacacycagctaattttttttttttttccagtagagacatggtttcactatgttggccaggctggtccggaactcctggcctcaagggatctgctcacctcagcctcccaaagtgctaggattacaagcgtgagccaccatgcctggcctttaatggtatcacttaaattgtacttctgtttcctacatttcctgtaaaccgagactttgctctaacagcttaatgaggtttagcttcagctgctttttggtaggagcactttataggtggtgctgtgtacgtcatagcaggaggcacatgccatttagggtctctgtagtcaggtctctaaagtgggctcagatgtggtgggtgtcagtttctcattgacaatcattgtctaaatcggttattttattagggatcaacttaactaatgttaagacacataatttctatataaggatgaggataaaagtagccgcacttaacccctttcttctgaatagtggcaattaaaaacaaagaatgaggtttattagggagttacaaaatggtgagttttctaaatatacaattccttctgcattgattacttttattcctcagtgggaggatatttagttgcctttaaatatattttaattagaaaggcacgtgttcatggtgcagcctcatgacccttgcctcgtggtgttgcccccatgcgtaacatggctaaaagagattctgcaggtggaattaagatcattgtctgagtgggcttaatccactcacatgtgctctttaaaagcagagcgtttcctcaggccagcagcaaggaggaagtcagaaagatatgaagctcaggaaagattccacactgttgctagctctgcagatggagggcgtgtgggtgctcactaggagctgagagtggccctggctggcagcagcgaggaaacagccacctccatcccaaaccatgaagcacagaattccatccataactggaatgggtttggaggcagattcctactcagatcctctagataagaacccgggctgaccgacaccttgaatttgtcctggtgagaccctaagcagagagcccattggagcccacccacacttctgacctacagaactgtgagatgatacgtgggtgttg

SEQ ID NO: 723152 - DNA, 1275 bp, Homo sapiens
tttttttttgtgacagagtcttgctctgtcactcaggctggagtgcagtggcacaatctctgctcactgcaacttccgcctcccaggttcaagcagttgttgtgcctcagcctcctgagtggctgggattacaggtgtgcaccaccacactcagctaattttttttttttttccagtagagacayggtttcactatgttggccaggctggtccggaactcctggcctcaagggatctgctcacctcagcctcccaaagtgctaggattacaagcgtgagccaccatgcctggcctttaatggtatcacttaaattgtacttctgtttcctacatttcctgtaaaccgagactttgctctaacagcttaatgaggtttagcttcagctgctttttggtaggagcactttataggtggtgctgtgtacgtcatagcaggaggcacatgccatttagggtctctgtagtcaggtctctaaagtgggctcagatgtggtgggtgtcagtttctcattgacaatcattgtctaaatcggttattttattagggatcaacttaactaatgttaagacacataatttctatataaggatgaggataaaagtagccgcacttaacccctttcttctgaatagtggcaattaaaaacaaagaatgaggtttattagggagttacaaaatggtgagttttctaaatatacaattccttctgcattgattacttttattcctcagtgggaggatatttagttgcctttaaatatattttaattagaaaggcacgtgttcatggtgcagcctcatgacccttgcctcgtggtgttgcccccatgcgtaacatggctaaaagagattctgcaggtggaattaagatcattgtctgagtgggcttaatccactcacatgtgctctttaaaagcagagcgtttcctcaggccagcagcaaggaggaagtcagaaagatatgaagctcaggaaagattccacactgttgctagctctgcagatggagggcgtgtgggtgctcactaggagctgagagtggccctggctggcagcagcgaggaaacagccacctccatcccaaaccatgaagcacagaattccatccataactggaatgggtttggaggcagattcctactcagatcctctagataagaacccgggctgaccgacaccttgaatttgtcctggtgagaccctaagcagagagcccattggagcccacccacacttctgacctacagaactgtgagatgatacgtgggtgttg

SEQ ID NO: 723153 - DNA, 1275 bp, Homo sapiens
tttttttttgtgacagagtcttgctctgtcactcaggctggagtgcagtggcacaatctctgctcactgcaacttccgcctcccaggttcaagcagttgttgtgcctcagcctcctgagtggctgggattacaggtgtgcaccaccacactcagctaattttttttttttttccagtagagacatggtttcactatgttggccaggctggtccggaactcctggcctcaagggatctgctcacctcagcctcccaaagtgctaggattacaagcgtgagccaccatgcctggcctttaatggtatcacttaaattgtacttctgtttcctacatttcctgtaaaccgagactttgctctaacagcttaatgaggtttagcttcagctgctttttggtaggagcactttataggtggtgctgtgtacgtcatagcaggaggcacatgccatttagggtctctgtagtcaggtcyctaaagtgggctcagatgtggtgggtgtcagtttctcattgacaatcattgtctaaatcggttattttattagggatcaacttaactaatgttaagacacataatttctatataaggatgaggataaaagtagccgcacttaacccctttcttctgaatagtggcaattaaaaacaaagaatgaggtttattagggagttacaaaatggtgagttttctaaatatacaattccttctgcattgattacttttattcctcagtgggaggatatttagttgcctttaaatatattttaattagaaaggcacgtgttcatggtgcagcctcatgacccttgcctcgtggtgttgcccccatgcgtaacatggctaaaagagattctgcaggtggaattaagatcattgtctgagtgggcttaatccactcacatgtgctctttaaaagcagagcgtttcctcaggccagcagcaaggaggaagtcagaaagatatgaagctcaggaaagattccacactgttgctagctctgcagatggagggcgtgtgggtgctcactaggagctgagagtggccctggctggcagcagcgaggaaacagccacctccatcccaaaccatgaagcacagaattccatccataactggaatgggtttggaggcagattcctactcagatcctctagataagaacccgggctgaccgacaccttgaatttgtcctggtgagaccctaagcagagagcccattggagcccacccacacttctgacctacagaactgtgagatgatacgtgggtgttg

SEQ ID NO: 723154 - DNA, 1275 bp, Homo sapiens
tttttttttgtgacagagtcttgctctgtcactcaggctggagtgcagtggcacaatctctgctcactgcaacttccgcctcccaggttcaagcagttgttgtgcctcagcctcctgagtggctgggattacaggtgtgcaccaccacactcagctaattttttttttttttccagtagagacatggtttcactatgttggccaggctggtccggaactcctggcctcaagggatctgctcacctcagcctcccaaagtgctaggattacaagcgtgagccaccatgcctggcctttaatggtatcacttaaattgtacttctgtttcctacatttcctgtaaaccgagactttgctctaacagcttaatgaggtttagcttcagctgctttttggtaggagcactttataggtggtgctgtgtacgtcatagcaggaggcacatgccatttagggtctctgtagtcaggtctctaaagtgggctcagatgtggtgggtgtcagtttctcattgacaatcattgtctaaatcggttattttattagggatcaacttaactaatgttaagacacataatttctatataaggatgaggataaaagtagccgcacttaacccctttcttctgaatagtggcaattaaaaacaaagaatgaggtttattagggagttacaaaatggtgagttttctaaatatacaattccttctgcattgattacttttattcctcagtgggaggatatttagttgcctttaaatatattttaattagaaaggcacgtgttcatggtgcagccycatgacccttgcctcgtggtgttgcccccatgcgtaacatggctaaaagagattctgcaggtggaattaagatcattgtctgagtgggcttaatccactcacatgtgctctttaaaagcagagcgtttcctcaggccagcagcaaggaggaagtcagaaagatatgaagctcaggaaagattccacactgttgctagctctgcagatggagggcgtgtgggtgctcactaggagctgagagtggccctggctggcagcagcgaggaaacagccacctccatcccaaaccatgaagcacagaattccatccataactggaatgggtttggaggcagattcctactcagatcctctagataagaacccgggctgaccgacaccttgaatttgtcctggtgagaccctaagcagagagcccattggagcccacccacacttctgacctacagaactgtgagatgatacgtgggtgttg

SEQ ID NO: 723155 - DNA, 1265 bp, Homo sapiens
ttaaaatgaggccaagtgaggtggrcaggtccgagccagctgaggactcctcagccacacggcacagctgcctgaggggatgtgtcactcagggagttgctgggacctactgggcccagcgttgccatcagcaccaacagcttcagagagggggacacatgccggggtgactccaaggctgtgggcggcacctgcctcagatagagaacaggcacagagacactactgggggacactactgggacactggccacccccctaccctgtgcctagatcacagcctacacactgcagccctgtgcccctcacacccagcaggttcctgctccagcgcggctcctggactggccccgggtgctggccccgggggtttcaatccaagcataattcagtgaagcatgtgtttggcagcgggacccagctcaccgttttaggtacgtggctctaacttcccagcctgtcccaccctctcctgtctctggaaaaatctgttttctttctctgggtcttcttcccctctggcctccaggccttaggcatgaaaccctccctttctccttggggtctgggggaagtgggctagtctcaggtcaactggcttgaagggcctctacagtgggagcagccgccttcaggttccaacagtgggacacagcctggtcccgggacctgggctgggattgggcggggtcagtgctcctcccctctcccagggcaagtgtctgagtgagggacagaggccggttctgataaggggccctgcagtggccttagagacagtccccgggaccccagggtctaggctgagggctggatgcccatccagcctgggagggccacacagggccctggggacacaggcgtcaccccaaggggagaccaatggagggcacagagagggctctgggtctaggctgcagctctgtggcctgtgctgggtcgtaaggacatggggacatagagggatgggtgagactgggtgaggtcccagagcccagccctcccaggacggtcacgagaaaggagagggtctcttagtgcagagatgtgtctgtccctggagccctatcacctctggggcctggtgtctccattcacaggtcggcctcctgccttcatttgaggaagggcaccttagactcagaaggtgactagcggggagtaaacgggagtgcagagaactccacggctgacaggtgaagtccaggggcatcagaggctgctggggtgggcatgggggctgtggtaccccaacatctgtgtta

SEQ ID NO: 723156 - DNA, 1265 bp, Homo sapiens
ttaaaatgaggccaagtgaggtggacaggtccgagccagctgaggactcctcagccacrcggcacagctgcctgaggggatgtgtcactcagggagttgctgggacctactgggcccagcgttgccatcagcaccaacagcttcagagagggggacacatgccggggtgactccaaggctgtgggcggcacctgcctcagatagagaacaggcacagagacactactgggggacactactgggacactggccacccccctaccctgtgcctagatcacagcctacacactgcagccctgtgcccctcacacccagcaggttcctgctccagcgcggctcctggactggccccgggtgctggccccgggggtttcaatccaagcataattcagtgaagcatgtgtttggcagcgggacccagctcaccgttttaggtacgtggctctaacttcccagcctgtcccaccctctcctgtctctggaaaaatctgttttctttctctgggtcttcttcccctctggcctccaggccttaggcatgaaaccctccctttctccttggggtctgggggaagtgggctagtctcaggtcaactggcttgaagggcctctacagtgggagcagccgccttcaggttccaacagtgggacacagcctggtcccgggacctgggctgggattgggcggggtcagtgctcctcccctctcccagggcaagtgtctgagtgagggacagaggccggttctgataaggggccctgcagtggccttagagacagtccccgggaccccagggtctaggctgagggctggatgcccatccagcctgggagggccacacagggccctggggacacaggcgtcaccccaaggggagaccaatggagggcacagagagggctctgggtctaggctgcagctctgtggcctgtgctgggtcgtaaggacatggggacatagagggatgggtgagactgggtgaggtcccagagcccagccctcccaggacggtcacgagaaaggagagggtctcttagtgcagagatgtgtctgtccctggagccctatcacctctggggcctggtgtctccattcacaggtcggcctcctgccttcatttgaggaagggcaccttagactcagaaggtgactagcggggagtaaacgggagtgcagagaactccacggctgacaggtgaagtccaggggcatcagaggctgctggggtgggcatgggggctgtggtaccccaacatctgtgtta

SEQ ID NO: 723157 - DNA, 1265 bp, Homo sapiens
ttaaaatgaggccaagtgaggtggacaggtccgagccagctgaggactcctcagccacacggcacagctgcctgaggggatgtgtcactcagggagttgctgggacctactgggcccagcgttgccatcagcaccaacagcttcagagagggggacacatgccggggtgactccaaggctgtgggcggcacctgcctcagayagagaacaggcacagagacactactgggggacactactgggacactggccacccccctaccctgtgcctagatcacagcctacacactgcagccctgtgcccctcacacccagcaggttcctgctccagcgcggctcctggactggccccgggtgctggccccgggggtttcaatccaagcataattcagtgaagcatgtgtttggcagcgggacccagctcaccgttttaggtacgtggctctaacttcccagcctgtcccaccctctcctgtctctggaaaaatctgttttctttctctgggtcttcttcccctctggcctccaggccttaggcatgaaaccctccctttctccttggggtctgggggaagtgggctagtctcaggtcaactggcttgaagggcctctacagtgggagcagccgccttcaggttccaacagtgggacacagcctggtcccgggacctgggctgggattgggcggggtcagtgctcctcccctctcccagggcaagtgtctgagtgagggacagaggccggttctgataaggggccctgcagtggccttagagacagtccccgggaccccagggtctaggctgagggctggatgcccatccagcctgggagggccacacagggccctggggacacaggcgtcaccccaaggggagaccaatggagggcacagagagggctctgggtctaggctgcagctctgtggcctgtgctgggtcgtaaggacatggggacatagagggatgggtgagactgggtgaggtcccagagcccagccctcccaggacggtcacgagaaaggagagggtctcttagtgcagagatgtgtctgtccctggagccctatcacctctggggcctggtgtctccattcacaggtcggcctcctgccttcatttgaggaagggcaccttagactcagaaggtgactagcggggagtaaacgggagtgcagagaactccacggctgacaggtgaagtccaggggcatcagaggctgctggggtgggcatgggggctgtggtaccccaacatctgtgtta

SEQ ID NO: 723158 - DNA, 1265 bp, Homo sapiens
ttaaaatgaggccaagtgaggtggacaggtccgagccagctgaggactcctcagccacacggcacagctgcctgaggggatgtgtcactcagggagttgctgggacctactgggcccagcgttgccatcagcaccaacagcttcagagagggggacacatgccggggtgactccaaggctgtgggcggcacctgcctcagatagrgaacaggcacagagacactactgggggacactactgggacactggccacccccctaccctgtgcctagatcacagcctacacactgcagccctgtgcccctcacacccagcaggttcctgctccagcgcggctcctggactggccccgggtgctggccccgggggtttcaatccaagcataattcagtgaagcatgtgtttggcagcgggacccagctcaccgttttaggtacgtggctctaacttcccagcctgtcccaccctctcctgtctctggaaaaatctgttttctttctctgggtcttcttcccctctggcctccaggccttaggcatgaaaccctccctttctccttggggtctgggggaagtgggctagtctcaggtcaactggcttgaagggcctctacagtgggagcagccgccttcaggttccaacagtgggacacagcctggtcccgggacctgggctgggattgggcggggtcagtgctcctcccctctcccagggcaagtgtctgagtgagggacagaggccggttctgataaggggccctgcagtggccttagagacagtccccgggaccccagggtctaggctgagggctggatgcccatccagcctgggagggccacacagggccctggggacacaggcgtcaccccaaggggagaccaatggagggcacagagagggctctgggtctaggctgcagctctgtggcctgtgctgggtcgtaaggacatggggacatagagggatgggtgagactgggtgaggtcccagagcccagccctcccaggacggtcacgagaaaggagagggtctcttagtgcagagatgtgtctgtccctggagccctatcacctctggggcctggtgtctccattcacaggtcggcctcctgccttcatttgaggaagggcaccttagactcagaaggtgactagcggggagtaaacgggagtgcagagaactccacggctgacaggtgaagtccaggggcatcagaggctgctggggtgggcatgggggctgtggtaccccaacatctgtgtta

SEQ ID NO: 723159 - DNA, 1265 bp, Homo sapiens
ttaaaatgaggccaagtgaggtggacaggtccgagccagctgaggactcctcagccacacggcacagctgcctgaggggatgtgtcactcagggagttgctgggacctactgggcccagcgttgccatcagcaccaacagcttcagagagggggacacatgccggggtgactccaaggctgtgggcggcacctgcctcagatagagaacaggcacagagacactactgggggacactactgggacactggccacccccctaccctgtgcctrgatcacagcctacacactgcagccctgtgcccctcacacccagcaggttcctgctccagcgcggctcctggactggccccgggtgctggccccgggggtttcaatccaagcataattcagtgaagcatgtgtttggcagcgggacccagctcaccgttttaggtacgtggctctaacttcccagcctgtcccaccctctcctgtctctggaaaaatctgttttctttctctgggtcttcttcccctctggcctccaggccttaggcatgaaaccctccctttctccttggggtctgggggaagtgggctagtctcaggtcaactggcttgaagggcctctacagtgggagcagccgccttcaggttccaacagtgggacacagcctggtcccgggacctgggctgggattgggcggggtcagtgctcctcccctctcccagggcaagtgtctgagtgagggacagaggccggttctgataaggggccctgcagtggccttagagacagtccccgggaccccagggtctaggctgagggctggatgcccatccagcctgggagggccacacagggccctggggacacaggcgtcaccccaaggggagaccaatggagggcacagagagggctctgggtctaggctgcagctctgtggcctgtgctgggtcgtaaggacatggggacatagagggatgggtgagactgggtgaggtcccagagcccagccctcccaggacggtcacgagaaaggagagggtctcttagtgcagagatgtgtctgtccctggagccctatcacctctggggcctggtgtctccattcacaggtcggcctcctgccttcatttgaggaagggcaccttagactcagaaggtgactagcggggagtaaacgggagtgcagagaactccacggctgacaggtgaagtccaggggcatcagaggctgctggggtgggcatgggggctgtggtaccccaacatctgtgtta

SEQ ID NO: 723160 - DNA, 1265 bp, Homo sapiens
ttaaaatgaggccaagtgaggtggacaggtccgagccagctgaggactcctcagccacacggcacagctgcctgaggggatgtgtcactcagggagttgctgggacctactgggcccagcgttgccatcagcaccaacagcttcagagagggggacacatgccggggtgactccaaggctgtgggcggcacctgcctcagatagagaacaggcacagagacactactgggggacactactgggacactggccacccccctaccctgtgcctagrtcacagcctacacactgcagccctgtgcccctcacacccagcaggttcctgctccagcgcggctcctggactggccccgggtgctggccccgggggtttcaatccaagcataattcagtgaagcatgtgtttggcagcgggacccagctcaccgttttaggtacgtggctctaacttcccagcctgtcccaccctctcctgtctctggaaaaatctgttttctttctctgggtcttcttcccctctggcctccaggccttaggcatgaaaccctccctttctccttggggtctgggggaagtgggctagtctcaggtcaactggcttgaagggcctctacagtgggagcagccgccttcaggttccaacagtgggacacagcctggtcccgggacctgggctgggattgggcggggtcagtgctcctcccctctcccagggcaagtgtctgagtgagggacagaggccggttctgataaggggccctgcagtggccttagagacagtccccgggaccccagggtctaggctgagggctggatgcccatccagcctgggagggccacacagggccctggggacacaggcgtcaccccaaggggagaccaatggagggcacagagagggctctgggtctaggctgcagctctgtggcctgtgctgggtcgtaaggacatggggacatagagggatgggtgagactgggtgaggtcccagagcccagccctcccaggacggtcacgagaaaggagagggtctcttagtgcagagatgtgtctgtccctggagccctatcacctctggggcctggtgtctccattcacaggtcggcctcctgccttcatttgaggaagggcaccttagactcagaaggtgactagcggggagtaaacgggagtgcagagaactccacggctgacaggtgaagtccaggggcatcagaggctgctggggtgggcatgggggctgtggtaccccaacatctgtgtta

SEQ ID NO: 723161 - DNA, 1479 bp, Homo sapiens
atttaaatacattgaaatatttacaattaaaagttcagggccgggcatggtggctcacgcctataatttcagcactttgggaggccggggcgggtggatcatctgaggtcaggagatcgagaccagtctggccaacgtggtgaaaccccgtctctacaaaaattagctgggtgtggtggtgcacacctgtaatcccagctactcgggagactgaggcaggagaatcacctgaacccgggaggcggaggttgcagtgagctgagatcatgtcattgtactccagcctgggcagcaagaatgaaactctgtctcgaaaaaaaaaaaaaaaatttcagaacctcatcacaatagccaccgtgcagtggcccagcagccttatgttaatgaagcggagagatttccatccccgcagaatgctctttcacatctgctgtgagcctggctgagggaccgattgttgaactcctctaactcaaagygtgcacatgaaagtgggaatctcagggctgtgagattggaggtgagacctgtaatgggccagtggaaggaaaaagttgaaaggtggttccttcagtttctctttctcaatcgaaggctggcaagtgtgagcaatgcctttttacagacctctgactccacagagaccacggagagtctgacaacaccgaggaaagggcagagtgatgtgtaacccagtgtggcctcacctgcagtaggaggctgggcgagttgctctctggaataacttcttgcagagtttttgtctcttaatgattggccaatggacaccatccatgagggcagctgcaatgaggcagatctgcaggtagagaatgatactctaggaggatctctgggagcagttgggtgacacctgttggtttggaacctaggaaaagggcaatgaagtcagaaccgaaggaaatatgcgtagaagtctgacttgttccttttgtattttagtaagatagagatgagacaatacatgtccatggactttatgtgctgtgtttgtaaccattttttttcttgctctggtgtttaatggttacctttccacaagaccagtttttcctatgtcacagcaaacatcaaagccctgatttttgattggttagtatcttctgggacttgggaatgcaagagtcttattaggtctgggcactggctaagatgcaaggtatctggtgagactccctcatgctcactacttgaacacagttgtttctctgagatgtctcaatatcttcagtcccacgctccatgtgccgcatccagcaagctccctgagggactcccagtctccaaccaccagcgcactgacattaactgcgtgtccttttaggtccccctgaggaccgcctgagtttaaaacttctaccaccaagtgaggaagacaatgatgacaccaaggtaagactcctttctttgccttctaaggaaatgttgctttcctgatgtcagaagcaaactcaccca

SEQ ID NO: 723162 - DNA, 1783 bp, Homo sapiens
gatttaatgagctactactttggtgagtagagaaagggggaataaaaccccagtgtgtcaggatttttaaaattgaatttctgtttgaaaggatagggagaaaagggcattgcttccctaaaaactgaagcccctccctctcttttttttaatggagtcttgttctcttgcccaggctggagtgcagttgcatgatctccgctccctgcaacctccacctcccaggttcaagagaatctcctgcttcagcctcctgagtagctgggattacaggtgcccaccaccacacccggctaatttttgtatttttagtagagtcgggtttcaccatgttggtcaggctggtcttgaactcccaaccttgtgatccgcccacctcggtctcccaaagtgctgggattacaggcatgagtcaccccgctcggccaaagccctttcttgatcatataaatgactctagtgtcttggtgcttggtgactgctttctgtaccctgckacagatgatgctgcctgtttgtgaaacaggactgatacaactcttctggaaggaactctttcatatctaaatatcaaaactgttaatcattgttattagtaattcgttatttatattttaataacttaagtactacaattaactattcagctatttaccccagtttcccttttttaaatttatttttccaatagcagtgttatttgaacaccaacttcagattttagtctgctttcgacttaggtaattatgaatctataaattcctttttttttttttgagacggagtctcgctctgtcgcccaggctggagtgcagtggcgcgatcttggctcactgcaagctccgcctcctgggttcacgccattctcctgcctcagcctaccgagttgctgggactacaggcgcccaccaccacgcccggctaatttttttgtattttttagtagagacgggatttcatcatgttagccaggatggtctcgatctcctgacctcgtgatgcgcccgcctcagcctcccaaagtgctgggattacaggcttagccaccgcgcgaagctgtgaatctataaattcttatcaagaagcaaatgtgtagaatctgtaatgcttagattttgttattggagctatagaaaatgttacatttgtggtgtcagactctatttagctggtaaggacaaagcaagagctaaggccaattacttgtcatcgtcgtcatcatcatcatcatcatcgtcatcgtcatatttctggagcattcactatttaccaggcactgagccaacattgtatattcatcatagcatttggttctcatagcagctctatgaggtttgtgcccacattatccccattttgcagataaaaaagccaagccccagaaaggttaagtaaattattcaaggtccacagccagtgtgtggcagaaccagattctggaatcaggcagtccaattccgcagtcccaattcctaaccattgtgctgttcagcctaatgaaaggagcgaaagattcaaggtagacaactgtatattgtcaaaggcttgttcaacaccaaggttgcttgtttctaaataatgtttaagtccatgaacagctttttgctaatgtttggagcaactgataaaatacatcaagcaaagaaaagtgtggacacattcatgcacactggagaagtagcagagtggtttaattttgtgttggagaatcaaaggccagaatgaaaggcagtttttacatcccaaaggaaaattcccattcagaaagacattgatggctttt

SEQ ID NO: 723163 - DNA, 1547 bp, Homo sapiens
tttctgaaattaacggatgcttatagcatacccaagaaaagcatttttgcaacaacagaaccttttatctggcttacaggcagctaaaaacatcccaacccatccttcttagctgtctttactgagactaattttcacaaacatcgttttgaaaaggagccgtagtgtgccaaagcaggaagcgcgtgccccggattcaggcacgccgtggggccaggtgtcctcgggaaactggttctctgagcctcactttcttcatctgcaaggtgggctgtgtgaacagagggggctgggtcagaggacctcttattatcttagggctctttggctgaatgcagaatttcttttctttctttcttttttcttttgttttcttttctttttggagacagagtcttgctctgttgcccaggctggagtgcaatggtgtgatctcggctcactacaacctccacctctccggttcaagcaattctcctgccttagcctcccaagtagctgggattacaggtgtatgccaccacactcagctaattttttgtatttttagtagaggtgggatttcgccatgttggccaggcagatctcgaactcctgacatgacctcaggtgatctacctgccttggcctcccaaagtgttgggattacaggcgtgagccactgcacctggccgaacgcaaaatttcaaaagtgtgttcctgcccatctgctaggttcaagttgttactgcctttggggtccggggtctcggaggagtgatcccaaagaatgtcccctctccccagctccaaaatcaagatggcctgagggtcccctcccagcccctcaagcccaggattctgagccaggttctctaccatcccctgcccccagctttccctctctgaacccacctggctccttgcttgccagccccagtgccttcttgctggttctcaaacacatcaagtgggtacagccccgggctttgcacgcagcatgccctcctcccagaatgtgctggccctgattgtccatgtggctccccgctgacttccgtcrgggtcctgctcaaatatctcccctggaagaggccttctctgattctcccacctcacgagcagcccagttattccccatttccttcccctgcttggttttccttcatagtattcatcattatctgctctccgccgtctgactgccccccaccagaataaagcagtggtcttgctcatggctgtttccccagcgcctagaacctggcacatagtaggtactcagaggtattttttgaaggaaggattgaataagcaaatatgcagttcaacaaatatggacccttatttgtctgcttcccccaacaaatgtggagaagattccccaaacttcaccctccccggcccctggttttgcccagtagacacccccagccctggaggctttgcgatgcccgccctgctcacaggttgttaaagctggtgcaggtctcagagatccagctgaggaaagggcagaccaaggcctggagtgggtttagagtccattcatcgagctcaggcaggcg

SEQ ID NO: 723164 - DNA, 1363 bp, Homo sapiens
tgcctccattatcctgtaccgcatattgtatctgttggttgagtagagagagattcatccagagtcatcarcgctccaatagtcctttatcagattaaggacttgagggaaatgtgcattatgctttagtaggcactctaaaagttccttgaattggattcttctttccatacttatgttctgagtactaactttgttttaaacttctgcgccaaaagttggcttttctgaactctgcattttcaaactcttcccttctgttatttgaaaatcagataagtcaactcattgtaagatggataatttctttactcacgccgtgatgaaataatgcgattatagtactctgtacaatggtacatatggtacttgcacatatggtcagttaacaaaaactgccccttctttctttactgtgttagtctcatcctcttaatgttgctgcggttaacattctcgatcttaacttcgcggatctaacacagtgtcctttaaaaaaggcctttatctacatgaattgtatataaatatccacctccgttttcttctagtattgttaatgatcttatttatatttaatgtgagataagaaggctctaactttataattttgttagtgactccatcatcatttgttggaattctatttttccctgctgatcagtcctataaataccataggccctaaattcccgtgtattcttgggactttctgaacggtctagtattctttggctccctgtggtgatcctggcttctgtgatgctcttattgctctaggtttataatgtgttttaatatctagggatttgaacgatgcctggcatattgtagacatcactaaatatttttgaaatgaacacatttagtgggggcaagttgattccctttctttacctcttgcctccctcccccctttaaaattttcctgccagttattgagattcatttattttagcttgctttttccatggtcagttgaatcattaactgttagtaaataaatcccttctgttgctcattcagaacttgcgactagagttgctccttacagttacatagagaagcagcctgattaaaaatctgcatgccttttgactttgcaccgtgtcatagtaactgtagtgtgtctctccccatcacctgtgatttaggatgttctgtacctggtttctaagagaaaaatggttatctaagagataaatggctgtagaagtgttccctgggatatgaggaagatatcctcatatccatttgtattttaccatcacaactggatatctaaaatataataaattttacactggacacttaaaactttattagcccatgaaataaatgtatgcattctttaaaaaagatc

SEQ ID NO: 723165 - DNA, 1363 bp, Homo sapiens
tgcctccattatcctgtaccgcatattgtatctgttggttgagtagagagagattcatccagagtcatcagcgctccaatagtcctttatcagattaaggacttgagggaaatgtgcattatgctytagtaggcactctaaaagttccttgaattggattcttctttccatacttatgttctgagtactaactttgttttaaacttctgcgccaaaagttggcttttctgaactctgcattttcaaactcttcccttctgttatttgaaaatcagataagtcaactcattgtaagatggataatttctttactcacgccgtgatgaaataatgcgattatagtactctgtacaatggtacatatggtacttgcacatatggtcagttaacaaaaactgccccttctttctttactgtgttagtctcatcctcttaatgttgctgcggttaacattctcgatcttaacttcgcggatctaacacagtgtcctttaaaaaaggcctttatctacatgaattgtatataaatatccacctccgttttcttctagtattgttaatgatcttatttatatttaatgtgagataagaaggctctaactttataattttgttagtgactccatcatcatttgttggaattctatttttccctgctgatcagtcctataaataccataggccctaaattcccgtgtattcttgggactttctgaacggtctagtattctttggctccctgtggtgatcctggcttctgtgatgctcttattgctctaggtttataatgtgttttaatatctagggatttgaacgatgcctggcatattgtagacatcactaaatatttttgaaatgaacacatttagtgggggcaagttgattccctttctttacctcttgcctccctcccccctttaaaattttcctgccagttattgagattcatttattttagcttgctttttccatggtcagttgaatcattaactgttagtaaataaatcccttctgttgctcattcagaacttgcgactagagttgctccttacagttacatagagaagcagcctgattaaaaatctgcatgccttttgactttgcaccgtgtcatagtaactgtagtgtgtctctccccatcacctgtgatttaggatgttctgtacctggtttctaagagaaaaatggttatctaagagataaatggctgtagaagtgttccctgggatatgaggaagatatcctcatatccatttgtattttaccatcacaactggatatctaaaatataataaattttacactggacacttaaaactttattagcccatgaaataaatgtatgcattctttaaaaaagatc

SEQ ID NO: 723166 - DNA, 1363 bp, Homo sapiens
tgcctccattatcctgtaccgcatattgtatctgttggttgagtagagagagattcatccagagtcatcagcgctccaatagtcctttatcagattaaggacttgagggaaatgtgcattatgctttagtaggcactctaaaagttccttgaattggattcttctttccatacttatgttctgagtactaactttgttttaaacttctgcgccaaaagttggcttttctgaactctgcattttcaaactcttcccttctgttatttgaaaatcagataagtcaactcattgtaagatggataatttctttactcacgccgtgatgaaataatgcgattatagtactctgtacaatggtacatatggtacttgcacatatggtcagttaacaaaaactgccccttctttctttactgtgttagtctcatcctcttaatgttgctgcggttaacattctcgatcttaacttcgcggatctaacacagtgtcctttaaaaaaggcctttatctacatgaattgtatataaatatccacctccgttttcttctagtattgttaatgatcttatttatatttaatgtgagataagaaggctctaactttataattttgttagtgactccatcatcatttgttggaattctatttttccctgctgatcagtcctataaataccataggccctaaattcccgtgtattcttgggactttctgaacggtctagtattctttggctccctgtggtgatcctggcttctgtgatgctcttattgctctaggtttataatgtgttttaatatctagggatttgaacgatgcctggcatattgtagacatcactaaatatttttgaaatgaacacatttagtgggggcaagttgattccctttctttacctcttgcctccctcccccctttaaaattttcctgccagttattgagattcatttattttagcttgctttttccatggtcagttgaatcattaactgttagtaaataaatcccttctgttgctcattcagaacttgcgactagagttgctccttacagttacatagagaagcagcctgattaaaaatctgcatgccttttgactttgcaccgtgtcatagtaactgtagtgtgtctctccccatcacctgtgatttaggatgttctgtacctggtttctargagaaaaatggttatctaagagataaatggctgtagaagtgttccctgggatatgaggaagatatcctcatatccatttgtattttaccatcacaactggatatctaaaatataataaattttacactggacacttaaaactttattagcccatgaaataaatgtatgcattctttaaaaaagatc

SEQ ID NO: 723167 - DNA, 1303 bp, Homo sapiens
tgattaggcttaattttgaaatctatgttttctacctgaatttacctaaatataaatagtatcaatgaacgctattgttggtatagcctaaggaaataaattttgtcaacagaagtataatttgtgagtaaataattttataaaatgtttctcaaaactgcagatgtagctttatctgctgaccctgagggaaaagaagatggggaagagccaccgggcacatcacaaacatcccccgaagagttcacagatgcaaaacacgagtcactgttcagcctggaaaccaattttctggaagaggaaagtggagacaactcttctttgaaagcctctcaaggtcatagcacagtgtgtgttatttgaattcaccaggtgcttagtatggaatttgtgtactaatacacattgaatctattattggaacaaacagcaataaaaacagtttagtggctagatctagagctgggaaaaataattctaaaaggtattttgtgtttctcagtgtttaggggttggacgggacatttaggagaacaaacaagaatgatggtagggaaggccagcttcccaggcctcacattttcattattggagtcaggggaagatttctgattttctccccaagtagggaaagagaaagaaaaagaggaaaaaatacttcctctacccctcacttgctgttcctttttggagcagtaatttttcagatttgcaagacccaggggtggctaatctgagtggtctttattaccagggagaccctcaaaagccaaaaagccctaccctgtgtctcctgcctcccacagactcttgaccactcctgtgaccaaatggcagtcacgtggtcaagacgtgcctatggcgggctttgatgggttcctgctgtctcaagtccagtttctcagccagtgtctgggtgggcaagtcaggttggtctcgttctgtatcctgattgccttcattgatctcattgccattcttcaacccagctttacctttaaygaaacagaaattttaatcctcatttgactcatttagttctgttggttattttgcaggagaagaagtgacaggtagaatttgtagattttagtacaaactccattctgaaccattaaaacttagaaactttggaggaaacattaggaagcttgactgtcccataatttctgtggttgttttgctcatacagatatattagcatctagaattcttatgtcctgttgttcactcttagatatttaatacaagatgcatttcatttgaaattttactgtttggatgcttggatgggtcatttaac

SEQ ID NO: 723168 - DNA, 1447 bp, Homo sapiens
gctgtaacatttagttaagagatgcagccaaccagccaggcgctgtggctcacgcctgtaatcctagcactttgggaagctgaggtgggtggatcacgaggtcaagagattcagaccatcctgaccaacatgggggaaccccgtctctactaaaaatgcaaaaattagctaggtgtggtggtgcacacctgtagtcccagctacttgggaagctgaggcaggataattgcttgaacctgggaggcagaggttgcagtgagctgagactgtgccactgcactccagcctggcgccagagcgagactccatttcaaaaaaaaagagatgcagctagcctaccaaggattgtgaaggaggtgtctaggggaaaaaacaccctagcctcacctcacgctcttccctccctctgatctctggccagcrtttcacattagctgaacagaggggcaagggagcagataggtatagaccatacaggtcagcttccccatgtacagagcagatggaaaagggtagagagtgttctggagaaatgaatggagtatatccatcaggaaccccaacactcccaaacatacagcttccatggtaagtaatgctgggacatgagacatgtgcctaaaagtgcaggggaaattttcttttcccacctctgaatctaaatggctgggcagcagaacatattggaatctattgagcctgccagccacatggacaaagggctggatttgagcctgctaatgtggctgcacttttcttagaggtccttccaaggctatgctcagtgcaagggagcaggagagacctggctgcatccatgtgcaaaaacaagacaaaacaaaaagggccaaaaaatgtagtctggtttctgacatgaaatgcacccacacttgcaacgtggcttaatatatgtcctggtttctgatcaatcagattaacacccttcagtctcttgtagaaatgagactccttcttcacagtgagatgaagtgaagtaattcctttactcaagggtagagataatattaaagctgagttagaatttgcttggggagaggttaaacctctttctaaatgagactttcttcagaatccaaaggggaagatctcaaaaagtaggtctgagaactgaaaccatctacacccacatagcttattgtcttcattaacatgattttaacattccattctctttatcagcatgactttactattccaagaaactcttgtccgagaagataaatgttgcaagcccatttaaaagtgctgaatttttcaacagatagcatcaaatgactgctactctttaagactgcttggaacccttagttccaaaccccagcttcattgtgttcaccagtctccagctatggcatcacaatccttatccaattcaaataaagtcaccatgctgaagtctcgccttaacctagacttcaaagcccca

SEQ ID NO: 723169 - DNA, 592 bp, Homo sapiens
caactagtagagagaagacctgtatactctttaccaagattgttaccaatatctcagtgttaccagtgttaccaaaatctcagatattgatgacattttacctaatttgctttgcattctctttctttttttgagacaaagtctcgctctgtcagccaggctggagtgccatggcctgatcttggctcactgcaacctccacctcctaggttccagctattctcctgcctcagccttctgtgtagctgagattacaggtgtgccctacaacgcctggctaattttgtatatttttagtagtgatggggtttcaccatgttggtcaggctggccttgaactcctgacctcaaatgatctgcctgcctcagcctcccaaagtgctgggattacaggcataagccactgtgcccagcttgcactctctttctcttctccctgctactcsctatacacacacagttgttttcctgaacacttttaagagtgagttaaatacatcgtggccctttcctccaagtgctttagtgtatgttttccaagaatagggatatcgcttacatcaccacagtatacttatcaacatacgtgaat

SEQ ID NO: 723170 - DNA, 890 bp, Homo sapiens
tgaaatgtagtgttttttttttttaagtggtactattcttgaatttggtggattgaaatttgattttaacctatttagtgtatgtgggaatgatttctattatattaaattgtaaggtatatagtctggtattttattatgattaataatatttatttattgctataaatatactctcatttttaatgaaattgttcctttggaaaagtgtaatattgtacacttaaaaattctttcatatttaacatttttgaagcaaataaaatatgaattggtactctgaaaggagcctcaggttgtcaaattaggactcctgagctaagaatgggttttgcacttttaaaaggttgtaataaaaaaagaagaaaagtgtgttacagagctgaaaatatttactatttggttctttacaggaaagctggctgaccccagtagtcacagcatatttgtgaatagatttaagtatgttttatgtaattcctgaaagtctgtgaaatgtactgtatgactatacttttcttgtgtacatatcatgttactttggtacattttattatataatagattttctttggattagtgcttcaaaataaacagttcttatacaactttttacatggatagtatttataatgaagttttagcgtatttctagtagaaaatatctttaaaaaattaaagtttttttttgcattttgaaacatgcagcgcaaaaactcaaatttcatagattgactttgttcttaacagaaaatctctrtgaaaggaaatttgtgaagtagcaagagaaaaagaaaagcatggtgaagctagtatttcattatacaggtgtgatggcaggcacccagttttctcatttggtcatttaagtgagcctaaacaagttgtca

SEQ ID NO: 723171 - DNA, 473 bp, Homo sapiens
taagacactgtctagacaccaaacaatccagtttctttgcaccattttatccaacattagatgaataaaataccaggcctgcactcctctcactctagggtcaggtctggtctttctatctcttattagcaaataaacagggcaaaaaagatatcttacctcgtaaggggaaaaaaaactttacatatgcagttctggctaaatatatatttagaaaagaaaataaaacctctacaatggaacagtctccttaaaaataaaactaatctacattattaattaggataamcatctaaagtttctgaatttggtttcatttcataatccaggacttcttcaagaaaaataagaaagcagtagttacactacatctgtctgactgaaaaggttcaacaaagatccctctctcaggaaaaagactaattccaattctctcaagaatgttccagctttcccaagaattcagaaaccat

SEQ ID NO: 723172 - DNA, 582 bp, Homo sapiens
ggttattttgctcattagttgatgcagtttcttcctagcctcaatggtctttacaatttggcatgtttttgcagtggctggtactggttgttcctttccatgtttagtgcttccttcaggagctctggtagggcaggcctggtggtgacaaaatctctcagcgtttgtttgtctstaaagtattttatttctccttcatttatgaagcttagtttggctggatatgaaattctgggttgaaaattcttttctttaagaatgtggaatattggtccccactctcttctggcttgcggagtttctgccgagagatcagctgttagtctgatgggcttccctttgtggataaaccgacctttctgtctggaatataacctatcatttattttccagttgttctgcttctggagtggggataatgagaatattcagttacttattgaggtcacttgcaacttaggtaccagggaaagtaagctccaaatatattaatcctccattccttgacctgccctaccccattccccatgtcagagtcatgcatcatagagtatcttttgggtattcagcagtcatgcagtt

SEQ ID NO: 723173 - DNA, 582 bp, Homo sapiens
ggttattttgctcattagttgatgcagtttcttcctagcctcaatggtctttacaatttggcatgtttttgcagtggctggtactggttgttcctttccatgtttagtgcttccttcaggagctctggtagggcaggcctggtggtgacaaaatctctcagcgtttgtttgtctctaaagtattttatttctccttcatttatgaagcttagtttggctggatatgaaattctgggttgaaaattcttttctttaagaatgtggaatattggtccccactctcttctggcttgcggagtttctgccgagagatcagctgttartctgatgggcttccctttgtggataaaccgacctttctgtctggaatataacctatcatttattttccagttgttctgcttctggagtggggataatgagaatattcagttacttattgaggtcacttgcaacttaggtaccagggaaagtaagctccaaatatattaatcctccattccttgacctgccctaccccattccccatgtcagagtcatgcatcatagagtatcttttgggtattcagcagtcatgcagtt

SEQ ID NO: 723174 - DNA, 582 bp, Homo sapiens
ggttattttgctcattagttgatgcagtttcttcctagcctcaatggtctttacaatttggcatgtttttgcagtggctggtactggttgttcctttccatgtttagtgcttccttcaggagctctggtagggcaggcctggtggtgacaaaatctctcagcgtttgtttgtctctaaagtattttatttctccttcatttatgaagcttagtttggctggatatgaaattctgggttgaaaattcttttctttaagaatgtggaatattggtccccactctcttctggcttgcggagtttctgccgagagatcagctgttagtctgatgggcttccctttgtggataamccgacctttctgtctggaatataacctatcatttattttccagttgttctgcttctggagtggggataatgagaatattcagttacttattgaggtcacttgcaacttaggtaccagggaaagtaagctccaaatatattaatcctccattccttgacctgccctaccccattccccatgtcagagtcatgcatcatagagtatcttttgggtattcagcagtcatgcagtt

SEQ ID NO: 723175 - DNA, 1119 bp, Homo sapiens
gcaatcactcctgtgctctaacctcagaccacttagtttcccccacattatttttcttcaggttcaatagcattttttaaatctaacaagcagaagaaaattgaagatagaaaaatggataggaatataaatgtgaacttagattctatctctacatatgtaagaggatgagtgagacaaatatactccaaggaaattcttaaatttctgcttcaaatcaactcctgcaaaatgtagtggctttcaactgaacaatgttagtgtgtttagtatcaccttaaaatgaaatgctcaaatgaatgcaatgagagcagattttagcatggaacctggtcaccccagaatcaagatcctcttttttttttttttttttgatggagtctcactctgtcacccaggctggagtgcagtggcgtgatctcagctcactgcaacctctgcctcctgggttcaagtgattctcctgcctcagcctcccgagtagctgggactataggcacgtgccaccacacctggctaattttttgtatttttagtagagatagggtttcaccacgttggccaggatggtctcgatctcctgacctcgtgatccgcccgcctcagcctcccaaaatgctgtgattacaggcgtgagccaccgcgcccggcctctttcttttttcctctagtaatccactgttttcttttctactccaaactaatgaaacaagaagttattctgaccccaatacctttcgagtctcattggtcattatcaacatataataagaattgtcaattctttgtccactaattcagcaaacttttattgtgtgttacttctctggtgggggttgtgttatgccctggttgtgcagtagtaacaaagcatgtccttgcctataagctggtcagagttcagattggaagaccttcaaatagacaggcaaytaaaatgtggagtaacaagtgctgtggccagaggtgtacaagctgcacaagagggatgagtgagaaggatgggaagccatggaaggatgtctgagctgcaccaaggctcagcctttgccatttttaattgtaagctctgcaacagcaggactatatcatttcatcagtgtgtgctcagtacctagc

SEQ ID NO: 723176 - DNA, 651 bp, Homo sapiens
cctcaattttaagaaatgcatttcccactgcctccatactttaacttttctgaagtgaagatgtatcttatagtcaatgtgtatgtttgatggtacatttctccccattacccaaagatatcgaattgatgttatgtcttatagtccatggtgtcttagaatttaggaaatatggtatttccattttggtctggggagtctgggaattcccaagtctctttcagaaagtctatgaggtcaaaactatttttcaaataatattatgtgcattttgtactttatcatgtgtgtacagtggggctttccagaggctacctcaggctagtgtatcttcagttttaaaaaaaatcacacttttattttctaataaggtaaatattcataggataaaaccaacaaaagaatagctcgytggggcccccaacaatttttagaaatgcaaatgggtcctgagaccaaaatgcttgagaatggttatcctagaggaaagaaacagtgaaagacaccactctattatataagggtttccttgaagctcattaagaaaaaagcatatattcctcctaagatagttcctggggccataagtcctgtccaaaagcatactgaaggagtggctgaaaatcttcacttcctctagagacccaatgc

SEQ ID NO: 723177 - DNA, 1175 bp, Homo sapiens
cagatctgtcttgtcagacattaaccaggccttcagcaaatactcatagaagctgtctccaagtcctccaactgatacatgatctggaaagagagggaaatgaattttagagtgattcagcttttaattcagataatgcagcaaaatcacattagcaactaggatgcaaccctatgtcaactgcaagtcactgttacatttaaattccaacaaatctcttattttcagaaagatattctgaaatgagcagatgggctattaactaatgtaacatactctaaataattaccagagtagttttgtaaacatggaagataaaagatatgtaattacccctaattctaaaaatctggttctctagtgaaaaacacccaactaaaatgttcacagtatatatttaaatacatttttatttgctttagttctgaataatataaaattctggcaaagctatgagtattagcaaatcttttttagaaggtggtttgtaataaataaaacaagaagctcctcaggttcttgccattattattatttctaaactcactctgtcacccaggctggagtgcagaggcacgatgatagctcactataacctcgaactcccgagctcaagtgatcctcctgcttcagcctcccaagtggctgggactacaggcacgcatcaccacgccaggctcatttttaaattttttgtagagacggcatcttgctatgttgcctcagctgatatacaactcctggcctcaagcaatcctcccacctgggcctctcacagaagagggattacaggcatgaaccactgtgctcagcctattattatttgataaattttctagtgctatgaatctgaagggtcaaatacctatgggacaggggcagtcagaaaggatatggggcagaagaagaagtttttcctcctaatactccattcctatagtccaccttcactgccatttatcatgccagatccactacaygtattatcaacaatctcacaactgtaggataggtatcttcattttttttcttttttttttttgagacggagtcttgctctgtcaccaggctggagtgcaatggtgcgatctcggctcatggcaacctccgcctcccaggttcaagctattctcctgcctcagcctcccgagtagctgggattacaggagcccacc

SEQ ID NO: 723178 - DNA, 1175 bp, Homo sapiens
cagatctgtcttgtcagacattaaccaggccttcagcaaatactcatagaagctgtctccaagtcctccaactgatacatgatctggaaagagagggaaatgaattttagagtgattcagcttttaattcagataatgcagcaaaatcacattagcaactaggatgcaaccctatgtcaactgcaagtcactgttacatttaaattccaacaaatctcttattttcagaaagatattctgaaatgagcagatgggctattaactaatgtaacatactctaaataattaccagagtagttttgtaaacatggaagataaaagatatgtaattacccctaattctaaaaatctggttctctagtgaaaaacacccaactaaaatgttcacagtatatatttaaatacatttttatttgctttagttctgaataatataaaattctggcaaagctatgagtattagcaaatcttttttagaaggtggtttgtaataaataaaacaagaagctcctcaggttcttgccattattattatttctaaactcactctgtcacccaggctggagtgcagaggcacgatgatagctcactataacctcgaactcccgagctcaagtgatcctcctgcttcagcctcccaagtggctgggactacaggcacgcatcaccacgccaggctcatttttaaattttttgtagagacggcatcttgctatgttgcctcagctgatatacaactcctggcctcaagcaatcctcccacctgggcctctcacagaagagggattacaggcatgaaccactgtgctcagcctattattatttgataaattttctagtgctatgaatctgaagggtcaaatacctatgggacaggggcagtcagaaaggatatggggcagaagaagaagtttttcctcctaatactccattcctatagtccaccttcactgccatttatcatgccagatccactacacgtattatyaacaatctcacaactgtaggataggtatcttcattttttttcttttttttttttgagacggagtcttgctctgtcaccaggctggagtgcaatggtgcgatctcggctcatggcaacctccgcctcccaggttcaagctattctcctgcctcagcctcccgagtagctgggattacaggagcccacc

SEQ ID NO: 723179 - DNA, 1175 bp, Homo sapiens
cagatctgtcttgtcagacattaaccaggccttcagcaaatactcatagaagctgtctccaagtcctccaactgatacatgatctggaaagagagggaaatgaattttagagtgattcagcttttaattcagataatgcagcaaaatcacattagcaactaggatgcaaccctatgtcaactgcaagtcactgttacatttaaattccaacaaatctcttattttcagaaagatattctgaaatgagcagatgggctattaactaatgtaacatactctaaataattaccagagtagttttgtaaacatggaagataaaagatatgtaattacccctaattctaaaaatctggttctctagtgaaaaacacccaactaaaatgttcacagtatatatttaaatacatttttatttgctttagttctgaataatataaaattctggcaaagctatgagtattagcaaatcttttttagaaggtggtttgtaataaataaaacaagaagctcctcaggttcttgccattattattatttctaaactcactctgtcacccaggctggagtgcagaggcacgatgatagctcactataacctcgaactcccgagctcaagtgatcctcctgcttcagcctcccaagtggctgggactacaggcacgcatcaccacgccaggctcatttttaaattttttgtagagacggcatcttgctatgttgcctcagctgatatacaactcctggcctcaagcaatcctcccacctgggcctctcacagaagagggattacaggcatgaaccactgtgctcagcctattattatttgataaattttctagtgctatgaatctgaagggtcaaatacctatgggacaggggcagtcagaaaggatatggggcagaagaagaagtttttcctcctaatactccattcctatagtccaccttcactgccatttatcatgccagatccactacacgtattatcaacaatctcacaactgtaggataggtatcttcattttttttcttttttttttttgagacggagtcttgctctgtcaccaggctggagtgcaatggtgcgatctcggctcatggcaacctccgcctcccaggttcaagckattctcctgcctcagcctcccgagtagctgggattacaggagcccacc

SEQ ID NO: 723180 - DNA, 2537 bp, Homo sapiens
cccaccttatagagttttagtgggatcaaatggaataatacacatgaaaatgctttgaaactacagggattagtccagcaaaacatttttatctttttggattaagcaactgacatttagctaaccaaaagagatctgtttttgtttttttttcccttcaattttagacatctactcaaaaaaaaaaaaattcaccaaatgttcacttggagatagaattgtaacacaagtagtaatgaaacaatgtaaggtattcccaaaatttaaaagtgtaacaaattgctactgttaacagccaactttcttaaagcaatgtaattgctacacaactaccaaatatgtagtattttaagaaagctcttacatgtcatacgtcttctagaaaaaggtaataaaagtatttctaatagtaagagacagccacagacatcaatgacacattatacaacttagtaagaaaagctaggaaaatcttgtctggtgatttttttttttttcctcaaaggaatatcttgcaggtggctaagtaatcaactatgagttcttacagaatcatcatttaaaaaatccatacacttttgaatatccacatgcacaggaaattaataaaagttgttctctttattccatcataagaggamttttaccacaatcttcattttagaatgattttcaaaagactaccatagaaatctttcttctgccaaaacttgttcattacgacaactactttactatggacaatatataaggtttgtaaaggacatcatgatatttggagttgctgatccaatcaccagtgaacccactggtaaaatgaaatagaaaatttaaagcttaattccaagaggtaaaaacttgataacacaggaatttattttacttggtgagtttaaagatacattgattaaattttaatttaattaaacattactttcacgtagtatccttttatatgtaaaatggtttaagtttccttctctttagaatgacttgtaaacaaataaggcaatgcatataaccaatgttaaacttctagcccttcatacttattggtaatccacattaaaaaaataaacaggcaccttctttaaatgaggacactacaagtaagagttgtttatgtaattcaattaatcaccacaacaacctcgtagatggtaggatattactgtttagcaaaggaaactgggtctctacaaggttaagtgacttgctccagttattaagtggcaagggtgggtgggtttccacaccaggtctgactagtttaacaatgtgtgctctgcttttttcagatactacaggatgtcatttttcatataaatacttctatataggttagcagttaaattagccaatttcctgagccaaggagagcaaaggaaatttattagcactgaaaattgagatatcaccaatctatatttatttgaaacaacacggcattaaaaaaacccaatatgtacaaaactgactcataatatacttttttctttaaaagtccccagtgaaaacatgttataaaaagacaataaaagaaaaacaatgctgacatgttgtaacaaagaaaaagaagtccaattttttaatacccccgaagcaaattctaaatgtattatcagcaggtcaacaacagttacaagcccagtgctttagcattatctgaaaaaatttctgagcataaaataaatttttctatttttttaggctccaatctttaatgacaatattctctctttcaatatgtaatttttattagataataaaatgtttcaaaatattaaaaagcataaaaaagtaaccacaaattttacttccaattcctgccccatccacacttttcctattccctctccacagataaccactgttacttgtttcttcaatcgcattttaaagataatttttgcatatactgacaaatatgaatagatatcttcctcatgttacctaatactagcaaactaaacacatattcttgttttgtgtctagaatattcagagacccattttcttttcttttttttttttttttcgagacagagtctcatttctgtcacccaggctggattgcagtggcacaatcttggctcactgcaacctctgcctcctgggttcaagcaattctcatgccgtagcctccccaatacaaaaaaatacaggtaatttttgtatttttagtagagacagggtttcaccatgttggccaggctggtctcaaactcctgacctcaagtaatctacccaccttggcctcccaaagtgttgggattataggtgtgagccactgcgcccggcctcagagacctattttccaaaactttatttttaatgaaaaatgtcaaatatatgaaaaagtaacagcaagagtgagataaacacttaaatttactcatatacccaccacttagatttaacaaatattagtaattattttgttgtagtgccttcacctatctatataaagcataatattctttctccatattaatatacttttgggaaattattttgaagaagtcacagatatcaat

SEQ ID NO: 723181 - DNA, 612 bp, Homo sapiens
taatgtgaattttgcagtctacctatctgagtttgttttaaaataaaagtaacttcccttttaaatctttaggattgcattccagtatgccccatgtattcagtggcttctagtacacagtcttacatcagtggcagtttaagaagtacatcccgtcttttatttaaattccatgtacctattagttaatgtcaactgataagcaagaggagattggaagtttttggttaagaccaaccaataaaaaaatcagaattggagaaattgttctttcattttgatttacttatagcaatgaccacttaatcaaagaacacactraaccagattcatctaaattgaattcatataaattgaataaaatacatggtatgcctaaatttacacctaaaatcaagagatgagtattacaaatcatgaaaaaattatgcctcagtactaatctctattattgtcttgggtgtttgagattgataacttccaccttagatctatcccttttccatatgtttttgtctactcatttactatacatgtatgtaaatttacgagataaagtgacaaagactgctaacatgaaaaagagagtctaatatataaattattttgtat

SEQ ID NO: 723182 - DNA, 1777 bp, Homo sapiens
taatacagcatatatccaaaagagataactgaggagaacagcaaatcttccyatatgcttgttgctttttatcattatcaatatccacacaacaccagcctagcaaaaccctgacaggatgatgtcctcaatgatgtacagcaggagagaaaacccattctccagcaaggacaaataacccacagggaagggggagcacaaaggcataaagggcagctttctgtcgtctgaaaggcgatttgttttagaggaacaggaggattttattgttcacctgatgtctttcattaagaacaggaaactacacttctctgaatggttcaactccccattactccatggagtgctgcgggggccctacccaggggcaggtgagaagagtaacacccagagtaggtgggaaagagccagatagggccaaaggcaggagagctagggaaacagagcaaagtcatttgggaacaacgctgaacccagagttcagataactgattctacaacaatttttagtggcaggtgctttctgatgcacatggcccctcaaaagctcacagagcactgcagagctcctcaaggactgtactgggtagcagccatttaagtttgaatcactggagttcctgcccactgggagtgggggagatgcctagggcggggaggctgccagggccagggaaacagaaataaaaccggcccagcaagacagatgtggtgcggagggcccaccgtgcccagagacaccactaggggagagaagcgcaactgaaacccaggagcagccaggcgcggcaggtcacgtctgcaatctcagcaccttgggaggctaaggagcagattgcttgagcccaggagctcgagaccagcctggccaacatggcgaaaccccgtatctactaaaaatacaaaaattagccaggcacggtggtgcacacccatggttccagctactcggcaggctgaagtaggcagatcacctgagcccaggagacagaggctgcagtgagcagagatcatgcccctgcactccagcctgggcaacagagcaagaccctgtctcaaaaacaaacaaacaaaaaacacgaaaaccaggagcttctgcatgaagcagtatggcttggctattcccgggacagaatgtaaagccaggaggagcagcacctggcccgccatgtagctacaagacagggagggctctaactcacatagcttcaccttgagggacagggccagaggctggtccacctggcacaatggaggaagcagcaacatccttcatcccagaacagcagagcaaagcctgcggggatcctaacaggtggggtgggaagggggctggctgttcgacaggcagaccacaaattccggagaaacacgggtcacactagatatgaattacacacttctgctgccgaatggtggtggggaagcacagaaaggattggaatttccatccttacagttcccaccccagtgacccaggagagtgagggctcaggaatatggtgggggaggggtggtgtttcaatctttgagagttcctgacccaccttcagggcctagggacgtccttatttgccccaagggttccttttcaaactctaagggaagcacttttcttcacagagacctgctccactactgaaaagccttttttttttttttttttttttgacagagtctcactctgtcacccaggctggagtgcagtgaggtgatctcggctcactgctaactccacctcctgggttcaagtgattctcctgcctcagcctcccga

SEQ ID NO: 723183 - DNA, 1777 bp, Homo sapiens
taatacagcatatatccaaaagagataactgaggagaacagcaaatcttcctatatgcttgttgctttttatcattatcaatatccacacaacaccagcctagcaaaaccctgacaggatgatgtcctcaatgatgtacagcaggagagaaaacccattctccagcaaggacaaataacccacagggaakggggagcacaaaggcataaagggcagctttctgtcgtctgaaaggcgatttgttttagaggaacaggaggattttattgttcacctgatgtctttcattaagaacaggaaactacacttctctgaatggttcaactccccattactccatggagtgctgcgggggccctacccaggggcaggtgagaagagtaacacccagagtaggtgggaaagagccagatagggccaaaggcaggagagctagggaaacagagcaaagtcatttgggaacaacgctgaacccagagttcagataactgattctacaacaatttttagtggcaggtgctttctgatgcacatggcccctcaaaagctcacagagcactgcagagctcctcaaggactgtactgggtagcagccatttaagtttgaatcactggagttcctgcccactgggagtgggggagatgcctagggcggggaggctgccagggccagggaaacagaaataaaaccggcccagcaagacagatgtggtgcggagggcccaccgtgcccagagacaccactaggggagagaagcgcaactgaaacccaggagcagccaggcgcggcaggtcacgtctgcaatctcagcaccttgggaggctaaggagcagattgcttgagcccaggagctcgagaccagcctggccaacatggcgaaaccccgtatctactaaaaatacaaaaattagccaggcacggtggtgcacacccatggttccagctactcggcaggctgaagtaggcagatcacctgagcccaggagacagaggctgcagtgagcagagatcatgcccctgcactccagcctgggcaacagagcaagaccctgtctcaaaaacaaacaaacaaaaaacacgaaaaccaggagcttctgcatgaagcagtatggcttggctattcccgggacagaatgtaaagccaggaggagcagcacctggcccgccatgtagctacaagacagggagggctctaactcacatagcttcaccttgagggacagggccagaggctggtccacctggcacaatggaggaagcagcaacatccttcatcccagaacagcagagcaaagcctgcggggatcctaacaggtggggtgggaagggggctggctgttcgacaggcagaccacaaattccggagaaacacgggtcacactagatatgaattacacacttctgctgccgaatggtggtggggaagcacagaaaggattggaatttccatccttacagttcccaccccagtgacccaggagagtgagggctcaggaatatggtgggggaggggtggtgtttcaatctttgagagttcctgacccaccttcagggcctagggacgtccttatttgccccaagggttccttttcaaactctaagggaagcacttttcttcacagagacctgctccactactgaaaagccttttttttttttttttttttttgacagagtctcactctgtcacccaggctggagtgcagtgaggtgatctcggctcactgctaactccacctcctgggttcaagtgattctcctgcctcagcctcccga

SEQ ID NO: 723184 - DNA, 1777 bp, Homo sapiens
taatacagcatatatccaaaagagataactgaggagaacagcaaatcttcctatatgcttgttgctttttatcattatcaatatccacacaacaccagcctagcaaaaccctgacaggatgatgtcctcaatgatgtacagcaggagagaaaacccattctccagcaaggacaaataacccacagggaagggggagcacaaaggcataaagggcagcttyctgtcgtctgaaaggcgatttgttttagaggaacaggaggattttattgttcacctgatgtctttcattaagaacaggaaactacacttctctgaatggttcaactccccattactccatggagtgctgcgggggccctacccaggggcaggtgagaagagtaacacccagagtaggtgggaaagagccagatagggccaaaggcaggagagctagggaaacagagcaaagtcatttgggaacaacgctgaacccagagttcagataactgattctacaacaatttttagtggcaggtgctttctgatgcacatggcccctcaaaagctcacagagcactgcagagctcctcaaggactgtactgggtagcagccatttaagtttgaatcactggagttcctgcccactgggagtgggggagatgcctagggcggggaggctgccagggccagggaaacagaaataaaaccggcccagcaagacagatgtggtgcggagggcccaccgtgcccagagacaccactaggggagagaagcgcaactgaaacccaggagcagccaggcgcggcaggtcacgtctgcaatctcagcaccttgggaggctaaggagcagattgcttgagcccaggagctcgagaccagcctggccaacatggcgaaaccccgtatctactaaaaatacaaaaattagccaggcacggtggtgcacacccatggttccagctactcggcaggctgaagtaggcagatcacctgagcccaggagacagaggctgcagtgagcagagatcatgcccctgcactccagcctgggcaacagagcaagaccctgtctcaaaaacaaacaaacaaaaaacacgaaaaccaggagcttctgcatgaagcagtatggcttggctattcccgggacagaatgtaaagccaggaggagcagcacctggcccgccatgtagctacaagacagggagggctctaactcacatagcttcaccttgagggacagggccagaggctggtccacctggcacaatggaggaagcagcaacatccttcatcccagaacagcagagcaaagcctgcggggatcctaacaggtggggtgggaagggggctggctgttcgacaggcagaccacaaattccggagaaacacgggtcacactagatatgaattacacacttctgctgccgaatggtggtggggaagcacagaaaggattggaatttccatccttacagttcccaccccagtgacccaggagagtgagggctcaggaatatggtgggggaggggtggtgtttcaatctttgagagttcctgacccaccttcagggcctagggacgtccttatttgccccaagggttccttttcaaactctaagggaagcacttttcttcacagagacctgctccactactgaaaagccttttttttttttttttttttttgacagagtctcactctgtcacccaggctggagtgcagtgaggtgatctcggctcactgctaactccacctcctgggttcaagtgattctcctgcctcagcctcccga

SEQ ID NO: 723185 - DNA, 1658 bp, Homo sapiens
ggcattctatatgaaggaatagctttcctttttcctgtgtgtgtgtgtgtgtgtacgtgtgggtatcaggtattatttatctatgtgtctacctatatatcataatatggtcttatgcattattatttcattctgtcattattttgatgctgaaatggtcactgttttggctagagaggaccccttccagttggctcatatatcttttttatatgtctccatacttcttaaggccaagatgggcagatcacaaggtcaggaggtccacaccatcctggctaacacggtgaaaccccatctctattaaaaatacaaaaaaattagctgggcgtgttggcgggcgcctgtagtcccagctactcgggaggctaaggcaggagaatggtgtgaacccgggaggcggagcttggtgccactgcactccagcctgggcaacagagcgagactccgtctcaaaaaaaaaaaaaagaatttcttactgttggcaaactgagacgatcttaacatatctgacacttttctttgggaggaatagataactttgtttatcttaggtcaaatgacaaaaactttgaataaagtactggggtttcctaatgaacaattcactagaaatgcatggaatagataacaccaaggcatggtaatattgttgacaaatatttatttagttataacatcacatttctttacccactcaggaaatggaaagtttttgtattgtgcttgagagtgaggcaatggtgaagaacagtgactggctatgggtttggggagtcatttggcaggagtgtaaatccttgaaatttgaaaatctttcaaattatcttgattctcctcaacaaaatactagcaaaccaaatcgaacagcacataaaaacctaatttcttagctttttgatgaaatagctgtttcctcaccttttctatcgtctagaggtaacctacattccttggctcatggcccattcctctatatttaaagtcagcagyggagtatcttccctttgacttctggcctccctcttatatggacacgtgtgattgtgtcagctcacttgcctaatccaggataatatccccatctcaagattctgaatttcatcacatctataaagtccttttgccatgtaaagtaacgtataatcacaggctccacagattagggtgtgatcatttgcatcccagggaaaaagcctaccatgatcccttgtgtcccagggataaagcccacgatgatcaagtaggctttatccctgataggaaaggttggttcaacatatgcaaatcaatacatgtgattcatcacataaacagaaatgaaaacaaaaaccacatgattatctcaatacacgcagaaaaggctttcaataaaattcaacatcccttcatgttaaaaaccctcaattaactaggcattgaaggaacatacttcaaaacaataagagcaatctgtaaaaaacccacagccaacatcatactgaatgggcaaaagctggaagcattccccttgaaaactggcacaagacatggatgccctctctcaccactcctattcaacatagtactggaagtcctggccagagcaatcaggcaagagaaagaaatgaaaggcatccaaatagaaagagaagaagttaaactattcttggtagcaa

SEQ ID NO: 723186 - DNA, 1178 bp, Homo sapiens
tcagatttctaatgcaattttagaaactttgcagcctgtggataccacagactcaactggattcaaccatgcattagtcctcctccccaaacatccttcagagttacacatttccagcaagtaatgctttkaaattcattttgttttcttaaccaccaggcctgcaggagatcaaggctaagggcaaggagcggaagggagacacacaagatgctcaagtctttaaaaatccccattgggagaatcacgctacaaatggacaaatcacatcctgaaacggtggactctctgaagaccttacaaaacagccttcaggcctgatctgtctcctttcccagcttgaactgtgttttcctaaagtggtttcactttcctccttctccaaaaggtggcatcagaaaggagggagcaggaaggcacaggccaaacgctcatctcaatggctgcctcagccatgctctgacaagtgagctgatgggaaaattgctcctaattaaatcacttcattaaaaagagaccattttccaagcgaatgcactccgcagttctcgtggtgggtaatttgttgtgttaataagctggagaggttgaattccaaggttgcagccgctgacagcctgcagaaatagggaccatattttggcaatgcccttgccctgtcgagggtaccgaggaaagctgacaaatggcagttccttataatagttttgctcactggagacctgaggggctgagaatgatgttttctagtctgtaggtttaggatgccaacaagataaaacaaatacccagaaaaaggcgctgtgtcttttgttcgctgaaaaataaacaggggaggacttcccttttgtagatcccactgtgatagaggaagagggtgcttcttcagctgtatttgaaccgaagcatggaaaattgccatctgcattcaactctgtggttttagggcagctggataggcagtgctgcacagtctgaggctgtggacgttgaagttagaccaagtgtcagttccaatcctaatacttaccagctgtgacaccttgaacatgcatggtaatctctctaagcctcattttcctcatctgtcaagacagtcataatacctacctcttgggatggtggtaaagagtaaagaaggtaatatttgtagagtgcatagtgtctggcaataggaa

SEQ ID NO: 723187 - DNA, 758 bp, Homo sapiens
tggagggggagggttttgggaggagggaggatactactccacctccacccctaggcatggcagagccagctcagcatcttggttcagaaaaattccacttgctgtataatcttgagcagaggccagaagacctgctccagtggactcctggactcatccaggcctgccatgcagggtgttcaggctttctgagctctggactccaaggaaccttacaggaaccttgtgggtgattttccttccctgggaactccaagctctggggtgggaggggtataaattggaggccacaggcctgtaaccccagcattttgggaggccgagggaggtagatcaactgaggtcaggagttcgagatcagcctggccaacatggtgaaaccccgtctctactaaaaatacamaaattagccaggcgtgttggcaggcacctgtaatcccagctacttgggaggttgaggcaggagaatcacttgaacctgggaggcagaagtgacagtgagccgagatcacaccactgtactccagcctgggtgacagagtgagactctgtctcaaaaaaaaaaaaaaaaaaattagctaggtgtgagggtgcatgcttgtaaattccagctacttgggaggctgaggtgggaggatcgcttcagcccaggagatggaggctgcagtgagtcatgaccatgtcagtgttccccagactggatgagaccatgtctcaaaaaaaaaaaaaaaaacaaaggatcaatgctagccccattt

SEQ ID NO: 723188 - DNA, 1237 bp, Homo sapiens
ttacaaataatactctcaagaacatgaaaaaacattccccagaatgggagaagatgtttgcaaatcatatatctgaaaagagactcatatctagtatatacaaagaactcgtacaactcagtattaagacaaacctaattttaaaatgggcaaagtgtttgaatagatatttctccagagaaaatatacaaatgagcaataaataaaagatggcccacatcattaatcattagggaatacaaatcagaagccacagtgtggtaccgcttcacatccacaaggatggctactatcaaaaagatgaacaataacaacttaacagttacaaatgctggcaaggatgtggagaaattagaatgtgggggccgggggattgactgttaatgggtacagagtttcttctggggggaggcaaaatgttgtaaaattagattgtagtggtggttacccaacttagtgaatatatgaaaaaccactgcaaataatttaattatgtggtatgtgaattatatctcagttaaacaggttgaaaaagaaagtggaagctcattatcccgttgtaaggagatgtaattggcagcttcctatcgacaaacattgtgtggtttctgctttttcactgttgataatgcatgtggtggctccataaacaaatccttgattgtgttttaggttagtcttgtgatgcattcttagaagaggcrtcactgaatcaatggctgtgagtgtttttaggtctggataacatttgctaggttgttttccagaaagaaatgaatacgtatattctcaccaccatgtgagagagtgccgtcttactctatctttggtattttctttcccttaattattaataggtctttgattggcttgacaggacaaacatctgtgtctgtgtgcttacagatgtacttcattcatggatagatgctttagtattcacacgcaaggctgcttccacatgggcacgagctcaaagatgctaagtgactcagtgaattgaggagccaggagcaattaatacactctccagtactgacatgtgagttttcaacctcaaggtaccttattcaactggcctgattagaaagtcagcaaagacaagggtgtgtgtgtgtgtgtgcgtgtgcgtgtgtgcatgcatgtatgtgcatgcatgcacatgtgtggtaaaacaacaattgaacaattggattggaatccgtggactgcaggcctcgtgcttagagtgtgctag

SEQ ID NO: 723189 - DNA, 1237 bp, Homo sapiens
ttacaaataatactctcaagaacatgaaaaaacattccccagaatgggagaagatgtttgcaaatcatatatctgaaaagagactcatatctagtatatacaaagaactcgtacaactcagtattaagacaaacctaattttaaaatgggcaaagtgtttgaatagatatttctccagagaaaatatacaaatgagcaataaataaaagatggcccacatcattaatcattagggaatacaaatcagaagccacagtgtggtaccgcttcacatccacaaggatggctactatcaaaaagatgaacaataacaacttaacagttacaaatgctggcaaggatgtggagaaattagaatgtgggggccgggggattgactgttaatgggtacagagtttcttctggggggaggcaaaatgttgtaaaattagattgtagtggtggttacccaacttagtgaatatatgaaaaaccactgcaaataatttaattatgtggtatgtgaattatatctcagttaaacaggttgaaaaagaaagtggaagctcattatcccgttgtaaggagatgtaattggcagcttcctatcgacaaacattgtgtggtttctgctttttcactgttgataatgcatgtggtggctccataaacaaatccttgattgtgttttaggttagtcttgtgatgcattcttagaagaggcgtcactgaatcaatggctgtgagtgtttttaggtctggataacatttgctaggttgttttccagaaagaaatgaatacgtatattctcaccaccatgtgagagagtgccgtcttactctatctttggtattttctttmccttaattattaataggtctttgattggcttgacaggacaaacatctgtgtctgtgtgcttacagatgtacttcattcatggatagatgctttagtattcacacgcaaggctgcttccacatgggcacgagctcaaagatgctaagtgactcagtgaattgaggagccaggagcaattaatacactctccagtactgacatgtgagttttcaacctcaaggtaccttattcaactggcctgattagaaagtcagcaaagacaagggtgtgtgtgtgtgtgtgcgtgtgcgtgtgtgcatgcatgtatgtgcatgcatgcacatgtgtggtaaaacaacaattgaacaattggattggaatccgtggactgcaggcctcgtgcttagagtgtgctag

SEQ ID NO: 723190 - DNA, 1809 bp, Homo sapiens
gtcattgatactaatgaacaaagcagttttattgctgaataaggaaacccaagctgaagaaatgttaatgtctaggccctaactaaaacttcctgcttcactgagggctctgagtacgtcctatcagcatagtaaacagtcagaaagcttttatacagtgactaaagttgactcttgaatgccgcaggggttaggatgttgatcttacccctaccctggaccgagcagttgaaaatctgcatatgatttttgactcctccaaaacytaactactaataaactactgttgaacagaagccttaccgataacctaagcagtggatgaacacatattttgtatgttgtctgtattatatactgtattcctacaataataagctagaaaaaatgttattaagaaaatcataaggaagtgaaaataaatttactgtactgtactgtatttattgatcccattaagttttcatcatctgtttacaggatgaattatctgcctgaaatggtggcaactgcagctgtagacctcaaactgcagtacacattaagcaatccagctttttctaatgtcatgactttcctctgcttctggggagcacttctagcattagtaatggcacttcctgtgggtcccatggtgttattcaaggtttaaactattgcattaaacatgatgaaaaatgtgcaagaaccaggagagatcactttttattgcgtctgcactttgctggccgacaaacctctcacacggagatgattggcatcacatggcgttttaagtggatgcttgcaacacttgagctcactgcagtagcaacaggagggaactacagaattattacggtagtacagcaggtacaacagttagttttatgcagatttaatactgcatctttacctgtgtttacatgtctctcatcatgaatggtgccatgtatggtctatgtgtgtgcaaaagttttggcaaattttaactttttataatagatgtatgtatatttcatggtagtaaatgacaaaatagtgtctacatatattttatacactcctaacacacctaactttttctttttttgatgtttctagattttttgatatttctgatattttattcattaaatagaaaccaccttaacatcaacacaatgcttacaagttctggatgaaaaattaaaaaaaaattttttagaattcattaaacttcatctatccaagtcactccaaatttatgtgaaatatttagttctaaatgatttcacaatactttcctacatggaacaaatagttgtaactcatcaaaagtaacaagtctgaaatactttagtcagggagacagtaattaggattttaagctaataagggcataaatattttagatagagaatagagacaatatcacccaaaactgtaaacaaagtgctattcttcttgaataacagttttccattgcatacatatgtgcttggggcgcccagatagtatggacaaaatacccccttattcccaattttgctttctgcagtttcagttaccctcagtcaaccatggtgggaaaataggtgagaacagtacaataacatattttgagaatgagagagagaccacactcacacaacttgtattacaatatattgttataattgtcctttttaattattagttattgttgtggatctcttactgtgtctaagttataaattaaactttatcataggtatgtatgcacagaagaaatcatagtatacataggattcagtaccctctatggtttcaggcattcaattgggggtcttggaatatatcccccttgga

SEQ ID NO: 723191 - DNA, 2150 bp, Homo sapiens
tgccattgcaccccagcctgagtgacagagtgagacttcatttcaaaattaaaaaaaaaaaagaaaagaaaatagcatgtggaatatctctgtggttttcttaaaaacaaagcaaaatctgtcatttaaaatcacaataacattgctgggcaccatggttcacttgagtccaggaattctgagactagcccaggaaatgtggtaaaatcttttctctgcatgaaatacaaaatattagccaggtatgctgccacgtgctggaagttccagctactcagaaggctgagaggggatgattgcttgagcctgggaggcagaggttgcagtrggtcaagattgcaacactgcacaccaccctgggtgacacccaatctaaaaaaaaaaaaagtctttcaatccttttgtccagatgcccacaaaatacctgccatgttttatgttgtcttggttccctcctagggtcccattagaacacttagtcccatccagcccagccctcaccttactttgtaatgtaggcctgatttctttcagtgaaaccttgaccttaaccttgagaaaaattacaccctcagtagttcctgtcttccacctgaatgggcatatgatctaccatgttaggtagcataaaacccaggtgcccagtggatacacagagatttttattgtgttttttagggatgacatccctgtcttcttaaagctgctttaatgctgaaatgttttgatacttttgatgtggccaaagattctccaataaagatatatatatattctaatgtcagaaacagattaaatccttccctgtatcactatgaaggtcacatattagtcaaactttaccagtgtttgtggaataagtgaataaatgagttttagaccttcatcctgttattacttctttcactttcataaatgcctatctaatttaatcacttcatgagaagaaaattgaaaactcaatcagggttaactgggtggaagttcacgatccagttggatgtcgttttcgaattggaagttggtagtcaagaagggggttgtagtgagaaaggtcaataaaagctcctgaaggtgcacagaagagacccaaagccctggctcctggagctactgcttgattctcacagaggtcccggcaccctgcaaagtgagtccagaactggcaagtcaccactttttagggacatgcccatttgatctgatcttctgtatagcaagtcatacaaaagtctggaagacactagcacatacactgtgaagagaagtctgggataaggggaagattataggagatgtttgctctgtggttttggaatgttttgcattcagaatactgtccagagaagggaaaaaggatgaaaaacaaatgaagctcgccctcatgtacctctatgtacctcctaccatgctggactttcttgttttgtttcattttgtttttctttctttctttctctctctctctctctctctctttctttctttctttttctttttttgatacggtatctcactctgttgcctaggctggggtgcaatggcatgatcttcgatcactgcaacctccacctcctgcgttcaagcaattctcctccctcagtctccccagtagtggggactacacctatgcaccaccacgcccagtcaatttttgtatttttaatagagacaggatttcaatcatgttggccatgcttgtctcaaacttccgacctaaagtgacccacccacttcggcctcccaaatgctgggattacagatgtgagccactgcacctggccaattgctgtactttcatgatacacatggagtatccacagtatcacaagggctattttttccataatccaacttatttgtattattggtagtgagctactgttgacgtccccacgttagcaatttagtggctatactgatgataagcatttccatgcatcatgtggtcaacagcatttgctaccaagtgccacgttccatgctcagcagtgggaccacaggatgatcgagacaaagttcctgacctttagcagcaatatcgaacaagtgagattgtcaagaaagaaaaaatccttgtaaaacataccatacccctacgattcagtcatcatgctcccaggtatttaacgaagggagtaaacccacac

SEQ ID NO: 723192 - DNA, 2150 bp, Homo sapiens
tgccattgcaccccagcctgagtgacagagtgagacttcatttcaaaattaaaaaaaaaaaagaaaagaaaatagcatgtggaatatctctgtggttttcttaaaaacaaagcaaaatctgtcatttaaaatcacaataacattgctgggcaccatggttcacttgagtccaggaattctgagactagcccaggaaatgtggtaaaatcttttctctgcatgaaatacaaaatattagccaggtatgctgccacgtgctggaagttccagctactcagaaggctgagaggggatgattgcttgagcctgggaggcagaggttgcagtargtcaagattgcaacactgcacaccaccctgggtgacacccaatctaaaaaaaaaaaaagtctttcaatccttttgtccagatgcccacaaaatacctgccatgttttatgttgtcttggttccctcctagggtcccattagaacacttagtcccatccagcccagccctcaccttactttgtaatgtaggcctgatttctttcagtgaaaccttgaccttaaccttgagaaaaattacaccctcagtagttcctgtcttccacctgaatgggcatatgatctaccatgttaggtagcataaaacccaggtgcccagtggatacacagagatttttattgtgttttttagggatgacatccctgtcttcttaaagctgctttaatgctgaaatgttttgatacttttgatgtggccaaagattctccaataaagatatatatatattctaatgtcagaaacagattaaatccttccctgtatcactatgaaggtcacatattagtcaaactttaccagtgtttgtggaataagtgaataaatgagttttagaccttcatcctgttattacttctttcactttcataaatgcctatctaatttaatcacttcatgagaagaaaattgaaaactcaatcagggttaactgggtggaagttcacgatccagttggatgtcgttttcgaattggaagttggtagtcaagaagggggttgtagtgagaaaggtcaataaaagctcctgaaggtgcacagaagagacccaaagccctggctcctggagctactgcttgattctcacagaggtcccggcaccctgcaaagtgagtccagaactggcaagtcaccactttttagggacatgcccatttgatctgatcttctgtatagcaagtcatacaaaagtctggaagacactagcacatacactgtgaagagaagtctgggataaggggaagattataggagatgtttgctctgtggttttggaatgttttgcattcagaatactgtccagagaagggaaaaaggatgaaaaacaaatgaagctcgccctcatgtacctctatgtacctcctaccatgctggactttcttgttttgtttcattttgtttttctttctttctttctctctctctctctctctctctttctttctttctttttctttttttgatacggtatctcactctgttgcctaggctggggtgcaatggcatgatcttcgatcactgcaacctccacctcctgcgttcaagcaattctcctccctcagtctccccagtagtggggactacacctatgcaccaccacgcccagtcaatttttgtatttttaatagagacaggatttcaatcatgttggccatgcttgtctcaaacttccgacctaaagtgacccacccacttcggcctcccaaatgctgggattacagatgtgagccactgcacctggccaattgctgtactttcatgatacacatggagtatccacagtatcacaagggctattttttccataatccaacttatttgtattattggtagtgagctactgttgacgtccccacgttagcaatttagtggctatactgatgataagcatttccatgcatcatgtggtcaacagcatttgctaccaagtgccacgttccatgctcagcagtgggaccacaggatgatcgagacaaagttcctgacctttagcagcaatatcgaacaagtgagattgtcaagaaagaaaaaatccttgtaaaacataccatacccctacgattcagtcatcatgctcccaggtatttaacgaagggagtaaacccacac

SEQ ID NO: 723193 - DNA, 648 bp, Homo sapiens
ttttattccgtcaaagataaagacaattattttaggagtatttccatttttcccttgatgggggattctcacatctgtttcatccaggctttccaggtccagttcagttatggtcaggcagcagttttctcccaaagctattctctgggtgtcttcttctgtcatctatacatagttttgggagctcaccaaggtgaaatgcaccaccagaaggggatttctttatttcccttctactaaggttttgctctgactggtgatgagtgtaagaatatcaaacatcacagaaagcacacacgctggcccacagaggcattgtgaggccctttgctggacacctgggaggggcagcctgtctgtcttctgctctgccctttcytgctgtgttctggaagcataggcaagcattccacagtatcctgcctgcagctggggatgctgggctgagcacacaaggagccacaaggagagtgcccaggcaagaccttagagtctcaacttcaaaaactatggtggggcaatggccaaatcaggatcatatcttttacagatgtagccctcctgttagcacctgataaatcctctgttcacacctgagataaagtgggagggccattgctcttgcttttgacacccaagtaagataag

SEQ ID NO: 723194 - DNA, 585 bp, Homo sapiens
ggagattttcccctgtctttccccaccccttagctaatcctatgaaaatgaaacayttttaagagggtaatactaagtccagaaaaccaaccatcttattcttttctttttctttttctctttaaaattaggtaattcatttcttagaaggattttctctacttgttaaatattggctttactcagaaagggtaataatttcaataatcattttctttttctttttattcttcttcttttttttttttttttttttttttttttgtgagatggagtcgtgctctgttgcccaggctggagtacagtggcgtgatctccgcccactgcaacctccacctcctggattcaagcgattctcatgccttagcctccccagtagatgggattacaggcatgtgccagcacgccgactaatttttgtatttttagtagagacggggtttcaccatgttggccaggctggtctcgaactcctgacctcaagtgatccgcctgcctcagcttcccaaagtgctgggattacagatataagccaccacatgattataagcccaataatgattataagcccaataatcattttat

SEQ ID NO: 723195 - DNA, 585 bp, Homo sapiens
ggagattttcccctgtctttccccaccccttagctaatcctatgaaaatgaaacatttttaagagggtaatactaagtccagaaaaccaaccatcttattcttttctttttctttttytctttaaaattaggtaattcatttcttagaaggattttctctacttgttaaatattggctttactcagaaagggtaataatttcaataatcattttctttttctttttattcttcttcttttttttttttttttttttttttttttgtgagatggagtcgtgctctgttgcccaggctggagtacagtggcgtgatctccgcccactgcaacctccacctcctggattcaagcgattctcatgccttagcctccccagtagatgggattacaggcatgtgccagcacgccgactaatttttgtatttttagtagagacggggtttcaccatgttggccaggctggtctcgaactcctgacctcaagtgatccgcctgcctcagcttcccaaagtgctgggattacagatataagccaccacatgattataagcccaataatgattataagcccaataatcattttat

SEQ ID NO: 723196 - DNA, 585 bp, Homo sapiens
ggagattttcccctgtctttccccaccccttagctaatcctatgaaaatgaaacatttttaagagggtaatactaagtccagaaaaccaaccatcttattcttttctttttctttttctctttaaaattaggtaattcatttcttagaaggattttctctacttgttaaatattggctttactcagaaagggtaataatttcaataatcattttctttttctttttattcttcttcttttttttttttttttttttttttttttgtgagatggagtygtgctctgttgcccaggctggagtacagtggcgtgatctccgcccactgcaacctccacctcctggattcaagcgattctcatgccttagcctccccagtagatgggattacaggcatgtgccagcacgccgactaatttttgtatttttagtagagacggggtttcaccatgttggccaggctggtctcgaactcctgacctcaagtgatccgcctgcctcagcttcccaaagtgctgggattacagatataagccaccacatgattataagcccaataatgattataagcccaataatcattttat

SEQ ID NO: 723197 - DNA, 1014 bp, Homo sapiens
tggaactatgtaacaataatttacttaagcgtattcagatactttctaatttatgtacttacttttcttagtgaaatgaaacrgaactctaactatgtcctttcgttggatttccttagttcccataatagttgaagaaatagtcccaatctcaggaagcatggcccaagaagctctactcagaatcaattttcttggttaggtggaattggttagcacaatctccacctcctactaccacgagtcatgctatgggaaaaggaagttggcagatagactttaggatgcccctctctgctgatatgcacatccttatatatttcctcttcttgagtgtgggtggaagctgtgacttgcttctgaccaatagaataaaacaaaggtaatggatgtcactcctgcgattatgttataaaagattcagtcttactaatagtctttctctagagactctctcccctagctggatttgaaaaagtaagcaaccatgttgggaggtacatgtggcaagtaactgggatagcctctacttgctgagggtaacctccagctgaccaccagcaagaagccaggaccctcagtcctatgctaaggaaaaaaattctgccaacaatctgagtgaacttggaagtggatttttctccagctgagtctccagaggaaacctcagccccagctaacatcttgaatagctaagactttacagccctgtaaggcccagaacagaggacctgctaagttgtgcctaaactcctgttctacagaaaccatgagatataataataagtatgcattgctttaaacctctatgtttgtggtaatttgttacccagcagtagataactaatacaagaaagtaggtagtctatattatgcaatttgttatatagctgtttatgatcagaaaaatacactgggaatctaaatttcttcaatattttagagttactttcttttcagtataagaagccaataagaaaataatagcttctttgcaaacattataaaccaccc

SEQ ID NO: 723198 - DNA, 1568 bp, Homo sapiens
aactgaagaaagtgtggctatgcattgtgtaatttatgtctttaatgaggaaaatttcagaatgataattgagaacatctataacaatagctatggcttggtatgaaaggattccacagctcaagagaaaaggatggtctgattcaacatgagacagccctttcaccttgacatcttgttatctgactctttaagaagagccccagatctactatccacagctttaatcactgcatgttttgaggaacaagactgtgctatagttgaaagagaatacactttggaaccaagaagaatggggtcccaatcttcactgcagtatatactaaacatgagcccagaatttgacaataccttctctgcagaagtgttatttaatattaccaataatgtgagcaaagcacttagcagagtactgggcacataggaagtctgggatgaatgataactactattattactctttcatggagagaaattttattagggttaaaaaaaatctcagagtaactaaacatccacaaatctcaaacagccatctgttttgagcaacattcatattatgaaactccaactcactgaaatgatttagataccctcttaaaactcaccataatgagatttggcctgcaccagagaaaagtcgttaatgacctaattgtgaaatctgatggcctgttttcagtcatctttttatttatctcctctgtggcacataatgctattgactattcttaattcattcatttggattccttaacaatgctctctcctggtttttctctgatttcaggctcctttcctggggctaagatttcacagaggacttttctccacttcctgatctcattttctgtgaagacttcacttaagtttgctgggcagagtcaacacagttcaacaaacttttattcagtagctactacatccttgcctttcttttaggtattggagtaacaatgacaaatgagactggagtgatgcagacttcctatgctcagccatattgaattcttctctccttcctgaacacactggaaggttatgcctctcagccccttgcaggagatgaggccatgcagccagttctagcatgaaatgtgaatgcaatgatgtgaatgcaaatcctgtgcagaggtattaagagccacggtgctgctttctcactctctcgctcatggcaccgtgactgcagaaatgatgtgttgagctgacagtgtcacagtgtggagggagcctggacctaggattgccagatggagggaattcctacckacttgcatccaattttgcatgattgaaaaataacttgcactaagctgctgaaattcagtttattaccacactctattctaccctatctgctcctaaactgctaaaatacaacatacttggaggagatgtgtatatgtgtataagcagatactaccaagaaaaagtgctaaaggctatcacagagtgatcacagtatatttttggaacattgagaaggggcagtgagctcattctgagggagagtgtttagggaagatgtgacttcttggttctaactcatctctttcttctca

SEQ ID NO: 723199 - DNA, 1568 bp, Homo sapiens
aactgaagaaagtgtggctatgcattgtgtaatttatgtctttaatgaggaaaatttcagaatgataattgagaacatctataacaatagctatggcttggtatgaaaggattccacagctcaagagaaaaggatggtctgattcaacatgagacagccctttcaccttgacatcttgttatctgactctttaagaagagccccagatctactatccacagctttaatcactgcatgttttgaggaacaagactgtgctatagttgaaagagaatacactttggaaccaagaagaatggggtcccaatcttcactgcagtatatactaaacatgagcccagaatttgacaataccttctctgcagaagtgttatttaatattaccaataatgtgagcaaagcacttagcagagtactgggcacataggaagtctgggatgaatgataactactattattactctttcatggagagaaattttattagggttaaaaaaaatctcagagtaactaaacatccacaaatctcaaacagccatctgttttgagcaacattcatattatgaaactccaactcactgaaatgatttagataccctcttaaaactcaccataatgagatttggcctgcaccagagaaaagtcgttaatgacctaattgtgaaatctgatggcctgttttcagtcatctttttatttatctcctctgtggcacataatgctattgactattcttaattcattcatttggattccttaacaatgctctctcctggtttttctctgatttcaggctcctttcctggggctaagatttcacagaggacttttctccacttcctgatctcattttctgtgaagacttcacttaagtttgctgggcagagtcaacacagttcaacaaacttttattcagtagctactacatccttgcctttcttttaggtattggagtaacaatgacaaatgagactggagtgatgcagacttcctatgctcagccatattgaattcttctctccttcctgaacacactggaaggttatgcctctcagccccttgcaggagatgaggccatgcagccagttctagcatgaaatgtgaatgcaatgatgtgaatgcaaatcctgtgcagaggtattaagagccacggtgctgctttctcactctctcgctcatggcaccgtgactgcagaaatgatgtgttgagctgacagtgtcacagtgtggagggagcctggacctaggattgccagatggagggaattcctaccgacttgcatccaaytttgcatgattgaaaaataacttgcactaagctgctgaaattcagtttattaccacactctattctaccctatctgctcctaaactgctaaaatacaacatacttggaggagatgtgtatatgtgtataagcagatactaccaagaaaaagtgctaaaggctatcacagagtgatcacagtatatttttggaacattgagaaggggcagtgagctcattctgagggagagtgtttagggaagatgtgacttcttggttctaactcatctctttcttctca

SEQ ID NO: 723200 - DNA, 1568 bp, Homo sapiens
aactgaagaaagtgtggctatgcattgtgtaatttatgtctttaatgaggaaaatttcagaatgataattgagaacatctataacaatagctatggcttggtatgaaaggattccacagctcaagagaaaaggatggtctgattcaacatgagacagccctttcaccttgacatcttgttatctgactctttaagaagagccccagatctactatccacagctttaatcactgcatgttttgaggaacaagactgtgctatagttgaaagagaatacactttggaaccaagaagaatggggtcccaatcttcactgcagtatatactaaacatgagcccagaatttgacaataccttctctgcagaagtgttatttaatattaccaataatgtgagcaaagcacttagcagagtactgggcacataggaagtctgggatgaatgataactactattattactctttcatggagagaaattttattagggttaaaaaaaatctcagagtaactaaacatccacaaatctcaaacagccatctgttttgagcaacattcatattatgaaactccaactcactgaaatgatttagataccctcttaaaactcaccataatgagatttggcctgcaccagagaaaagtcgttaatgacctaattgtgaaatctgatggcctgttttcagtcatctttttatttatctcctctgtggcacataatgctattgactattcttaattcattcatttggattccttaacaatgctctctcctggtttttctctgatttcaggctcctttcctggggctaagatttcacagaggacttttctccacttcctgatctcattttctgtgaagacttcacttaagtttgctgggcagagtcaacacagttcaacaaacttttattcagtagctactacatccttgcctttcttttaggtattggagtaacaatgacaaatgagactggagtgatgcagacttcctatgctcagccatattgaattcttctctccttcctgaacacactggaaggttatgcctctcagccccttgcaggagatgaggccatgcagccagttctagcatgaaatgtgaatgcaatgatgtgaatgcaaatcctgtgcagaggtattaagagccacggtgctgctttctcactctctcgctcatggcaccgtgactgcagaaatgatgtgttgagctgacagtgtcacagtgtggagggagcctggacctaggattgccagatggagggaattcctaccgacttgcatccaattttgcatgattgaaaaataacttgcactaagctgctgaaattcagtttattaccacactctattctaccctatctgctcctaaactgctaaaatacaacatacttggaggagatgtgtatatgtgtataagcagatactaccaagaaaaagtgctaaaggctatcacagagtgatcacagtatatttttggaacattgagaaggggcagtgagctcattctgagggagagtgtttagrgaagatgtgacttcttggttctaactcatctctttcttctca

SEQ ID NO: 723201 - DNA, 1543 bp, Homo sapiens
tgacttgcacaatgcatttctttagagatgatattggyggaatagtggctgtgtttctcaatgccagcaaaacaggatgttgtccaagatctgaaacatatggtgaagctggaagaaatcgcccaatatactgctcaataacattccctagcaattgattcaaataggcattcggattttgagattgacaacacacgatacacatgccctacaaggaaaaaaagtaagaaatactaagaggtaaagtttcaaagaacaaacaatatttagaaactcactaatgaagtccccagcattaataatcatgtgagaatataaaaatcaaaaaggatacctcacgtaatccacagataatgtacatacgaattacaaggagttaagcctgggcaatacatatgatatggcatctaactaagcatgtgtgtctgaggtgtggacaaaggaagcaggggagaacagtaggaagacaaaggcagattcttttcctgtaatcatcagaacacttgaacatcttgctcatcaactacatttatgtgtacttacaaagttataaaacacctttaggtcatttttttctaggtactggttattttgtctaagactatacaatttttgctaaaagtcttccatgctaaaaatctgataatcttttttaaagtaataacaaagggcgaggaatatggaaattaagactcggaataacaatttacttagttttcctataacaggcactgtgctgtgtgctttatattcactatttcatttaaatttctcaaagaaccactgagttagtaatattgtatctccattttacagctaggataactaaggtttagaaaagtgaagagtttaatacagtcacacagaactcttgatatctggttgcatgtctgtttatttaatctcttacatttgtatagcagttaacaaaatactttcatatatattacagtatttaatacttaaaccaatactctgagagaaaataatgttttctgctagtattagtaaatattaaatgctactaaatatagataatcaccaacacagcaatacattatattataaaagttaactcttaatttggtacttggtgactcacaacgtattttccaagagaaataatttaaaatgtttgaagtctccattttagttgtaaacgggtacttacccaataagaaattctgaaagtttatttgtaatgaaaaatagcatacagctgttaaaactgtaccaaataaacaactgaaaaaaatcaaacaatgaacccctcccccaacccacccgccaccaccaactctgtttcttgagtagtttaaggaaaagcacattaaatcagaagaagatgaagtaataaatgaatattttctgaaaattccgaagaggagagctgggtaccatgaagaaattaaagacatagctccagttctaccaaacagataatacaccaaacttttaaatttaccacttacgaagcttaagagaattcttattaaatggactgtttgggtttaagaggaccacatggaagaaatattccaga

SEQ ID NO: 723202 - DNA, 1387 bp, Homo sapiens
ttgggtaattaaaggagtgatggatggtgcgttaaagtttaaacgttttaggaggacctatcttattaacactttaaaacaagtgagcataatatcattaactttgattaattcatttgctcttaatatagcttttaatttgtaattctacgtgaattacaatgtaatttggcattaattatactaaattgactataagtcagccaatcacaatggaaaattactcacagctgaaactaaaactaaacctctccatccagaaaggacgatgcttagttaagtggcaaacacactttaggctctttggcagtgagaatgacattggacctgctgaggactgtaatcaatttctyattctgcccactgctgggactatgtactctttggagtgaagccccatataaatccaataaagtgtaaataatgaagtaaacaaaggggttgatttatcaggtttgccaggtcccctgaagaatctttttgctcttctcatctcatgtaagttttaggcaatgtagaggggctgtgtagtgctttagaatgattaattccacaccccttggattctgggagttagaataggcacctacccaaattggcctgcttctcgtcttcatgctctgtgaaacagctgggaaatcctgttttcgaccccatgtgtagtcagtatcctgaagccactcctatttgacctatacacaaaatgccttctaggcagaaggaagtcatgccttaaaaagccaacaccacactgagagaactaaaccctcaggagatgatggagcatgtgtcattcattgataaagcttgtggaaggtgcccgggagcacacaagaagtaaagtgatctgctgaggaatgcagcccttgagaaagtgtgtgtgagagtgaggatggatttggaaaatacatgtgtttgaaccatttcccagatagctttctttgacaactgtcttctgaaaaacaaaacaaaaactctgagattttgcagaaagtcatatgcaagatttggcaatattctgcttgaagtccatttacatgtaggtagaacgacatgaattttgtacattctagatacattcctggtgagcaattggctcataaaatgaggcccggttcagaggcaacaaattttgctaaatattgcacggaaaattcaagactgttattttataggtcttctttttaccttattagttatataccccatctcatcattctcacacccaacgtagctaataaaatggcataagttttatataaaaattttgagtaaagaggttaaaagccaccttggattctgagccaacagccgtcctgtcctctgtcacttacacatatgcaggtgggattcacacagtgcacacacttgcaggtagacacgcatg

SEQ ID NO: 723203 - DNA, 650 bp, Homo sapiens
gggcttattgagccatctgtgcattgtggaactatctctttctactgggttatatgattagacaaaccagacatttcccatactggtttatttaaatgaaattcaatcaaaaaasagtctcctgaataataaatagaaatgctttgaatataattcttcaaatctataaaacaatttttaaacaaaatcctttccccaagtaggggtccatacatttctacagaatcctataccttggagatagaatgttagagctatcagggcatctttggagaagagggcatcagaacaggctggagcagaggctgctttcatattgtaacgcaggacttccttcctgagggttttctgtgtttcttcccacaagggcactgtgctaactgaggatcattattagtaggtacaaatactccagctcctacctggggattagtgggaagtagaggtaactctgagtcgcatattctacaatgaatcctgcaggattaagctccagttactcaaagggttaattggcatataactggctgcctttcttttcctgttccactccctttttccttactgtttcccaccgccccccctcccccgtggtatcacatatcaataaaccactgcacatgaacccttatcccatgattttgagggaa

SEQ ID NO: 723204 - DNA, 650 bp, Homo sapiens
gggcttattgagccatctgtgcattgtggaactatctctttctactgggttatatgattagacaaaccagacatttcccatactggtttatttaaatgaaattcaatcaaaaaagagtctcctgaataataaatagaaatgctttgaatataattcttcaaatctataaaacaatttttaaacaaaatcctttccccaagtaggggtccatacatttctacagaatcctataccttggagatagaatgttagagctatcagggcatctttggagargagggcatcagaacaggctggagcagaggctgctttcatattgtaacgcaggacttccttcctgagggttttctgtgtttcttcccacaagggcactgtgctaactgaggatcattattagtaggtacaaatactccagctcctacctggggattagtgggaagtagaggtaactctgagtcgcatattctacaatgaatcctgcaggattaagctccagttactcaaagggttaattggcatataactggctgcctttcttttcctgttccactccctttttccttactgtttcccaccgccccccctcccccgtggtatcacatatcaataaaccactgcacatgaacccttatcccatgattttgagggaa

SEQ ID NO: 723205 - DNA, 650 bp, Homo sapiens
gggcttattgagccatctgtgcattgtggaactatctctttctactgggttatatgattagacaaaccagacatttcccatactggtttatttaaatgaaattcaatcaaaaaagagtctcctgaataataaatagaaatgctttgaatataattcttcaaatctataaaacaatttttaaacaaaatcctttccccaagtaggggtccatacatttctacagaatcctataccttggagatagaatgttagagctatcagggcatctttggagaagagggcatcagaacaggctggagcagaggctgctttcatattgtaaygcaggacttccttcctgagggttttctgtgtttcttcccacaagggcactgtgctaactgaggatcattattagtaggtacaaatactccagctcctacctggggattagtgggaagtagaggtaactctgagtcgcatattctacaatgaatcctgcaggattaagctccagttactcaaagggttaattggcatataactggctgcctttcttttcctgttccactccctttttccttactgtttcccaccgccccccctcccccgtggtatcacatatcaataaaccactgcacatgaacccttatcccatgattttgagggaa

SEQ ID NO: 723206 - DNA, 1122 bp, Homo sapiens
ttgttgttttgttttcctttttctcagtatgagtatggatcctcagtggcttttggtcaactcattctccttctgaatatggagacagtttggaagcaaatacacgaagtgctgaacccctagtcatatgccctcaaaagtgacattggcaaaatgttaaaactaactcttgttatctttcttttaaatatcttggtcaggcgtggtggctcatgcctgtaatcccagcagtttgggagggcaaggtgggaggaccctgaagtcaggagttttgagaccagcctggccaacatggtgaaaccctgtctctattaaaaatacaaaaattagctgggcatgatggtgggtgcctgtaatctcagctacttgggaggctgaggcaggagaatcactcgaactgggaggtggaggttgcagtgagctgaaatggcaccactgcattccagcctgggtgacagagtgagactccatctcaaataaataaataaataaatatcccttcccatctggcatccaagagcacatatcacttccccacattctgcctatccacgtaaactccaagtcccctaaactctcgttggctggaatctaaaagtctaaaagtgctrgagtttccccctactcacgttagaagagctgactatagatatctcttcttgacttgttcagttatgtcacgttggtaggttgaaacttgccatgatgaaagtattaacaccacaggaaatcaacaaacactactaatgagagctggattaccagcataaacccctggttgaattctatggcttcagtctctatggcctaatgcttaagtaaaggtgcctcagaaagctcctcatattcttttaaaccaaagcagcaattccatgtttacattttgagcttctacctaatatttttttgaagaaaagtttccactgatatgaaataaatgataaacatttgaaagctattgttctaggccaagccaccagttttgaagatgtgttcatggaaacctagaaaggttaaaatagttattcaacatcacacaagggacaagagaaaaaagtcagggcaagtactgggacctaggtttccttaatcccagtccagtgctcttcccatctgtactta

SEQ ID NO: 723207 - DNA, 620 bp, Homo sapiens
ttttttttttttttttgcattaatggcaaggaaagcatagaagaaatttgtgtttaggagaaatacaggttgttttctggatgataagaatgaatagggtttgcttgtagatgcccattcattttggtgacttcttaatgtatgtattcagtttacagacaaaaaaatgaaagtgaacaaaaaagtcaaatagaacagagaagataaataggaggaaggtttccattcacatattaggaaacatacattgaaatcctaatatgtacaaggccttgggttaagcactaggagtagaaaaatacaaataagatgcagtccctgccctctacaagctcatggttcaatatgggatgaaatcagaaacaaaactgtcaagttttgtttatttcattcttatggcaatgatgccttaagagtggaatgctatgagaacacagaaaagggacatctgaggagattctagggccaataagaaaagctttttggacaaagtagtgcttgtgataagactggaagaytgagcaaaaaatagaggaaaagggtactctaggtagagaaacaacaggtacaatggcaacaggatgtgaaagaacttggccccgttggataaacacagctgg

SEQ ID NO: 723208 - DNA, 584 bp, Homo sapiens
acaaaataggaaactttagtgaaataggagtagcgactgtactttggataaatgttcaccgcaagataatttattaaagcttgaaaagtaagaaaaaagagtacaaaaaaattcargatgttacctatatttcaaattacgccttatagtttcctgttatgaaagaagaggaaattagcacatgtattcttctttccaccttccctttctccatttgttgtagatacagtcctgtcattttcatttcaagatttataatatacatgttcttaatcataattctcacaggtgtttaaccttaattctagcttgaatggattcattactcatcattagttattttctatggttttgctaaccttgaattgcttgttttgcttttatttcttgtattggctgaattttatcattcagcttttttttttttttaatatgcttgagaatgttcagttgtggtttttgttgatataaaattcttgattcacactgtccctgcaaactgcagactttgctcactgccttttggcgttgaggatcactgtgtagaagtctgagccaccataagttttttgttgatagtatgt

SEQ ID NO: 723209 - DNA, 776 bp, Homo sapiens
tgagaagttatgtatgtagggatatggtgtcggtgaatgtattatgcatgaaagctgcttgcacagggcctggcacacagaaggtggtcagagaagctttagctttcttttctctacaaggactgtttgtgtccccctgccccgcccccgcacatgtgtacatacccactgtcctgattccctgctgctgcaaggttttgcatgacttgactcttccctgcttctccaacctcttctcctgccactaggcccctcctgccacacagcctttgtttccttctttacatttgccactcccttctgccctgagcctcctctctgctatcaggtctcagtaaaatgtcgcctcctcagagaggctttcagtgattaccatttgtaagagagccctmtctccctagctgcttcagaacctgtaattatttcatttatttgtttactctctgtctctgggactgtaatctctcttgttcatcgttttctcaggacagcgtgcctcacattcagtaaatgaaagaccactgctcattaggtgaaattaatatctgtctgtgagtattaaggaagatacggcgagtcaccctgcgctttccacattattccttaacactaatttttaaccctgatttttgttttctctgtgattagacctgccaccaaaaatatttaagtacagttctgtggattctgtggcataactatagcaatatttcataaggaaaaatactacttcgaagaatcaacaggactgatagataattctatacacattcagt

SEQ ID NO: 723210 - DNA, 1469 bp, Homo sapiens
tttttgatggggttgtttttttcttgtaaatttgtttgagttcattgtagattctggatattagccctttgtcagatgagtaggttgcgaaaattttctcccattttgtaggttgcctgttcactctgatggtagtttcttttgctgtgcagaagctctttagtttaattagatcccatttgtcaattttgccatgtttttatagactcataagaggaaacatgttggtggtgatttatctacagtccctatttattttagaatctgaggcactggctatatttcatggcaagctaaaactcaaatgccttcatgaaactaaatttctagcttaagatgaaggtgtagttcctgcactgaatagccttcatctgtagatttgtgaaatgttgcagttttacatctaagcaccttataaggaattctatcttagacaagattagatcctgtggcaatctttatttgaaaagcttcatagtttgctccaagtgcatggaaatgtgtcttatttctcttgaatgccctttaggtcttaacagaattcacagtgccaaggagtcaaaaactatatttcaaattatatacattcctgacatattatttgagcagattaaaactgatggatagagcaatttaggcaccttgaaagtagctacttgaaaaatgccaactttttcttatctccattcacttaaacaaaaatgggccaggtgcagtggctcatgcctgtaatcccagcactttaggaggccgaagcagatacatagcttgagcccaggagtttgagaccaacctgggcaacatggccagaccccatctctgcaaaaaataccaaaattggctgggtgtggtggctcacacttgtggtctcagcttctgggaggctgaggtgggaaaatcatctggacccagggaggtcaaggcagcagtgagccttgattgtggccactgcactccagcctgggcaacagaacaaaaccctgtctcaaaacaaatagaaaagtaaaacaagaaaacaacaaaattaattgatctagatttgtgagttgtcgataccaagaagttcccatgttttaaatatttcagatggccccgtcattgattattctcacagctcagatatagggaagatgaaagctgctgcctatagcatcttgcatcctcttgcttccacatacaagaaatgtgaactkcaatcccctaaaaaggtcagagtttccattctagtgaacacatttgttcagcccaggtggggtgggacatgacaaaaaccaagagtgggtctagaaccatggggctcttcccagggctatcactatgagatagaatatcctgtgtgtagtcactctcagaaacagcagctcccttaggaaactgctgtgtcctgaatgcttgtgtcccaccaaaattaataaactgaaatcctaccctctaaggtgatggcattagaggatggggcctttgggagg

SEQ ID NO: 723211 - DNA, 1022 bp, Homo sapiens
gacagttattcattatatttaaattaagctggatctctaaatactccaggcaactaagcatattttagacatgttttgtaaaatcctgatagattgaaacctataacaygatcacaaatgtcatctaatacatttataaacctggatcttcaccccaggtaactaaacatattttagacatgttttttaaaatcttgatgtaatggaaccaatagcatgatcacaaatatcacctaataaatttataaaggcagtacactttaatatttttattcatctatttgtaattattaaattttaaggaagttacacttgcccctcaattatgattaatattgaggtacgagaggcagggacaaatagcgaatgcttgctttctgtttttattttattcctgtgcaatttgtgttcttttaatacactccaggaaattgtttttaatcatgtgatgctttataatagataaatcatagcaaaggccatagatttcttgtagcccagaattcattaaagtctaattccagtaccatcacaatcagttttttcccaaatataagtattgcagaggtttcagttaacgttcattttagtcagtatattaagtaactccttactaagtaatgaataaggatcagtcataactgggatgtgtgaaggctcccattgtacagggaaggttttaaattctgaaaggggagaacaacgttttacagctttatgtatttatctcttcctgttatttgttcttgccaggatttctgctagaaaacatagacattattttaagactaatttatatgaaaagaaacaagttttaaaattgtatcctccatttgctttagaaaatattttttctggaatataaaaattacagtcactatgaatattttaaaatacagggaagtattaaagaaaagaaaattctaaaattacatcagctagctgtaactactatttgttttggtatatgtcttgctagtttttcccgttgtaaaacagtgtacatatgtaagcaatatgtg

SEQ ID NO: 723212 - DNA, 1022 bp, Homo sapiens
gacagttattcattatatttaaattaagctggatctctaaatactccaggcaactaagcatattttagacatgttttgtaaaatcctgatagattgaaacctataacacgatcacaaatgtcatctaatacatttataaacctggatcttcaccccaggtaactaaacatattttagacatgttttttaaaatcttgatgtaatggaaccaatagcatgatcacaaatatcacctaataaatttataaaggcagtacactttaatatttttattcatctatttgtaattattaaattttaaggaagttacacttgcccctcaattatgattaatattgaggtacgagaggcagggacaaatagcgaatgcttgctttctgtttttattttattcctgtgcaatttgtgttcttttaatacactccaggaaattgtttttaatcatgtgatgctttataatagataaatcatagcaaaggccatagatttcttgtagcccagaattcattaaagtctaattccagtaccatcacaatcagttttttcccaaatataagtattgcagaggtttcagttaacgttcattttagtcagtatattaagtaactccttactaagtaatgaataaggatcagtcataactgggatgtgtgaaggctcccattgtacagggaaggttttaaattctgaaaggggagaacaacgttttacagctttatgtatttatctcttcctgttatttgttcttgccaggatttctgctagaaaacatagacattattttaagactaatttatatgaaaagaaacaagttttaaaattgtatcctccatttgctttagaaaatattttttctggaatataaaaattacagtcactatgaatattttaaaatacaggraagtattaaagaaaagaaaattctaaaattacatcagctagctgtaactactatttgttttggtatatgtcttgctagtttttcccgttgtaaaacagtgtacatatgtaagcaatatgtg

SEQ ID NO: 723213 - DNA, 608 bp, Homo sapiens
ctgtactgggacctgagtgtaggaggctggctgaggggatctctgcttccaatgtacataatacacttaattcctctgtttttattgtgatgtttcttccttgtgccggggttcccccagtccagagacttctttaaccttttcaagagaataaacctcgtcttttgctaggactggggagggaaagtttcccagctgaggagagtgtaaaagtgaatctggcatctggctgcttcttaaacaggctttcaactagttcttatttctttttctcgtatctaaaagtatctggtggtacccatttctgagcctgttggagattccgtagtatcattgtagttagttctcaccattccctactgctggcattaggactttgttgtttgttgtagctctgttaaatttttcaacaattaaccaattgctttccaacttctataattttattgttaccgtcttttcatttctgtgaccttaggggcstgtgttttaaagggatttggggaaggagtcaagaatttggtgaaagattctagatgtgtggaatcaatttgtgtgcaataaaataaactgaaataaaatataaaacttggtaaatagctcaataa

SEQ ID NO: 723214 - DNA, 1286 bp, Homo sapiens
atttgctgcccttttcaggaatagctttatattttcctgaataattgaataacaacttggccatgtgacttgctctaacgatgaaatatgagtgtaattgccttgcatcacttcaaagcaaaatctttaagagccatctttttttttctttttcctctgtctcaatgacccacaaaattctagctagaggcttctattttatccaccacggccctggagtgaatatgatataaggcagagatacagccagcccaagatgggcatgtgatatgattgagacataaaactcttgtgattgttaactcatggattttttggggacatttgttgccaaaatataacttaatcctgactgatacacctagtgtttcagcctttttcaaaaaagctgcttggcatacagagaaagaaaatatggggtggggaatgatttgctctttggaagttgggaggagagattcctttcaagtgagtgggtatgtgctggctctcccctggtaaacaggtgaaggataaatgataggtaaagggtgagtaggtaaagggcaaataggtaaagggcagcttcaagatcaatccctacctaccactggatccctagagtggcggttgtccacctagaaggtaaaaaaacatgtactgaggatgacctacctactgagcacatggaccatgatttttaccttggtgaaaaatgccaaagatgctcttccattttcggacggggtgacttggaaagaaggtagcataataaattctcctgcttctaaaagttttaagactgctcttcaacagtatcccaggacgatgttactccttggaataygccaaggaggagaatgggtttaaaaatactgattgtgcatgcaaccattgcttttagagtggtagagaatattctgaaaaagctctatgattatattgttcgcaaaaccaaaatatcactgacatcttttcttgaatcgaattattcttctcagtcatggattgtgtatttctggtgcatgtatcatggacacttgagggtaactcatagtctttcaaagaaaggagtaaggatgaagagactgggtaaacatctctctccaacaatccttcatattttaggaattcaaatttatagatgaaaacaaactgatcaacttataaaacagcctcagttttcttgtacatcaaagaggctcgagcacagaggttctttgtgctctttagaatctgcagttcttaatacaatagatttttctttgaattttctagcccaggtacacctaattatattgactaaa

SEQ ID NO: 723215 - DNA, 1220 bp, Homo sapiens
gggagctagctaaagtaagtttgtgactgcattttgtaggaaatatgttagttaatcagtgtgttttatgaatgtgaaaatcattataattattacttttaaaaccaccaatagtgcatttgttatctcttaactctgtttagaagacctcttagtttgtcattctttaggcttaaaaactcgagttggcacttgtttttttattactgtatatgcagtataatgactgtgtagtgcaggacatttaaactgaaggcagtgaaccccctgacattaaaagtaaaagtgtgtgtatgcatatacaatttctaagagtgagacttcatgtctttgatcaaaatttcaaaggcttctgaaactctagaaaattaagaactggtgacaggtgtattttgtgatgttgtttagaagtatgtttttcttttcctttcctgtctcctctttaccccttaagagacctgcactaacaactaaatacatttagagaccctgtatgcagttaaggtctccagacagtcacagttgtttatattaaagtgctgaaatatatcagcagctacttactatttctctaatcactcagtagccagaattaaaatgttgatggtgtctttaattcatagcaggagggcttttgtggttactgtaataaatattaaacagagccttctccaaagccattggtcacatgctttgtcccactagtaattaacttatcattgagctatggtacactctggcgactttttcctaaaagatttattttgacaaaccagggcacgataaatttttctatgaaaagtgcctttttgacccagaggagactaatgcaaatttgtaatgagctatgatgtatagtggtcrgcgagttttagcatctcctttgagatggtgtacattcccctctcatctgatcttatttttctttagatcatgttgtatattgtacatttgacatgtgtattcatattgaatataatgtaagaaaggcaaaagactgtttattgttagtcgaaaagtatttattagagtgtagattttgctttcaaagggcttatgctcactcgctattgcataacctgtttatactatcagtataaaaaaggaaaaaagatgtttgggccaggcgaggtggctcatgcttgtaatcttagcactttgaggggccgaaacgggtggatcatttgaggtcaggagtttgagaccagcccagcccagcc

SEQ ID NO: 723216 - DNA, 2106 bp, Homo sapiens
ctcctgacctcaggtgatccgcccgccttggcctcccaaagtgctgggattacagctgtgagccactgagcctggcccaattagaagtcttaaataacatttttctagtataatatggtgggtttgcaaaaaataagactttatttttcttcagtcatcggtttctggccagccatggtggttcataactgtaatcccagcactttgggaagccaaagcaggaagatcacttgaggctaggagaattcgagactagcttgggcaacacagcgagcccccatctctacaaaaaataacaattagctgggcatggtggcatgcgcctgtagtcccagctactcttgggaggatcgcttgagctgggaggttgaggctgcagtgagctatgaccatgccactgcattccagcctaggtgacagagcaagaccctctctctaaaataaagtttttaaaaaattagaaaaaaacaaagtagtcagtttccaaggaataagtcttgagaaattggttttctcccttttgaaatgtcaatgtattttgtatgggaaaatcaaaactactgtaaagacctaagaaaagcatgtctccttttgtaacaaaccttgtgttattcatataattacattttggcatgaaaggaagggtaatagtttgtaaatagtttatggaactaacaagagattgcaagggaaatgtcaaggacatgacaaaggaattaatttaaacatctttaaaactgcattagtaacggccataatttttctagtgacagtcaaacaaataaatgttctaatttctgtgcagactacaaattgtgcatgatatgcccttgcttgtttatccacctgaaccatggaataatgatgctgaaggggaccccagtgctcatctagtgaccgaatccttatttgaccattgcaggaatcaagttcccccaaaccatgcatgtgaaagtaatgaaacatctaaaaatatatcctgcagcttgaacctctgcttactcataatagttcttacatccactccatgctcttgtctgtgttccaactccttcccctggtaatatgtttattaattgaaaaaatattacatacagtgcctgccctgtatgaaatactgaaacaggcactatggggtgcatggaacatagttcctgctgccatggagctcaccatttagatttggaagtaagacccacacagaagaaccaaggcataaaacaggaccgtatgtaaatcagtgtcaagggagctacaaactgctgtaaaatttcataggagggaaaggggattgggagatcacttccagctgagaaaagaatacaacaaaaatttttctattcacttgctttgagttttagggaaatcatgtagatttctggacttcagctttcttcctagtaaatgtttaataaaataacaacctatactccawgactggtttgaggtatcaccattctaaaatgcctgtgatcagagattttgaaattcaagacataatgcagttcaaagggtgctgctctttggcaagcaaagaacagttgtatctatcagtattgttaggactcttttcatctgcagggttttaatatttgtctgaattctagggggcaaatgcttaaaatgaaaatggtctcgtgcccttttattggcaaaaacaactttaaatgattaactctttgattgttagaagttttcacagactttggaataattcttactgacaggtagaccctcaaaatttggggtagatctcttttattttaagtagcattactatgaatgtaaatgtctagctttctaactttatttgaagaatagcaaattgttaaattaagtttgacctggatgcagtggctcatgcctgtaataccacactttgggaagccaagacaggaggatcgcttgatcccagaagttaagaccagccttggcaacacaacatgaccctgtctctataaagaaaacaaaaatgaaaaaaaaaaaaaaagttagaggtaggcatgaaaaattaacatgtagaaaataaattattattccactacatatagcaataactgaagaagtgaataaatgattattccactatatataacaataactgtg

SEQ ID NO: 723217 - DNA, 1492 bp, Homo sapiens
aatactatatgaggtcatctttgttcaacatttctgttaagctttccattaacaactcatgtatatttttattcaggtgtagaattgagggggaaggctttaaatgactttatttttgccagccatatgtagaaaagcttaatcttaacatttgcctgatagcaggttttcctgattataggcaaacacttagttgtaagtaaatgataaacctttagaagtcactgtcacgagctaaactcaagatgaagacaaatgtactatttatttttgaatggtgattttttttaaaagtcaacattaatataatactaatatagtaacagctattataataataggtagtgtgtattaaggcctggaattgcaaggcactaagataagtgtttttcctgcaatgtcgcctacaattatcataagaattataagcagactttttagaggtgaggacgttgaggtgtagagagggttggttggtgacatgtctgtgggggacacagctagtgagtcacagaggtgagatttgaacctgacagtccctcytctgggtccagcttcctcatcacggtgtggtcctctttcccacccatatgctggtaaaaggattcctagaaatgcagttttcaagtttgaacaaaacacaaccctggcacacccccccaaaaaaagcaggcagagagatgttgctggatggtgagttggcatgggctttgctggtgtgtgagcaaggctagcataacactttgcaaaatgcagctgagatggcctctggaagacaaattgctgccccattccaagtcagttgcattgtccccatgtctctttcccctcaacaaacatgacccccgatgggaacgtcttttttgtttctttgtgtccccaacacctgaggtgaccatatggatgctgctctgggctggctgatgggcagtgccgggcactgatgatgcacatgaagtttatgctgcaggtttgcttctgggggtgttttaaagcatggatgatgatatctccctgtatattttttatgtatctgaatatacaagataaatgcttttgagatttctgtgaaatttcctttcataataaatccagagtttattaacttgtaacctttttggtactaatatttcagccaagcaagagaatctagataagttctgatttgtcaggtctgagaacatgcagggacacagcaaaataaagtcaggggcttagctggagttttaatatgtgactgtattactttccctttattgtgtgtccttgaataagccacttaaaccgttatgtctgatttctaagtagtaaagcactgctttcatattagtctttatacctatcaaaaatgagatgtaagttgagtctctcctgtacccattcattcatttatttattcaggttaagttcctactttagggcagatctttgagtccaaggaaattgcttttccattaaagtaagattcacttattcaacaactgtttgttga

SEQ ID NO: 723218 - DNA, 671 bp, Homo sapiens
cacccaggctggagtgcagtggcaggatcgctgtggcaggatcgctgctgaccacaacctcyacctcctgggttcacgccattctcctgcctcagcctcctgaatagctgggactactggcgcccgccaccacacccggctaattttttgtatttttagtagagacggggtttcatcctgttagccaggatggtctcaatctcctgacctcgtgatctgcccgcctcggcctcccaaagtgctgggattacaggcgtgagccaccgtgcccggctggaagtttccttttatacaagtatttaagttaataaacagataatgacagaactagaatattattgttttgtaatccctaattaattagtggatctaggcaatgatcaccagtggctgctactagcacaaagagagagacaacaggacattgtgtgcccaggtgtgtcttacttgaaaacccattcacttccactatgcctttctgtttccactcaaattaaaccaggtctactctcatcacatttgcctcaacagtaatcaaaaagaggcaaaattaatagtcaatggaggaagagtgcctttagctttagactgaagggtccacactaaggaacagaagcaatattctatgaaataggtgagaggttcagtgatgaatcagacgtggtccttga

SEQ ID NO: 723219 - DNA, 875 bp, Homo sapiens
acttctcttgcctcagcctcccaggtagctgggattagaggcgactgccagcacacctggctaatttttttgtatttttagtagagacgggggtctctccatgttggccaggctggtcttgaactcctgacctcaggtgatctgcctgcctcggcctcccaaagtgctgggattacaggcgtgagtgcactgtctgggacttattataccacatctagatttttagagtaggcacattcagtcattcattttatattcctagtttatgccaggcaccaggctgggacctggagatttagagataacaaataacattggttcttgccctcagaaaagggagagagatgcaaagggaaatttcattatgagctgattagagctctgctagagggaagcacaggagctgtgggggctcaggggaggttcacagctctgaatggatcagggaaggctttttggaggagtggggttttgacctgattctccaaggaggaacaggagtatgccaagtggagaaaatatggcttggtcagtaggygttcactgaaaacctcaagtgccagggactgtgctatggcttgtactgggtgttggggagatgaatcagatgagggcccggcctcaaagatctcacagtctggtcccattagctcaatcttgtcagggtccctccacgagtggcctccaactcatacatgctgtccagagcctgtcacctcttctgggtgggcagtgaaggaacaagagagcactgatccctggcctctgtcatgtcatcctgtggtagggatcgaggcagtggtgaggagcctgcagggaagcctgaagatgaacaacatagagctgcacaagcagggcctgctgcttttcgctga

SEQ ID NO: 723220 - DNA, 1490 bp, Homo sapiens
cagtggagaagaccagactagaccacagcaatgggaatggagagtgaagacaaaaaagagaccatgccaaggcagccaccactagaacttgaggatgtgaggaatggcagagagagctagagagagatggatttaaagcaactccaagtttttgagttggttgactaggagaattgactaacaaattagaaattcaggaaaagagatgcttgagaaagaaacattgtgaagccaaatatggagttcaaggaaaccaaaggatatacaagtaaaaayattcatggatgactacagatcatgaaaaaggcaaaaactggatatacagactaggaagtgagcatataaaatgtatcaggaaagaaatagactcatagtcctggaacatgtgattatttctgagttggggcagtaaaaagattatgtgattctccaatttcttttcccctgactcagtggcagcaatgttactctgggtctctgaatgatcgtgaaacagagctttccttcatccctcaagttgactctattgggcatgtgatgtgagcaagaataaaaccttgtgataagccaccgacatttcagattttttttttttttttttttttttttttgagatgcagtctcactctgtcacctaggctagagtgcagtggcatgatctcggctcactgcaacctccacctcctgagttcaagcgattctcctgcctcaggctcccgagtagctgggattacaggtgtgtgccaccacacccagctaatttttgtatttttagtagagacggggtttcaccatcttggccaggctggtctctaactcctgacctcatgatccgcccgcctcggcctcccaaagtgctgagatcacaggtgtgagctaccgcacccggcctagatttaatttttaactgaagcacatcctagcttatcttaacataagcagaaatccagttcctagagtaaggcattagatctcaaggaaaagttgaaatttgaggcatgaagaacataagggagtgaaaagaaatgtgcaaattttgtgagtggggagaatggagttgctgttatgttaaagttagaataatattcctcttcgaggataaaaaagagctcaaaactttgattcacatttggcacatcagcaaacatgataaggcatcttttaaaggaaggaataacaaagaaaactcaattattgattactcatgctaaatatccgtaaacaaaaatgtgagataatccacatgtaagtaaaacgaaaatatgcacaaattgtttaaaaagtaacattgataagtaaaatgaatgcttcctttggtagctgcatcttcatgatttttccccctgcaattagtctttctctgttctattctcagcacatcctgtttgctttgtgtcttatcagtgatcagtaaatatttgttgagtgaatgaatgagtaaatgcatatatgggagaatgaagaatagatgaaaatgactgaaataatca

SEQ ID NO: 723221 - DNA, 1490 bp, Homo sapiens
cagtggagaagaccagactagaccacagcaatgggaatggagagtgaagacaaaaaagagaccatgccaaggcagccaccactagaacttgaggatgtgaggaatggcagagagagctagagagagatggatttaaagcaactccaagtttttgagttggttgactaggagaattgactaacaaattagaaattcaggaaaagagatgcttgagaaagaaacattgtgaagccaaatatggagttcaaggaaaccaaaggatatacaagtaaaaatattcatggatgactacagatcatgaaaaaggcaaaaactggatatacagactaggaagtgagcatataaaatgtatcaggaaagaaatagactcatagtcctggaacatgtgattatttctgagttggggcagtaaaaagattatgtgattctccaatttcttttcccctgactcagtggcagcaatgttactctgggtctctgaatgatcgtgaaacagagctttccttcatccctcaagttgactctattgggcatgtgrtgtgagcaagaataaaaccttgtgataagccaccgacatttcagattttttttttttttttttttttttttttgagatgcagtctcactctgtcacctaggctagagtgcagtggcatgatctcggctcactgcaacctccacctcctgagttcaagcgattctcctgcctcaggctcccgagtagctgggattacaggtgtgtgccaccacacccagctaatttttgtatttttagtagagacggggtttcaccatcttggccaggctggtctctaactcctgacctcatgatccgcccgcctcggcctcccaaagtgctgagatcacaggtgtgagctaccgcacccggcctagatttaatttttaactgaagcacatcctagcttatcttaacataagcagaaatccagttcctagagtaaggcattagatctcaaggaaaagttgaaatttgaggcatgaagaacataagggagtgaaaagaaatgtgcaaattttgtgagtggggagaatggagttgctgttatgttaaagttagaataatattcctcttcgaggataaaaaagagctcaaaactttgattcacatttggcacatcagcaaacatgataaggcatcttttaaaggaaggaataacaaagaaaactcaattattgattactcatgctaaatatccgtaaacaaaaatgtgagataatccacatgtaagtaaaacgaaaatatgcacaaattgtttaaaaagtaacattgataagtaaaatgaatgcttcctttggtagctgcatcttcatgatttttccccctgcaattagtctttctctgttctattctcagcacatcctgtttgctttgtgtcttatcagtgatcagtaaatatttgttgagtgaatgaatgagtaaatgcatatatgggagaatgaagaatagatgaaaatgactgaaataatca

SEQ ID NO: 723222 - DNA, 1490 bp, Homo sapiens
cagtggagaagaccagactagaccacagcaatgggaatggagagtgaagacaaaaaagagaccatgccaaggcagccaccactagaacttgaggatgtgaggaatggcagagagagctagagagagatggatttaaagcaactccaagtttttgagttggttgactaggagaattgactaacaaattagaaattcaggaaaagagatgcttgagaaagaaacattgtgaagccaaatatggagttcaaggaaaccaaaggatatacaagtaaaaatattcatggatgactacagatcatgaaaaaggcaaaaactggatatacagactaggaagtgagcatataaaatgtatcaggaaagaaatagactcatagtcctggaacatgtgattatttctgagttggggcagtaaaaagattatgtgattctccaatttcttttcccctgactcagtggcagcaatgttactctgggtctctgaatgatcgtgaaacagagctttccttcatccctcaagttgactctattgggcatgtgatgtgagcaagaataaaaccttgtgataagccaccgacatttcagattttttttttttttttttttttttttttgagatgcagtctcactctgtcacctaggctagagtgcagtggcatgatctcggctcactgcaacctccacctcctgagttcaagcgattctcctgcctcaggctcccgagtagctgggattacaggtgtgtgccaccacacccagctaatttttgtatttttagtagagacggggtttcaccatcttggccaggctggtctctaactcctgacctcatgatccgcccgcctcggcctcccaaagtgctgagatcacaggtgtgagctaccgcacccggcctagatttaatttttaactgaagcacatcctagcttatcttaacataagcagaaatccagttcctagagtaaggcattagatctcaaggaaaagttgaaatttgaggcatgaagaacataagggagtgaaaagaaatgtgcaaattttgtgagtggggagaatggagttgctgttatgttaaagttagaataatattcctcttcgaggataaaaaagagctcaaaactttgattcacatttggcacatcagcaaacatgataaggcatcttttaaaggaaggaataacaaagaaaactcaattattgattactcatgctaaatatccgtaaacaaaaatgtgagataatccacatgtaagtaaaacgaaaatatgcacaaattgtttaaaaagtaacattgataagtaaaatgaatgyttcctttggtagctgcatcttcatgatttttccccctgcaattagtctttctctgttctattctcagcacatcctgtttgctttgtgtcttatcagtgatcagtaaatatttgttgagtgaatgaatgagtaaatgcatatatgggagaatgaagaatagatgaaaatgactgaaataatca

SEQ ID NO: 723223 - DNA, 638 bp, Homo sapiens
atatttctccttttgaaagtagtatgaagtatttttattgatgactgactaatataacattatatcccacttgtggacaggatgcataatatatgcatttatacctttgcaacattttgcaatgatagaaacatagaggacatagatgctctcagtaagaagtctgagttgtctagaatggaatggagcagaaacaaatcattttatcattatctatgtccaaactggccaaacagtatcctcatcagcacctcactatgaaatctgccattttaagacattaaactggtggttttcgcctgggagaagcactgcccgctcctgcaggggtagttttgaaatgttttagatcatgtttttgtatcgtctaataacaaggtaaggcaaaatggtatttagtgagtgctggccaggaatgctaaatatcctatcgcttttggcacatatctacagaartaattgtctctctcaaaatgccagtagtctacttttgagaaagctggttggattcgccacttatttactccctactcgtaaaaaaaaaaaaaaaaaaaaaatcacataaataaaaaatcaagactttaggatttcatatcacaccatgtgccccaaagagtgtgtggcaaattaaagatggc

SEQ ID NO: 723224 - DNA, 597 bp, Homo sapiens
cttccagtgatggagagggagcctggtgggaggtgactgagtcatgggagaagatccctcatgaatggcttggtgccatccccttggcgatgagtgagttttgcttagttagttcacatgaaatctagttgtttaaaagtgtctgaggggctgggtgcggtggctgaggcaggagaattgctygaacctgggaggcggaggttgcagtgagcagaagtcgcgccactgcactccagcctgggagacagagcgagacttcaactcaaaaaaaaaattaaaaattgaattaaattaaaaattaaacaaataaaagtgtctgggacctcccccttctttctcttatgctctcgctctcattatgtgacacgcctgctcccccatccccttctaccatgattgtaagcttcctgagcccgtcaccagaagcagatgctggcaccatgcttcctgtactatcagccgaatcatgagccaaaatataacttttttctttataaattactcagtatcaggtatttatagaaaaaaaacacagagtaatacagatgtcaaataaccatcacactgattgtctctccattatgctattaatttaat

SEQ ID NO: 723225 - DNA, 597 bp, Homo sapiens
cttccagtgatggagagggagcctggtgggaggtgactgagtcatgggagaagatccctcatgaatggcttggtgccatccccttggcgatgagtgagttttgcttagttagttcacatgaaatctagttgtttaaaagtgtctgaggggctgggtgcggtggctgaggcaggagaattgcttgaacctgggaggcggaggttgcagtgagcagaagtcgcgccactgcactccagcctgggagacagagcgagacttcaacycaaaaaaaaaattaaaaattgaattaaattaaaaattaaacaaataaaagtgtctgggacctcccccttctttctcttatgctctcgctctcattatgtgacacgcctgctcccccatccccttctaccatgattgtaagcttcctgagcccgtcaccagaagcagatgctggcaccatgcttcctgtactatcagccgaatcatgagccaaaatataacttttttctttataaattactcagtatcaggtatttatagaaaaaaaacacagagtaatacagatgtcaaataaccatcacactgattgtctctccattatgctattaatttaat

SEQ ID NO: 723226 - DNA, 783 bp, Homo sapiens
gcagacattctgacatatagcacataacaaatggtattactggatatttaaatatagatagaaacaaggtcatgttatgccgtatgtataataaaataattattcataattattgcctctgcacatgagattatggttaattatattttccttgttatattcctcttggcctatttttctgcaattaacacgaattacttttataatcagaaaaaaacactataaaataatttgcattgaaggagggaaaatgttaacagcaaaattacatgaggtgttggggttggctataaactattttatgggtctcccgggtctccctgcaccctgtacccttatccttaaagccaagtatactttttgttggcttctgtgcacacatgtgtgtttgataattcccatgcaattcagctggggagaacaactttttaggtttcattatctcataagcatgggctcaacatgattagattggagtgttctccatccgtctttgtatccatgcaaccattaggygaacaaacccaggctagtctaatggatcatgagatacaccctgtggaacagagagaaatcatcttagctaaggcactctaaaccaacgagccctccagctgatccagcaacagactacaaagggagtccagctgaactcagcccaaactgctgacttatggaatcatgagctaaataaatgaatgttgtttgaagcctctaagttttaagttgagggtcatttgttacaaagcaaaagctaactgacctactgagtatgtctcaaaa

SEQ ID NO: 723227 - DNA, 1436 bp, Homo sapiens
aagtgggaaaattgaaaaatatatatattttaaaagattttggaactgcagaacagacaaatgtcccaactcttaaaatctgaagttaataaacggytcaaaaatcttgctgagctaattaattagacctgttccccaaacactccctgttgtcttgaagttgaaggaagaaaaggctctttttcccacccctcccccatccagcaggaggagctggaaatagagacttggtaagtggactcccgaaagggttatccctttccagtaagcctaggtacagttagtgctactaggacaggatgctggctgagtacaagctcagccggaattcccaaaacagaggcacagctggggtggggcagaagcagagtcctccaaattcacagctgctaccagtttcaaaactgtttttagaagccgcagggctgggagtggaacaggttctgttcacttagtgtggctcagtttgcaattctgggacaggagccaggtagaggattttctcccataattcttaaagatgacgtgtgctctccggagagatgtaacattacagactattagaactcggtgggccttgggaggtcttctagtggatccatccactcatcctacaggccaggcagtggaggctcaaaaagttaagcaacttgcctaaggtcacataaatggcctctgacagagctaggactctgttagctcagaaaacccagtattttcttccaactcatttatagttggttatccaaatcaaaattacattaaaattttcagatataaaacataaactttggcacatatatttaaattttaactgtagtaaaatacacatgacataaaatttatcatcttacccatttttaaatgtacgatacagcagcattaagtaaattcacattattatatatatatttaatttggattccatttctaccattttattttatgcattctattgttccgccttttctacattcttttatattccttctttacttttttggattacatttcatgttttattttttcttattctatttttttcttttactagtttagaacttatatctttgttttttatattttatgggatgtcctagaatttatagcatatatataaaaatgtatatacacacacatacatatatatacgcatgtatatatgtgtgtactttaatgaagtgtgtaatttaataaagtcttaagttaatcaatgttttaccctcctgaacaaaacacatacctttggttttttgttttttatttcctttaaaattttttatttctataggtttttgaggaacaggtggtatttggttacgtgagtaagttctttagtggtgatttgtgggactttggtgcacccatctcccgagcagtatacactgaatccaatttgagtcttttattgttcaccccccacccccatgtacata

SEQ ID NO: 723228 - DNA, 931 bp, Homo sapiens
tgtcccaatttattcaaacttcctttcttctgaatctatttataacatagataagcggatgcagtaagcccaggaaaagctaaaaataaagaagtaattttaaaaaataagcaggtttgtgatgttctgatttgggagggatagccagagctcagtgagatgagaaaatcttggtaaagagaaatagccctacgtaagaaactatgaagtgctgatgaggacattggaacagaattgtagtgggaaatgcctggtcttccagagatgcagggtcactggtattaggagtatctctcagcaaatttataaacatttattaaaataaaaataaatccataaaaatgcatctacttcagatgaaaatattggaaaaagggggtgtgggagaaaaaaatgattgattggcttcttacatcaaagtttatgagccttaagggaaccagtgttgggagaattgcaagagggtggcctagatcaaagggagatttgtttttatccgtcagtgacctggcgaagaaatactaattacgaccatgaagtaactccatggtatatcttgtggccctgtgactgtttttgagaagagaaaggagggcagggcagctggcaaggagattaaagtcagtagaaaataataaattgaatttgtgaactttctgaaagttaaatgagaatagaacaaaatgattttgcaataatggttacaaaatgtcctataaattaaacagcaaagtcaccatrttcctttcctagaagaagaagtgcgaacacaagggtctggggataggtaattacagtaaacacatgtgaatgatgcagggttaaactttatttatttatttattttttaaatcttacaccccaaaaggaaatgaagtttgctgagaatcagttgaaactggcagagctctggcactttggagatcattaa

SEQ ID NO: 723229 - DNA, 550 bp, Homo sapiens
ttgtggcctattcccttatctggctgcaacagccccaatccatttcattgaagccctattccttttttactatatttttatttcttcctgcgggtgagacaagaaagtttgagtgggctggagtgatgaggaattttcttctcccaggtgggataaggtttcagtattgccctctggggaactcttttttctggagagtaggactttgttgtggagttagctctgggagggtttcacaatggctatttctgtcagaaccatgagaaagtctttcttgaatccttgaagtgagaatttagtagagttcctggagtgaaagaccaagaaaatataaagacctcctgtgactgcagctccaggagtttcttgctttcatkctagtctgtactcatgctttatctgctcatcaaatctactagttataatggttaattttatgcatcaacttggctaggtcatggtacccagtttatttggtcaagtatcagtctagatgttactgtaaaagtatatttcagatgtgattaacatttaaattgaagacgttgag

SEQ ID NO: 723230 - DNA, 600 bp, Homo sapiens
cagtggatgcaaatgcaaacatattcttgattgagatctgtgaaatctccagaaagttcttaatattgatttacatcctcccttgcagaaataattaatattgattactgagaggcacttagcttgataataattgcacccagttcacaacaaaagcaagtcaattgtggtgcttaggaatttttaatagtgatttttgtcttttattattttatttttcatgtctaaatgagaattgaccttgcataaaatctgtttagcaaattcarattagacaaagcaaaaatatttatatgggtgggtaggcttgaaagtagctgaaacgtctaaaaataatgtgggaataattggcataatagggcaaatcatcaattatgacgcatgcttcaaaactgatttgaacgtggtacctcagtatgtgacttaagtgatacagtaaataatgttaaataaagaaataccatgacttatgcaaatctaatatgtggatatttgaattaatcaaggaaatgtaagaatcctcttaatttaaagaaaaaataatttatcctgtaccacccacagttaacctaaattgtcatgtattccacttaagaaaaa

SEQ ID NO: 723231 - DNA, 930 bp, Homo sapiens
ttggtcgtctagagcagtrtttcccaatttttcacttccaagttattttcatgccttttatattctgaaacattctggcaaacaaaccacggttaaaggaaagattgtttttaaaaatttttttttttaaattatttttatttttaactattttttagtttttgagacaatctcgtactttcacccgggctggagtgcagtggcgtgatcttggctcactgcagcctctgcctcctagggttctcctgcttcagcatccccagtaacaggtgctcaccacccacacctgtctaatttttgtatttttagtagagatggggttttgccatgttggccaggctggtcttgaactcctgacctcacgcgatccgtctgcctcggcctcccaaagtgctgggattacaggcatgagcctttttttgatagttcaatttggttggttagtttaataatgaaaactgcctttgccaattaggttacatggtatatgttttctatacatcgaataagctaatctgcagctttaggtaaagctgttttggaaaagattgagccatactggcagaagtgtactttttgttttcaaaaataagttttagttgtttttttttctttgagacaccgtctcatgccattgccaggctgaactgcagtgatgtgatcatggctcactacagcctcgaactgctgggctccggtgatcctcctgcctcagcctcctgaatacctgggactgtaggtgtgtaccaccactcccaggtaatttttaaagtttctgtagggacaaggtctccctgtgttgcccaggctagacttgcacccctgagctcaagtgatcctcctgcctcagcctcctaaagtgctgagattaaaggcatgagctactgtgcccggccattgtaatattctttcaacttttatgatgacttg

SEQ ID NO: 723232 - DNA, 930 bp, Homo sapiens
ttggtcgtctagagcagtatttcccaatttttcacttccaagttattttcatgccttttatattctgaaacattctggcaaacaaaccacggttaaaggaaagattgtttttaaaaattttttttttwaaattatttttatttttaactattttttagtttttgagacaatctcgtactttcacccgggctggagtgcagtggcgtgatcttggctcactgcagcctctgcctcctagggttctcctgcttcagcatccccagtaacaggtgctcaccacccacacctgtctaatttttgtatttttagtagagatggggttttgccatgttggccaggctggtcttgaactcctgacctcacgcgatccgtctgcctcggcctcccaaagtgctgggattacaggcatgagcctttttttgatagttcaatttggttggttagtttaataatgaaaactgcctttgccaattaggttacatggtatatgttttctatacatcgaataagctaatctgcagctttaggtaaagctgttttggaaaagattgagccatactggcagaagtgtactttttgttttcaaaaataagttttagttgtttttttttctttgagacaccgtctcatgccattgccaggctgaactgcagtgatgtgatcatggctcactacagcctcgaactgctgggctccggtgatcctcctgcctcagcctcctgaatacctgggactgtaggtgtgtaccaccactcccaggtaatttttaaagtttctgtagggacaaggtctccctgtgttgcccaggctagacttgcacccctgagctcaagtgatcctcctgcctcagcctcctaaagtgctgagattaaaggcatgagctactgtgcccggccattgtaatattctttcaacttttatgatgacttg

SEQ ID NO: 723233 - DNA, 930 bp, Homo sapiens
ttggtcgtctagagcagtatttcccaatttttcacttccaagttattttcatgccttttatattctgaaacattctggcaaacaaaccacggttaaaggaaagattgtttttaaaaatttttttttttaaattatttttatttttaactattttttagtttttgagacaatctcgtactttcacccgggctggagtgcagtggcgtgatcttggctcactgcagcctctgcctcctagggttctcctgcttcagcatccccagtaacaggtgctcaccacccacacctgtctaatttttgtatttttagtagagatggggttttgccatgttggccaggctggtcttgaactcctgacctcacgcgatccgtctgcctcggcctcccaaagtgctgggattacaggcatgagcctttttttgatagttcaatttggttggttagtttaataatgaaaactgcctttgccaattaggttacatggtatatgttttctatacatcgaataagctaatctgcagctttaggtaaagctgttttggaaaagattgagccatactggcagaagtgtactttttgttttcaaaaataagttttagttgtttttttttctttgagacaccgtctcatgccattgccagkctgaactgcagtgatgtgatcatggctcactacagcctcgaactgctgggctccggtgatcctcctgcctcagcctcctgaatacctgggactgtaggtgtgtaccaccactcccaggtaatttttaaagtttctgtagggacaaggtctccctgtgttgcccaggctagacttgcacccctgagctcaagtgatcctcctgcctcagcctcctaaagtgctgagattaaaggcatgagctactgtgcccggccattgtaatattctttcaacttttatgatgacttg

SEQ ID NO: 723234 - DNA, 1247 bp, Homo sapiens
taacctttgatttgaggattctttgagccagatttaatttattgtgattattttttgatatttatttatttttatcttcattttttgagagacgaagtctcactctgtcagctaggctggagtgcagtggcgtagtctcagctcactgcagcctctacctcctgagttcaagtgattctcctgcttcaccttcccaagtagctgggactacaggtgtgcatcaccacacgagctaatttttgtattttttagtagagttggggtttcactatatgttggccaagctggtcttgaactcctgacctcaggtgatccgcccaccttggcttccaaagtgctgggattacaggctgtgcctggcctattttttgatatttaaatgtcagtattattttatgtaaatttgtcatctgttttcactttcaaattatcagtgcttagtttactatgtggcacatagtaggtgctcaataaaatacatatattggacaatataagtgtttttatttaatatatgggatgaaatttatgggaaaaatatataggatgaaaaatggattttgtctttctcaaaatactgagtagttcatattttaagttcaaaataggattgattatttctttacagaattgtgcttatttttgctaacagaaagcttgttttttttttttktttttccccagggagccacagtagcagaaattaaaaaacaatatcgtttgctgtcacttaaatatcatccagataaaggaggtgatgaggttatgttcatgaggatagcaaaagcttatgctgcgtaagtatcaggatccattacaaatttttaagaatggtacagataagccaggtgcagtggttcatgcctgtaatcccagtactttgggaggctgaggcaggaggatcgcttgagcccaggagtttgagaccatccctggcaacataccaagaccccatctctacaaaaaataaaagaattaaccctgtgtggtggtgtgtgcctgtagtcctagctacttgggaggctgaggtgggagcgttgtttgagcctgggaggtcaaggctgcagtgagccgtgaccatgccactgcagcccaacttcgatgacagtaatactccatctctaaagaaaaaaaaaaaaaggatagttttctgttttaataaaatattaaaatagttgtcatacactttttccaagtgcttacttcatgttgagtctatcatttaggggctacacagcagcactaac

SEQ ID NO: 723235 - DNA, 639 bp, Homo sapiens
atttcgtcacacaagattattcttagttaataacaactgtacttgttgagatgtggatttttaaggtctcctttttcactgctcagaaactgtcttcacaaatcttttcagaacttccaaataattttccttgttggtcttatrccttaggtaaggtgcattgttattatgagatacatatattcacatatgcgttatatgcacacacatatgtctgtgtatttataaagtttgaggaacatttgtgcacccttttgggaagcagaatagagtgtgtaacattagatgcagtgatctcttgcgtattaatcttccaagagataaaacttaactagattcttcaggactcttcataagtacatccccacatagctcttacattgaatgaaagagtgaaatatgagattgtctgtcttttgaggactcagtgatgtataattttgtgaactcaatttaaacgtgtaaataaatacaagcatactttggagatactataggttcagttccagtctcctgcaataaagcaaatattgcaataaagtgagtcacaaatttttttgtttcctactgcatataaaagttgtttatactacaccatagtctattaagcgtgcagtagccttatgtcttttttttttt

SEQ ID NO: 723236 - DNA, 639 bp, Homo sapiens
atttcgtcacacaagattattcttagttaataacaactgtacttgttgagatgtggatttttaaggtctcctttttcactgctcagaaactgtcttcacaaatcttttcagaacttccaaataattttccttgttggtcttatgccttaggtaaggtgcattgttattatgagatacatatattcacatatgcgttatatgcacacacatatgtctgtgtatttataaagtttgaggaacatttgtgcacccttttgggaagcagaatagagtrtgtaacattagatgcagtgatctcttgcgtattaatcttccaagagataaaacttaactagattcttcaggactcttcataagtacatccccacatagctcttacattgaatgaaagagtgaaatatgagattgtctgtcttttgaggactcagtgatgtataattttgtgaactcaatttaaacgtgtaaataaatacaagcatactttggagatactataggttcagttccagtctcctgcaataaagcaaatattgcaataaagtgagtcacaaatttttttgtttcctactgcatataaaagttgtttatactacaccatagtctattaagcgtgcagtagccttatgtcttttttttttt

SEQ ID NO: 723237 - DNA, 639 bp, Homo sapiens
atttcgtcacacaagattattcttagttaataacaactgtacttgttgagatgtggatttttaaggtctcctttttcactgctcagaaactgtcttcacaaatcttttcagaacttccaaataattttccttgttggtcttatgccttaggtaaggtgcattgttattatgagatacatatattcacatatgcgttatatgcacacacatatgtctgtgtatttataaagtttgaggaacatttgtgcacccttttgggaagcagaatagagtgtgtaacattagatgcagtgatctcttgsgtattaatcttccaagagataaaacttaactagattcttcaggactcttcataagtacatccccacatagctcttacattgaatgaaagagtgaaatatgagattgtctgtcttttgaggactcagtgatgtataattttgtgaactcaatttaaacgtgtaaataaatacaagcatactttggagatactataggttcagttccagtctcctgcaataaagcaaatattgcaataaagtgagtcacaaatttttttgtttcctactgcatataaaagttgtttatactacaccatagtctattaagcgtgcagtagccttatgtcttttttttttt

SEQ ID NO: 723238 - DNA, 1304 bp, Homo sapiens
tggctcactgcaacctccgcctaccaagttcaagcgattctcctgcctgagcctcccgagtagctgagattacaggcatgtgccaccatgcccagctatttttttgtttgtttgtttgttttttgtatttttagtagggacggggtttcaccatgttggtcaggctggtctcaaactcctgaccttaaattatccacctgcctcggcctcccagagtgctgggattatagcatgagccactgcgtcccgcctgtttctgctttctttgcatttaatttgctgttcttgattcttaaagtgagctagtattttgctgaagatattgcctttacttactgcatcataccttgttagttaaagaaagtgattctgtacttccaaaggagtacttttctttatttctttttttttttgagatagggtcttgctctgtcacccagactgaagtgctgtggcatggtcatgccttactgcagccttaaactcctgggctcaaatgattctcccacctcaacctcccaactagctgggactacagacgtgtaccaccatgcctagtgatatatatatatatataattttttttttttaagggatcaggtcttgctrtgttgcccatgctggtttgaactcctggcctcaagcagtcttcctgcctctgccttccaaagtgctaagattacatgcatgagtcgctgtgactggccccaaaattatacttttctataaactacctgtttccttaaataaaatatgattgatgtttttgaaagcagaaccatcttagcctttgtgttattgggctttgcaaatagaaatacttttatttgacaaattatgaagaatgaataaaataactaacaatagacagactagccagatattaaactctttagtctgactcccacatctttataagtaggaatgtttataattttaaaaaattgtatatgaatagtgaaattgtcatcgagtcagtttagttaaattgacaataagttaacttcagggattcagattgatatgttctcattgagatatgcagaatctttgtgtttgcctttcccttttaggaagctgcagtaaaggaagatgaagaagaagtttcagataagggcagtgattctgaagaagaagaaaccaatagagattcccaaagtgagaaagatgatggtagtgacagagactctgatagagagcaagatgaaaaacaaaacaaagatgatgaagcagtaagccttataggtttaaataatttaaataattggaattatatctctgatgatagctttgggttttgttgt

SEQ ID NO: 723239 - DNA, 957 bp, Homo sapiens
ttttctcaactgttaccttactaattcagtgtttctataaaaattttagtttatgagatgacattatcaaagtgatctaataaataagtatgccaattagactggtgagctatagattcttcattttcactttaacattaaaaatataattttcagtatggcttggtgctatggactgaatatttgtatcctccccaaattcctatgttgaaatcataccccaaggtgcagttattaggaggtgaggcctttgggaggtgattaggtcttgaaggcagagcagggtaacattagtggccttgtaagagagaccacagagagctagccagcttcttctaccatgtaaggacacagcaacagggcaccttctatgaggaacaggccctcaccagacactgaatctaccagcaccctgatcttggacttcccagcctccagaagtataagaaaataaatgtctactgtttacaagccacattgtttacagtattttgttacagcagcccaatggactaagtcacttggattcagagttctctcccaagtcaaacactgggaagggcttggagaaaatggtggccatgtgtcaagcctggagaagtgtcatycttcagacattgaagatgctggagtcagcattgttgacacactccagcattggtccttgcagtggaggaaggctcttcttcacacagcagacatggcagagaaaatggacacaaactaaaagtaggtgtccagcagtcgggtgcggtggctcacgcctgtaattctagtgctttgggaggccgaggtgggaggattgcttgagcccaggaattcaagaccagtctgggcaacataacgagaacaagtctctataaaaataaaaataaaaaccatataaaagtaggtatccatagtgctctgtgtccattagacattaataaaaggattccagttgagaggaacaacatt

SEQ ID NO: 723240 - DNA, 1245 bp, Homo sapiens
tgtctattaggaataaaactggtgtaaacatttgtgtacagatttttgagtgaacatacttttccttgctctgtgataaatgccaaggagtgcaattgctggtttgcatgggaattgcgtgtttacttttataagaaactggcaaactgtttcccagagtggctgtaccattatatggttttaccagcaatgtatgagtggtctagtttctctaaatccttggcagcatttgtcattgtctggacttcttttttttctgagacagggtctcactttatcacccaagctggagcacagtgacatgaacacagctccctgcagcctcaatctcccaggcttaagtgatcctcccacctcagcctcccaagtagctgggactacaggcgtgtgccaccacacccggctaatttttgtactttttgtagagatgggtttcaccacgttgtccagctgcttcttgaactcctgggttcaagcaagctttctgccttggcctcccaaagtgctgggattctttttttttttttttttttttttgagaactaagttgaaggaaaaacaatgtctggcaggagcaagagccctgatgacctcttgtttcccacagttctgctgttgcctgtttgggggagaggaatgtggcactcctctctccaggatggtggccttaaagtgtatgaaaagtcattcctagtctccactttggtttcttctgtttgatttggaatttgggttacatcatctttgccaaccccttcttcttccacaccctttgtaaaatgggtcagaagcaggacttcttttcttcttaaactgagcaagtaggggaagtggcatacaaatcgaactattctgttttgtttacctattctctttaaaactgcccatctgttgtccatttgttttcttttgaaaagttaatctgaaatccacccccccggcccctgaacgacagggtctcactgtgttgcacaagctggagtgcartggcactatcacaatcacgagccttgctcaagtgattgcctcttgcaatcacttgaactgagccttgcccagttcagcctcttgagtagctgggactacaggcacatgccaccatgcctgcctaattaaatttttttattaattaattttttttagagacagtctcattattttgcccaggctggtcttgaacttctggactcaagcgattctcccacgtcggcctcccaaagtgctgggattataggcatgagccaa

SEQ ID NO: 723241 - DNA, 1379 bp, Homo sapiens
tgcttagaaggcagactggatcagaygacctcttgggatcctttcgagctcagtaattctaacttttatattcaatgagttttatcttgcacttatcacccattgctcaacctggccctttcctctttaccacatattttctttatgtcttaattttccttttatactcacagagggtgtctaaccctttattggtataattatggaaatgtttttatgtgaacattaatctaacaatgaaggagacaagagcagaatgccaggttcagtaatgcttatgcagtcatgagcatgaaacactcttagaacattttattttatttatttacttttttaagacagggtcttactcttttgcccaagctggagtgtagtagcgcaatctcggctcactgcaaaaccccctccccggctcaagggatcctcccaagtcagcttcctgaggagctgggattagcatgtgttaccacacctggctaatttttgtatttttagtagagctggggtttcatcatattggccaggctggtctcaaactcctgacctcaagtgatccatccatctcggactcccaaagtgctaggattataggcataagccaccatgcctcttagaacattttaaaaaattaagtcttggcttgaaatctgatgtagtgtgactatacttgagaataataggaaatttcccaaatgctaaagacttaaagtacaagagaaagtcagtgttcttttttcatacataactttctacaggaaagataaaagaaaaactatcacaatattatgtattatttatcctcgctagtttatcaaacaacagttttgtaatttaatgaaattcctgttttctatatgagtatattgctctaacatatgctgtatatgattaatgtttcatttgtttggctagttactgctcattgctctgtgtgtgtgtgtgtgtgtgtgtgtgcgagacagagagagaccatgttaaacacagtattattcacctgttgttcgcctgttggttaacgctctggtatccatgtcccacttaacctttcccaacagtctacacttctattggaaatttattgttactctacccccaactatcccattatttcagggataaaatgaatgacatgtactgcgcccaagaaagtcttattgccctcattgcagtgattagatcagtcatgggtctgtggtctaagtcaagtgcgaatttcaggatttttgctgacaattctggaacacatgtttctttctttctgtgtagtgtgggatgtggatgtgaagggagaactgctatcctcactttgccaccatatagtatgttcacctcagaatgaatcgaacacattttctctgactttacaatacaaaaaaatg

SEQ ID NO: 723242 - DNA, 1379 bp, Homo sapiens
tgcttagaaggcagactggatcagatgacctcttgggatcctttcgagctcagtaattctaacttttatattcaatgagttttatcttgcacttatcacccattgctcaacctggccctttcctctttaccacatattttctttatgtcttaattttccttttatactcacagagggtgtctaaccctttattggtataattatggaaatgtttttatgtgaacattaatctaacaatgaaggagacaagagcagaatgccaggttcagtaatgcttatgcagtcatgagcatgaaacactcttagaacattttattttatttatttacttttttaagacagggtcttactcttttgcccaagctggagtgtagtagcgcaatctcggctcactgcaaaaccmcctccccggctcaagggatcctcccaagtcagcttcctgaggagctgggattagcatgtgttaccacacctggctaatttttgtatttttagtagagctggggtttcatcatattggccaggctggtctcaaactcctgacctcaagtgatccatccatctcggactcccaaagtgctaggattataggcataagccaccatgcctcttagaacattttaaaaaattaagtcttggcttgaaatctgatgtagtgtgactatacttgagaataataggaaatttcccaaatgctaaagacttaaagtacaagagaaagtcagtgttcttttttcatacataactttctacaggaaagataaaagaaaaactatcacaatattatgtattatttatcctcgctagtttatcaaacaacagttttgtaatttaatgaaattcctgttttctatatgagtatattgctctaacatatgctgtatatgattaatgtttcatttgtttggctagttactgctcattgctctgtgtgtgtgtgtgtgtgtgtgtgtgcgagacagagagagaccatgttaaacacagtattattcacctgttgttcgcctgttggttaacgctctggtatccatgtcccacttaacctttcccaacagtctacacttctattggaaatttattgttactctacccccaactatcccattatttcagggataaaatgaatgacatgtactgcgcccaagaaagtcttattgccctcattgcagtgattagatcagtcatgggtctgtggtctaagtcaagtgcgaatttcaggatttttgctgacaattctggaacacatgtttctttctttctgtgtagtgtgggatgtggatgtgaagggagaactgctatcctcactttgccaccatatagtatgttcacctcagaatgaatcgaacacattttctctgactttacaatacaaaaaaatg

SEQ ID NO: 723243 - DNA, 1379 bp, Homo sapiens
tgcttagaaggcagactggatcagatgacctcttgggatcctttcgagctcagtaattctaacttttatattcaatgagttttatcttgcacttatcacccattgctcaacctggccctttcctctttaccacatattttctttatgtcttaattttccttttatactcacagagggtgtctaaccctttattggtataattatggaaatgtttttatgtgaacattaatctaacaatgaaggagacaagagcagaatgccaggttcagtaatgcttatgcagtcatgagcatgaaacactcttagaacattttattttatttatttacttttttaagacagggtcttactcttttgcccaagctggagtgtagtagcgcaatctcggctcactgcaaaaccccctccccggctcaagggatcctcccaagtcagcttcctgaggagctgggattagcatgtgttaccacacctggctaatttttgtatttttagtagagctggggtttcatcatattggccaggctggtctcaaactcctgacctcaagtgatccatccatctcggactcccaaagtgctaggattataggcataagccaccatgcctcttagaacattttaaaaaattaagtcttggcttgaaatctgatgtagtgtgactatacttgagaataataggaaatttcccaaatgctaaagacttaaagtacaagagaaagtcagtgttcttttttcatacataactttctacaggaaagataaaagaaaaactatcacaatattatgtattatttatcctcgctagtttatcaaacaacagttttgtaatttaatgaaattcctgttttctatatgagtatattgctctaacatatgctgtatatgattaatgtttcatttgtttggctagttactgctcattgctctgtgtgtrtgtgtgtgtgtgtgtgtgcgagacagagagagaccatgttaaacacagtattattcacctgttgttcgcctgttggttaacgctctggtatccatgtcccacttaacctttcccaacagtctacacttctattggaaatttattgttactctacccccaactatcccattatttcagggataaaatgaatgacatgtactgcgcccaagaaagtcttattgccctcattgcagtgattagatcagtcatgggtctgtggtctaagtcaagtgcgaatttcaggatttttgctgacaattctggaacacatgtttctttctttctgtgtagtgtgggatgtggatgtgaagggagaactgctatcctcactttgccaccatatagtatgttcacctcagaatgaatcgaacacattttctctgactttacaatacaaaaaaatg

SEQ ID NO: 723244 - DNA, 680 bp, Homo sapiens
gaaagatttctcagactgctattttctctttttaggttgacttatttattgcccccacttcagaaattactttttgaaattgccccagatatcaggttccagaggacagaagcaaacaacaaaggttaatcctgagtatacagatattaataaaaatagaaaagaaatgtgaaaaataagtacattcactaataaaagtagtttagtattctttttgtgattgatcaatatgctaaaaatacaacacacacacacayacacaacaaagttagtaaaactaaacaaaaacacgtatcgcccatcattcagcattcacaatacaatgatttgctgaaatttctcttaattttttctatgttttatgccaactttattgtggtagcagattgtggtatattccctcccctagagcatggaagggacctgtaaatatgatgggatctttcattattaggttgtgttatatgtagtacagatgactttaagaaagagggactagggtgaggaggaaagggagggagagaattaacctaatgcatgcagggcttaaagcctagatgacaagttgatgggtacagaaaacaaccatggcacttgtatacctatgtaacaaatctgcacgttctgcacatgtatcccagtacttaaagttaaataaataaataaataaataaataaat

SEQ ID NO: 723245 - DNA, 680 bp, Homo sapiens
gaaagatttctcagactgctattttctctttttaggttgacttatttattgcccccacttcagaaattactttttgaaattgccccagatatcaggttccagaggacagaagcaaacaacaaaggttaatcctgagtatacagatattaataaaaatagaaaagaaatgtgaaaaataagtacattcactaataaaagtagtttagtattctttttgtgattgatcaatatgctaaaaatacaacacacacacacatacacaacaaagttagtaaaactaaacaaaaacacgtatcgcccatcattcagcattcacaatacaatgatttgctgaaatttctcttaattttttctatgttttatgccaactttattgtggtagcagattgtggtatattccctcccctagagcatggaagggacctgtaaatatgatgggatctttcattattaggttgtgttatatgtagtacagatgactttaagaaaragggactagggtgaggaggaaagggagggagagaattaacctaatgcatgcagggcttaaagcctagatgacaagttgatgggtacagaaaacaaccatggcacttgtatacctatgtaacaaatctgcacgttctgcacatgtatcccagtacttaaagttaaataaataaataaataaataaataaat

SEQ ID NO: 723246 - DNA, 1027 bp, Homo sapiens
atgggaaacagcaaaatcacagtttcacacagctctagtgtaaaggggtagattgaaatggccatctayagcaacagaggaaagtctgaatgataagcaaatatctgggaaaaagaaatagaacaatgagaaaaatggccatatcctcctcctgcccccccccgccaaaacccagtaaaacaataattttcttggatttttacccaatttcagcatgtttcatccacttctacagaaataaaaatgaaatatgcagttcacttttatgtgttgcagtatcacagtctcacactgtgcaaagcaatgacccagccaggaacatgtggctacccttagggatatggttaccagttaccacctacatgtggaaaaactcacttgttttctttcacaattggtgttcttttttggcagggtaaattgtccttgctaaacttaatagagacacagtttcttttattagctttgttagtctcccctggggtcaacatcctccttagtttctctgtcctctccagcaagggaacctcttcccttacaccatgatatgccagtccttcgagttataagctctgtgggtagcagcaatgtttcttctgctcccggacacccacatcttcacacatgtggctccactgggaccacagtgaacacatcccctgcctctaggtccctctccatctgctgacttcagcatactgtccatcccacactttcacagcctttacaaagtgccatcaatattaagaaatttctcttcatccctagcctgttaagctacttcttgcccacaatggaagccttttctaaaaccctgcctcctccatttagcctccccagatgaagcagggtgacaggctatacccgctacccccccacaggctacggggatattgctgcttcttctttttttcttttttatatacttgaattcgcctcccttctcctaatgcacaggtaccccagacctcttattaggtattttattttctaccacacatatattttgagcattcggtttgaaaat

SEQ ID NO: 723247 - DNA, 2159 bp, Homo sapiens
cagaatggctatacctatgacggagaggccaactagccacagtgggttctgcccagccacgtcctgcctggtcccgacggcgccacataactcaagtctgggtggggtgggtggcggccgggtgggagggcagtcaccgaattatggcagacacagagaagggtcaccacatgtgctacaactgccaactcctaaatggtttgttcccaacagaacctgggacgaagatggttcgcaaggtccctcatctcggagtaagtctgtttactggtaaagagcatcatggataatccactctgatgttctagaatcaaggaatttttcaatcccttacccgctgcttgtgtaccaggagagcctttttattttcttttttcttttcttttcttgttagagcaataaagagcagcaggtcagcagccttcataatagaaccattttgctcaacaaacactcatggctatatttgctttgaagacgtgaaactgaacccagctctggctggtgccctgggccattggccattgccctggccactcttgccccatgcctgctctgcctagacctgggtttggagtgagtgtgaggcatgtgctgcagagaaggagaaggaacagtgtggccagcccccgccctgttccatgggcagtgctccttccacggtactgggtctgtcctgatgcaatgcttggggagacgtgctttcagtcttagttgtaagaggacttggactctggagctattgctggttttcatcttacaggcactgtgcactatataactcactgggagtttcttttcactttgatgctacaatgcttagagcyaaatttttggcctgtctttggcagaggtgtacgattttttgttttgttttgttttgtttcagtctagctaaattaaaagtaggtatcttgtattttatgtatgcaaataagctatctgaaatccttctttaagtaaagaggacattgataaacatatagcaatgtaatattgaggagacatgaccagttttagatttgcacagtattcacttagtcatctcaatcaattatttaattggtttttcttccttccttctctcataaaaatgtcaatagaaaagtcacaattcctcagacccagttctgtcccctgttcttcaaaacatacattcagttgggcccttattccctcttctcttttcacgtctcatttgaagtttaatcaaactctgtgaattgttataattgatttacatgctggcaggctcttaaggccacccctctccacctgccacagcccactccaggtttcccaaggcagggttagtgccatctgggggtgggagcccgtcatgcacctgaacacgtgtggccagcagtccgggttgtggcttcccatctccaggcctacgctgaggatggcctccatgcacaagacgtgggcagtgtgcagccacaccccctgcaccttcccaatctgctccagtttctgctccacttttagtttcactgtgccagaaagacatttattaaaataacaggttgagtaagggagacagaaagaatgaaaatgaaagaatgtgtgtcatgcaagggcaaaagggaaaggacagacttcagtggcagcaagcacctccacagtaggtccttgcggaccatcatgcaaaccacccagccagcaggtcccacgtgctggtggccccagctctccagctccagaagtgggatggatcctgagctggcaggtgccattccttccaggccctttcatgggctctgggtcaggcacagcagtgtggatgggtttcatgagccaattccagctaaaaccatctgggcccagacctttcacccttcccaaaaattggtcaaatggaagaattcctggctttctgcaagttttctctgagattattgtaatgttaggctctcattatgatcatcatctctaaaacaacttatttacgtatattttgagcaccagaatgactgctctatcactgaaaatgaccaatttcatttcatcccttgagtttgtatttgtgagctccaaataatactttaaaaaattgtagcctgggtgtggtggctcacatctgtaatcccagcacattgggaggccaaggcaggtggatcaccagaggttgggagttcgagaccagcctgaacaac

SEQ ID NO: 723248 - DNA, 898 bp, Homo sapiens
ttaggtttagccagccaagtaattctaggtcacttctatcttttcacatttagcatggaagtgtttttctggttacatctccaaatacattgctttagtgtttttacagttctactacacagtctttgcaaatggaccactattttctaatcaagaaaccaaggacaatttgtgtcacatcatccttgttcccttcttgcaattttggaagccttgaggagtgatgttactaaggaggagggtgatgcagattttgaaggtgaggatgggagccacttcagggctcagcatctgccccgacaatgcctctttcccagctgcttcaccattgctgtgctccctacctgggcctctcagtcatcccacttcctgtgaggccatcctcatagggctaacaagaattatggacagaagtagttataatcaagcattcatcaggctgctttgacccacttccttgttctgaaagtctcatagcactagtagatactgaccgtttgcatccccgctgttcctatgcatagaatttctgacatgagagtcacaaggcttttgtttgagatagataggatctatcyatcacgatcataaggcttttatttaaaaactacttaaaatgtttttcagatccgaattccagtgaaatagctgatgccaaccagtttgaagactcccataatgcagtggaatcagcatgagaatacagtttcttcatctccctgtcccatgacttcaccctgcgctctgaccaatcagtgacctccacactttggcccaccccaaaactctaaaaaatcctagctccaaactcctcagggaaatggatttaaggtttcctcctgtcccttcattcagcagccttatgattaaacctctttctctgttgcaacctgatgtc

SEQ ID NO: 723249 - DNA, 2258 bp, Homo sapiens
ctgcagggccagtgaagtgcttccttcccaggactctcgctcttggatttccacgatgccatccctgcctccttcttgatgtggattcccataatgctaacctgagctagacccctagttctccatatccaacccatctccatggccaggcctctctttcacggtcaagtcaagatagcaaatgccttgtggtccccaccaagcttgattggtaaaggcctctgctaatatcagggtttccatttggttttaccttagaagaagagctgtggttgggggcatagtaagttgccacactgctgacttgtggaaggcccaactatctctctactctgagtagctctaaagcatcctggtcaacttgtcttcccaatacgtttttctcatcagctgaggaaaaggaagggtgtgctacggatggatgctttggaagatggtatgaaacactttcacactggttgtgtttcattatttacttcagattggttgtctggtttaatcatttcatttccactgatgacagaaratttaattttgctatcaagacaattttggctaggcacggtggctcatgactgtaatcccagtgatttgggaggccgaggcaagaggattacttgaggccaggagtttgagaccagcctgtcaacatagcaagacctcatctctaccaaaataaaaaataaaaaaattagccaggcatggtggcccatagctactcgggaggttaagtgaggatcacttgagctcaagtgtttgaggcttcagtgagctatgatggcaccactgcactccagcctgagtgacagagcaagatcctgtctgatatggtttggctctgtgccctcacccaaatcttatctcaaattgtaatccccttgtgtcagggagggatgtggtgggaggtgattggatcatgggggcggtttccccaggctgttctcatcattgtgagtgagctctcatgagatctgatggtttaaaagtgttgtacttccccccataaattacccagtctcaggtagtatctttatagcagtgtgagaatgaactaagacattgtctcaaataagtaacaaataaacaaataagtaaatgaccattttaccccttctattttaatacagagacaaatatcattctgtctcttgcccttccatttccccgggtgcccacagagtgtcctggtactgagagagagagaagcgggtcttggtgtggccccatcttggtgggtcccacggaagggtctagtcctggtggtcttaggcaacaggcagtgtgcaggctgcacctacacccagacatagtctgcctcccaccacctccaaacccagatcacagggcccttctggctggtccatcatcaaccaatctccatgccccttgggagtagtttccaagtctcttgggatatttgttcccttgcatttttggagactaggggaaggggaggagggttgttgcctatctcaggcctctctcacctttgctatttatatatacatacacatatatatacacacacacacatatatatacatatatacatatatatacacatatatacacatatatatacacatatatatacacacacatacatatatatataatttgatttttttcaactagcatgcacttaaatttttttaaaaaatattttgaaaatttttgggggtacctagtagatgtatatattaacatgcactttttgtattttttattgtggtaaactatatatagcattaagttgatcatcttaaccgcttgtaagggtacagttggtggcattacagttacattcacaatgttgtgcaaccatcaccagtatttccaaaccttcttcaccaggccaccagaaactcgagacccattaaatagcccctttcaccttcccccagccccaggtaacctccagactgctttctctctctgtgaatttgatgactctaggcacctcgtatcatgtgaaactacacagcattggtccttttgtcaccagcttatttcacttaccacaatggcctcgaggttcatccatgttgtagcaggtgtcagaactctcccaaaagattgcaaaaaccataatctcacacaaaggtcatcacaaccttacacaaaaaaaatacttctgggaggacatctgcccagcaacagcctgtccaatctcgaattggcatcattcttattattggtccttgtagccaaggataattatctcaaaattttgagatagttattttatatcaaaataa

SEQ ID NO: 723250 - DNA, 640 bp, Homo sapiens
accctcactaatatcaacccaccaagggtatttatcatatagctaattgctcagagggtttataatgttgacatttatcatgtattacctactatgtgccagcactgtattaatcctttatctacattaccccaatgaattctcaggatraggcatcctatgagaaactccactgctctgaaaagaaaagtaaatgaagaactacctaccgcggcccagccgcagtgagtgagtcagagctggagtcctcagagtatggtcctggattagagcactggcagcacctgagaacttgataaaatgcaggttcccaggcctcactccaggcttactgaatcagaaactctaggaccatggccctgcaatctgtgttctaaccgccctccagtgattctgatgctggctaaagtttgagagccactgggctacatgaaaggctctttctcacatgccctgctttattccaaattcagattctccaaacccaagcccctgcattatccagaaaagcaaattatcctaaagataaaacaattattgaaaattgttcttacatggtgtcttaataaagcaccattttgcttttctgcaaataaaaaaataatcatcagagctagtaattatttctcactcttatttt

SEQ ID NO: 723251 - DNA, 640 bp, Homo sapiens
accctcactaatatcaacccaccaagggtatttatcatatagctaattgctcagagggtttataatgttgacatttatcatgtattacctactatgtgccagcactgtattaatcctttatctacattaccccaatgaattctcaggatgaggcatcctatgagaaacwccactgctctgaaaagaaaagtaaatgaagaactacctaccgcggcccagccgcagtgagtgagtcagagctggagtcctcagagtatggtcctggattagagcactggcagcacctgagaacttgataaaatgcaggttcccaggcctcactccaggcttactgaatcagaaactctaggaccatggccctgcaatctgtgttctaaccgccctccagtgattctgatgctggctaaagtttgagagccactgggctacatgaaaggctctttctcacatgccctgctttattccaaattcagattctccaaacccaagcccctgcattatccagaaaagcaaattatcctaaagataaaacaattattgaaaattgttcttacatggtgtcttaataaagcaccattttgcttttctgcaaataaaaaaataatcatcagagctagtaattatttctcactcttatttt

SEQ ID NO: 723252 - DNA, 640 bp, Homo sapiens
accctcactaatatcaacccaccaagggtatttatcatatagctaattgctcagagggtttataatgttgacatttatcatgtattacctactatgtgccagcactgtattaatcctttatctacattaccccaatgaattctcaggatgaggcatcctatgagaaactccactgctctgaaaagaaaagtaaatgaagaactacctaccgcggcccagccgcagtgagtgagtcagagctggagtcctcagagtatggtcctggattagagcactggcagcacctgagaacttgataaaatgyaggttcccaggcctcactccaggcttactgaatcagaaactctaggaccatggccctgcaatctgtgttctaaccgccctccagtgattctgatgctggctaaagtttgagagccactgggctacatgaaaggctctttctcacatgccctgctttattccaaattcagattctccaaacccaagcccctgcattatccagaaaagcaaattatcctaaagataaaacaattattgaaaattgttcttacatggtgtcttaataaagcaccattttgcttttctgcaaataaaaaaataatcatcagagctagtaattatttctcactcttatttt

SEQ ID NO: 723253 - DNA, 640 bp, Homo sapiens
accctcactaatatcaacccaccaagggtatttatcatatagctaattgctcagagggtttataatgttgacatttatcatgtattacctactatgtgccagcactgtattaatcctttatctacattaccccaatgaattctcaggatgaggcatcctatgagaaactccactgctctgaaaagaaaagtaaatgaagaactacctaccgcggcccagccgcagtgagtgagtcagagctggagtcctcagagtatggtcctggattagagcactggcagcacctgagaacttgataaaatgcaggttcccaggcctcactccaggcttactgaatcagaaactctaggaccatggccctgcaatctgtgttctaaccgccctccagtgattctgatgctggctaaagtttgagagccactgggctacatgaaaggctctttctcacatgccctgctttattccaaattcagattctccaaacccaagcccctgcattatccagaaaagcaaattatcctaaagataaaacaattattgaaaattgttcttacatggtgtcttaataaagcaccattttgyttttctgcaaataaaaaaataatcatcagagctagtaattatttctcactcttatttt

SEQ ID NO: 723254 - DNA, 2108 bp, Homo sapiens
atgtgatttatccatttgccctctcttttgtcacctgttgataggatgcaaagcattggtagagggaaccatggtactagaagatgacagagcaaccagtttgaaagagcctggatccctgaatgaatgtatggagcagggctctctctctgttgaatggtgatgagagtgagaaataaaccttcattgtacaaagccactgaaatggttttttgttactgcagcaagtattacttgctgctactaatgccaagtataaatcatatttaaatctttgccatcctgggattcaatttaattatacaaaactaaattcatgtctactttaatattcatgttttctcatagaagataccattttttaaataataggagcgccaagccccagaacatagctctaaggtgaaaatgtataatgtcataacttattacatgacatctgggtcaagagaatagagaagacggtggggtttaaaaataaaaagtaaataagggttataaaaaatgcaatactatataaaaattgatccaatgtattcaaaaattaaagactctctatctcttaataaataccaaagtaccacaagattctttatatacaccaaggactaggcaagtagaaaaaacaaacaaacaactttaaccttataattctagaatgaaggatcatctccagagtcctcagtagggcgcttataaacagctcctaaaatcttgtcagcacaatcaagggctgtttctcaatctctttgtataaaaaactagattctgtattagtctgttctcaggctgctaataaagacatacccaaggctgcgtaatttataaaggaaagaagtttaattgactcacagttccatgtggctggggaggcctcacaatcatggcagaggacgaagaggaaccaagacacatcttacatggaggcaggcaagagagcgtgtggaggggaactgcccttcataaaaccatcagatctcataagacttactcactatcacaagaatagcacggaaaaggcccaccctcccaattcaattacctcctagggggtccctcccactgcatgtgggaattatgggagctacaattcaaggtgagatttgggtggggacacagccaaaccatatcagactttattcattttggttcttcctttgaggaaactgagtcccataaggaaatggaggaaaacatggccagcagtgccaactctcaccccattcacttcccgccctcaagggtgtgctgccctttccttagcaccacccactccagggccgtcaccatcgcagtgggggctctccgtgtttcctgagatctcaaacccaagcgtttcttggggcagcagcggggggcctcgccatggaactcccggctcccacgagggcttccgtgcctgctggctcttccggctttgagcgtccgcacgagaagccccctgctggccacattcatggcgtggggacctcgggctaaataaatttcatttctctcttctccctcctaagtgtcttccactattttcctttgttggctctggacttgttctaaatgcagccctactaaactttcggggggcctgagtgtttctggcattaaggggtgcagtggggcggggggtgcagaggggctggggctgcgctgggagatggcgttgtgttaagtgaacgtggacacagtggtatttacagcctcactaacgtgccttgtcttgctgccctagcctctgactgtgaataaaacacttctcctatttttttttttaagacaaatgacaaataaagctgggtgaagaaagtaatcatttactttgtgtcttcggacatgacatttctttcctaacatctttcggaaagctggagttccctaatgccctgctaaagaaaatgattgacatctttcagagggctaggaaatttatgcgctggaaaacaatttccaggacgttggagatgagtaatttccctctctatcactatgtgtacaaaagaaaagggacccagggcgctgatgtaactgtatgaaaaataaatgtgtggcaaaggaatagtaaaaatacttgaactgaaawcaaagagaagtaatcattttttatagtttggctg

SEQ ID NO: 723255 - DNA, 1340 bp, Homo sapiens
attactcaaaagaacacattgctgagtctgtttaattacatgtatgcaaatggtgctactgttgtacaaattgcaaatggttcataactattcttcaaaacagtctcagcaggaatttgtatatggcaacctgtttagcagttaaacttaccttaggtgctttaaagcaatttcactgaattgtttaaattttagcatattttgagagaaatgcatgtcttccttttccctcaattagttcagattagtgaggttgtactatatatttaattccagtactgctgtaggtacctggtaaaggagtaattaatgttgcgtattaggtaagaaggagcaattgatttttggttcatttggcttatcttttctgcttaagtgctgatatttaatttgtagtgaaaactctaaacaactctgtatttttatgtttatcctcttccttgagctaatgaaatcaacacatttattgatttcagaatgagctttattaatgtagttaatatgccttactaatgttattccgtgtacttggattagtacccttattgtttatgaatcaacattttttctttcagttcaaaagaacgcagaagcattagaagaaaagaagactgggcctacaaagaagaaagtgaaagaactgagaattttggatcccaaaacagctcagaatctgtgtatgtaatattttcttcgtaggattggtataggtaacggtgagaggggtgggagctgtttaatgtatttaatgaaagttgtaacctttttaaacaggcatatttagcatcttctagaaacaaaatcctgtgtaaacatgatttggttgcctttttgtcacttagccagtaaggagaaaattctaattcaacctctgtcaggccagatgaaacttgggaatagtaaagatttggaaagtaatgataataaaacactgttggaggacatagtgaaacataaggcagaattgacaaaaagtgatttttttttccttctctctagacctgggattgatagttttagagtattcactagttacattggaaaaatccttctactgctattcctttatgtctgaagtaattgcgatgtgagctacttaaattgttaaccttaactgcatttaaaaactggttagtgaatcttgaagcctttaacaaaccagtcagccattaagtataccttttctaaagcagatggacagttaaacccatcttcatttatgtaagcctttaagttttaacatactcttccctctgtcttgaaatcagaatttttggtctgtcactacagtagactgtgtttagattttgctgatacwaaaacactatgcatcagagatt

SEQ ID NO: 723256 - DNA, 629 bp, Homo sapiens
tcagatgcatgatacagagttttctttatatgataatgttatatcatgtgatttggtgatattttcaattagatattttgagcctgttaggctagtcccctctacaaggctatattgaatgggtgagcactctatattaaactgactttcagatttacagatttccctttcttgaatatttagggctgctttatctctcaaagatttctgagaattataagaaccacccmatgtcctttattgaataaaaggtcttcatgaaagtaaacataaaaattccatacaatatcaaataaatatttacataaggttttgattaacgcttcgttctaaatatttctgtcatagatgactttgaaatttcttgtgcattgagagatgaaacctatcctcatctacacagtttcccgggtttcatctgcctattttgggggctttggttcacccaagagaatactgatggtcttcattagcctaagtgcatgcagtcagtgtgttcggtacactagatccaaacagaacagccacttggttctgtttatgtaggttccatgttgtatataattttaaaaatgaaagcgtgactacttccagatgaagagattttccgtcagtgatgagtagcatcg

SEQ ID NO: 723257 - DNA, 2355 bp, Homo sapiens
tgaagctccttcgcattctcactgtatctctgactgtcttgctttcttcctttctgctccctttggtgaagtgagtcaattggtatctttttgacattttagcctttatttcaatcagactctcactgccgttttaacagctatttcactcgctccctattctgcgtcctttcatttttccatagtggccataccatacctttccttctctcctcaagtcttctgtctcctccccattcttttaacttaccaygaacatcctaacctgttacttgccagagaaaaaagaaagcagtttgacttcaaaacctccaatatttcttctacctacaaagttttctctagctatataccttttacttattctctgtcaagcctcagaaaaagaggagctccattatcattaacattattgttgttgctattagtatggatagaaacaaaataaatattgaggacttaatttgtcagattctatgagaagcatgtttacttccaccaacttatgtattcctcatgacaaaccctacgagtttggcactattaatggctccatattaaggatgaggatgccgggcgcgttggctcatgcctgtaatcccagcactttgggaagccgaggcgggaggatcacctgaggtcaggagttccagaccagcctggccaacatggtgaaactccatctctactaaaaatacaaaaattagctgggcatggtggcgcacgcctgtagtcccagctacacaggaggctgaggcaggagaatcgcttgaacctgggaggtggaggctgcagtgagctgacatcaggccactgcactccagcctgggccacagagcaagactccgcctcaaaaaaaaagaaggatgaggaaactgggcccaaggaagactagtttacttgtccaaggttacatagtaactagtagtcacagaattcaaatgttagcagtctgaatttgtagccagtgctttaaccactgtgctcctgggttgtgggtatgtgggtgtgtatgtgatgctctaccacatgctaatcttctcacttcagttttgggcattgttatgcactgcctactttaggtggtagtatctcttgcctgctttccttctgttagttattttattacttcctcaatttgtcagtttccactctgccctgctcttcagaaaaaaagaaaatcttcagtcatttgctgcctggaaaggagtggatagatgggtggatggatgaataaaaatccttcctgactgaggtttctgcttgctactgccttctctccatttcctagcatcagtttttttcaaagatcagtctcctttttctctctgcttccttaactctcattcactgttcaaccaatggtgatcagaattctgccttaaataatgcattgaaattgaaataagaaaggcccttaaatcctgttcacatccaaaatacacatcaaatatactcacttctctgtctccatcaccaccaccttagcccaagccagaatcatcgtttcaattaaccattacaatatacatttatcttgtttttcccgctaccacttttgcccttctccaaatccgtctcggcacaacccttagtaggatgtttctagagtgtatctgtattgcatcataatttttatctgcttaaaataccagtgctgttctatagcactaaagctacagcattaacttcttaccatgacctagaagatactatctggtctggcacctgcccacctctcctactttcatcacctgctatttggcctcttgctcattatgcctcagccacattttatttttgaacttaccatgttctttcctgcttaggaccattgcacatgctgctcctttactcctgcttgctgcctccctctcttgtttatacttcaagtcatagcttaatttttgctttcccagtggtaccttcatttgcctttcagtcagaaatagatcttcctactaaactctcccagattaccttttttcttttcctttctagaaatcatcctggattttaattaaatgtttatatatgaggttacttcttgactgtctataatcccaactatattgcaagttctataaatggatgaactatgttgattttattcacgtgtgcttaacaaatatttcttgaatgcatttgcatgaatggaaaatcaagtggactctttcagtcccatcttattctgtatctatatggcatttgataacataaaagaatttaagctcctttttgaaacctttcctctccttcttaaataataaatagtatttcctgattttttttttttaagagctgcctcttaaagctcttaaagaaagttctctctgtgtcccccagggtggagtg

SEQ ID NO: 723258 - DNA, 786 bp, Homo sapiens
gttctttccaaaatttgacttatattaaaatagctaaaaggtaacttttgtggtagcttttagatggcactagatcaaaagctttcttgatgatcagcaaaattaaatttataccaccttcccattggggcctttttgagaaaaaaaaaaagaccatctactttgttgtgtataattctaatttaagaatctagacagtctataattaattgccttacatttttctcaattgcagttgtgacattcgtgtttcctgtttgtctccagaaacttttaaattcctggatataaagatacatttttaacttctagcagtttaggtatacattttgctgatgctttgaataataccaatactttaaattttcrttttctggtaatggtaaattggatgagagggaaataacatcccaaattagagtctagcagggaaacacaggtttgcttctgtgcatgcaatatatttctttcctacaatttcatttacagtggagctcttggattgattgtaggtgaacaataacatctagtattagaagaaagaattttaatgatggtaaacttaaagcattatttccgacttaaaaagttgatcccttgactctataattatattttgtttgaaaccccttacccttggcttctccgggtatttgtgaaggttttaactagacaaggcatgaattatctggaaatgaataaaagctcaagaaactaagaaaaaccagttgcactaaaatgccattaagaactaattataatctcttctccttctcctctttcttc

SEQ ID NO: 723259 - DNA, 786 bp, Homo sapiens
gttctttccaaaatttgacttatattaaaatagctaaaaggtaacttttgtggtagcttttagatggcactagatcaaaagctttcttgatgatcagcaaaattaaatttataccaccttcccattggggcctttttgagaaaaaaaaaaagaccatctactttgttgtgtataattctaatttaagaatctagacagtctataattaattgccttacatttttctcaattgcagttgtgacattcgtgtttcctgtttgtctccagaaacttttaaattcctggatataaagatacatttttaacttctagcagtttaggtatacattttgctgatgctttgaataataccaatactttaaattttcgttttctggtaatggtaaattggatgagagggaaataacatcccaaattagagtctagcagggaaacacaggtttgcttctgtgyatgcaatatatttctttcctacaatttcatttacagtggagctcttggattgattgtaggtgaacaataacatctagtattagaagaaagaattttaatgatggtaaacttaaagcattatttccgacttaaaaagttgatcccttgactctataattatattttgtttgaaaccccttacccttggcttctccgggtatttgtgaaggttttaactagacaaggcatgaattatctggaaatgaataaaagctcaagaaactaagaaaaaccagttgcactaaaatgccattaagaactaattataatctcttctccttctcctctttcttc

SEQ ID NO: 723260 - DNA, 1198 bp, Homo sapiens
gattgaataatattccattgtttggcagtgccacattttgttgatcttttcatcagttgatacctgagttgtttccagtttttggctgtgataaaaagtgctgctatgaacattcatgtataagtttttatgtgggaatatgatcagttttcttgggtatatatcaagtgaatttctgggtgattctatgttacatattttaggaactaataagataatgattttattgtatctatttccccccaggttatgggacctggagaaacaaatcaagcaattgaggaattatcgtgataactatcaggctttctgcaagtggctctatgatgctaaacgccgccaggattccttagaatccatgaaatttggagattccaacacagtcatgcggtttttgaatgagcagaaggtataagccaactttttgttccatagctgttttgagattaattgggtgtaattcatgttttcctctggtttttgtatcagtgcctaggtttgaaatgatgaatatttaatattactaacccattttgtgaaggcttaaagaatgcccagaggaaaagcaactgagatgtttacaaggaaatgcaaattatgaacatagaaataacgtgatattgttctcttcatgttatcataaattatctttataaattgaggggataggcccagaaaacaggctgactagaaagtaacctcttacagatagtaagttaaagggcttgcttctcttctctgaatggaaaaaatgctcatctcctaagctgtaactataaaaatatgagacaagtacatgtagtaataaactgaaaaaagggtacaaataacagtggtaaaagagtgaaatcacatttatttaaaaatatttgtatgcattaacattggtaaatatttcactttttgtatagaacttgcacagtgaaatatctggcaaacgagacaaatcagaggaagtacaaaaaattgctgaactttgygccaattcaattaaggtatgttggtttcataaagaatgttggtatttcaccaagattattattaactgcatgacttgctgatttgttgtaaagcgtatacacttcctgaggatagcaattacggtctgtatatattcttttctgaacaaaccataaaaattaaaaatctattagcttgaattcattccacattggcagtatccatttgaatggctggt

SEQ ID NO: 723261 - DNA, 1198 bp, Homo sapiens
gattgaataatattccattgtttggcagtgccacattttgttgatcttttcatcagttgatacctgagttgtttccagtttttggctgtgataaaaagtgctgctatgaacattcatgtataagtttttatgtgggaatatgatcagttttcttgggtatatatcaagtgaatttctgggtgattctatgttacatattttaggaactaataagataatgattttattgtatctatttccccccaggttatgggacctggagaaacaaatcaagcaattgaggaattatcgtgataactatcaggctttctgcaagtggctctatgatgctaaacgccgccaggattccttagaatccatgaaatttggagattccaacacagtcatgcggtttttgaatgagcagaaggtataagccaactttttgttccatagctgttttgagattaattgggtgtaattcatgttttcctctggtttttgtatcagtgcctaggtttgaaatgatgaatatttaatattactaacccattttgtgaaggcttaaagaatgcccagaggaaaagcaactgagatgtttacaaggaaatgcaaattatgaacatagaaataacgtgatattgttctcttcatgttatcataaattatctttataaattgaggggataggcccagaaaacaggctgactagaaagtaacctcttacagatagtaagttaaagggcttgcttctcttctctgaatggaaaaaatgctcatctcctaagctgtaactataaaaatatgagacaagtacatgtagtaataaactgaaaaaagggtacaaataacagtggtaaaagagtgaaatcacatttatttaaaaatatttgtatgcattaacattggtaaatatttcactttttgtatagaacttgcacagtgaaatatctggcaaacgagacaaatcagaggaagtacaaaaaattgctgaactttgcgccaattcaattaaggtatgttggtttcataaagaatgttggtatttcaccaagattattattaactgcatgacttgctgatttgttgtaaagmgtatacacttcctgaggatagcaattacggtctgtatatattcttttctgaacaaaccataaaaattaaaaatctattagcttgaattcattccacattggcagtatccatttgaatggctggt

SEQ ID NO: 723262 - DNA, 643 bp, Homo sapiens
caggttatataacaagtggaggtgtgtgcctgcacgccaaacttgctgagtcatgcaagcctggatgtccaccttggcctattccttgacccaaacacatccatgtaccttacagaagatgtcatcaacaaaccagaggcggagatgtcactacaagatttgcagctccattacttcaaaatgcacgattatgatggcaattatttgcttgatggtttagaaatctccacagccatcactcatatctataaggagaaagggagtgaacaggcaccactaatgagtgaagatgagctgattaacataagagatggtgttttgagagatgatgacaagaacaatgatggatacattgactatgctgaatttgcaaaatcactgcagtagatgttatttgttcatctcttggttatatgcaaatgtgacctgggataatgtgattgaatactttgataatgcaaattaactcatttctaactactgctgcagcattttggtaaaaacctgtagcagtttgttacactggggtgagaagggatcaagagaaatgaaagagaggagaaatgggacatctaatagtccctaagcactattaaataccttattggacaarggcttgctttttaaagcatcctttcaagaa

SEQ ID NO: 723263 - DNA, 648 bp, Homo sapiens
gcattttctcaagaagcctacactgcaattgcaaccctggttactctccacaaccagtcttgatactctacatattttccatagcatttattgccctctaaattactaagtatccgataaatgcttctatggattataatattcccaggtacccaacaaacatttgtttaatgaatgaagsaaccactactaaatacttccttttgtttctcaggcatttcacattcagcctgttcaaaattcattagtttttccccaaaactgtctattcctctatgctaggtggctaagagtcagtttctttcaactcccccttactctcaccatgacagtcttctctggccacaactgtgcagtctgtgagcaccaagccctgctccttaatccctcctctccctactgtctctccatgcccaatgttagctaccctggttgaaaggcacatcattaatagttgctggtgtctgtgaagaatgtcccgccacaccatatgtcctcaggggaatataaattaaaataataatgagataccatcatacatctatgagaatggcccaaatcctgaacactgacatcaccaaatgctgatgaaggatgtggacaaataggagctgtcattcattgccggtagagatgcaacatggtaca

SEQ ID NO: 723264 - DNA, 648 bp, Homo sapiens
gcattttctcaagaagcctacactgcaattgcaaccctggttactctccacaaccagtcttgatactctacatattttccatagcatttattgccctctaaattactaagtatccgataaatgcttctatggattataatattcccaggtacccaacaaacatttgtttaatgaatgaagcaaccactactaaatacttccttttgtttctcaggcatttcacattcagcctgttcaaaattcattagtttttccccaaaactgtctattcctctatgctaggtggctaagagtcagtttctttcaactcccccttactctcaccatgacagtcttctctggccacaactgtgcagtctgtgagcaccaagccctgctccttaatccctcctctccctactgtctctccatgcccaatgttagctaccctggttgaaaggcacatcattaatagttgctggtgtctgtgaagaatgtcccgccacaccatatgtcctcaggggaatataaattaaaataataatgagataccatcatacatctatgagaatggcccaaatcctgaacactgacatcaccaaatgctgatgaaggatgtggamaaataggagctgtcattcattgccggtagagatgcaacatggtaca

SEQ ID NO: 723265 - DNA, 1319 bp, Homo sapiens
tgacaaataatcattgtacatattcatgggcgacatggtggtgtttcaatacctctcatgcatagtgatcagatcagggtaattagcataggcaacatctcaaacatttatcatttctttgggttgagagcggtcaatattcttcttccagctgcttgcaagtacataatatattattgctcactctagtcatcctgcagtaagacagagcactagccctggacttgaggagagcttggcactgcctttcacagggctttcttttactgcagtgttctcaagcaagatccgcccgaggacacgggggaagcctggtgggaaacactgcgggtgcattggtcacactgggtttgaacagggaagacagcacaccctggggggttccacctattccactttccaaagattctgcctgtaaatcagagattgggatcccagaagcaaaaatgttttgaatgctttctttactctttgttaatttgggacaaaaagagttrtcagaacccaagggctattgcctggtgcccctgctcccagagagggaaaatctgaggcttctggtagaactgttttcctctctctggctccattttggtttccactgccatttctcctttcccacggagaacagggcagcctgggttattagttctagagatgaaaactttatcttctcccagagggaacttgctgcaagcatagggttgaactggagtcaattctgaatgtgaatctcatgtttaagagccttgaaggttctgataacactatataatatttccacatggtaatatcaagttctagaagttaaaaatgggtcaaaatgcaactcttcagtatcatggttcccatggggaccctatactttgggccctcgagcctttcagaggccttgactcaccagccctaacctggcccggggtgccagatctgactcccagcctcgactatatgtcacaatatgacatgggaaaagccacttagcctctctgtgcctcagttccagatctaaaatctggaaattccgtgacccaacctccagagctccggctacaatgctttaaatatggcattctgcattagacgtggacatgggtaattaaacacctcattacatatctgtagaatgaatgaaagaatgaatgaatgccagtcaaggctccaaaaaccattccctttccttgaaaactttgaaagaacaatcaaaggcaaagttcagcaactaaaagctggagactttgatttgcagtcactgaacaagtcgaaaaatcttagtaagagacacttgaacattttaagtatcatcttgtggtaataat

SEQ ID NO: 723266 - DNA, 1203 bp, Homo sapiens
tcaatccttcaggaagacaagtgytcacatggaacccaggatgagatacgtgaacaggcacagaaaagccctgaagggtttggagcaaggggctggcctgagcagatgtgtgggttcctgtccttcttcccacaggtggcaccagagtgggccagctcaggagagctgacaaaacccacgtccccaaaggactgactcgtggttgggtgcctttgagatccacggtcacagctctacctttgagctgttcccagcagcagtgggaccagaggagtgggtgcgttactagaaagaacactgctgagatgccaggagctctaaagacctgggtgcgaagagccccgaggctcctggctctaagtctttctggtaggtggtcacatgatgatgtcagctggggagtcaaccgagtcctggctggcccctgcacaccaacagcacagttctgggctggaagggggcctggtggaattgaacagcagtgagtttgatttccacttcctcaagttcattcctttgagtcttgagagctgttttggccttcaagaatcccttatgatacaaacctcccaaatcccttatcaggcaacgttttagccctcagaaaactctttaatatggattaacaagaatgaacctagaacagaaaagaaaaggcagtttgctttacaaaagtacaaataccattagtatctctacaaatatctttattcatctatttatttaggtaagactctttctctgagcttctaaagcattttactttatgagaagcagatcgtttttccccgtccacagggctccagggttgagcagaaggcactggaagagagaatagtcatggagccgtgtgcctgtgttcctccttcccagcaggtgtcacaggttcagaaacgtcttccttgctgtccacgtaatagtcacaaagtccttcactctttccagcctagttcctcaactctataactaggagttgaaagcggtgacctgcacagctccttcagctctaaatttctaagactgtaagaggcgagccagtggctgagaactggctctatggtaaaaactggggggcgggccccaaaggtccacccagaatgtcactctggttagcaaaggcaaggctgacgcagcaggaaaattagactcagggctgctccctgtgcatctctaggtgaaagagctgccactgctcagtaaata

SEQ ID NO: 723267 - DNA, 1203 bp, Homo sapiens
tcaatccttcaggaagacaagtgttcacatggaacccaggatgagatacrtgaacaggcacagaaaagccctgaagggtttggagcaaggggctggcctgagcagatgtgtgggttcctgtccttcttcccacaggtggcaccagagtgggccagctcaggagagctgacaaaacccacgtccccaaaggactgactcgtggttgggtgcctttgagatccacggtcacagctctacctttgagctgttcccagcagcagtgggaccagaggagtgggtgcgttactagaaagaacactgctgagatgccaggagctctaaagacctgggtgcgaagagccccgaggctcctggctctaagtctttctggtaggtggtcacatgatgatgtcagctggggagtcaaccgagtcctggctggcccctgcacaccaacagcacagttctgggctggaagggggcctggtggaattgaacagcagtgagtttgatttccacttcctcaagttcattcctttgagtcttgagagctgttttggccttcaagaatcccttatgatacaaacctcccaaatcccttatcaggcaacgttttagccctcagaaaactctttaatatggattaacaagaatgaacctagaacagaaaagaaaaggcagtttgctttacaaaagtacaaataccattagtatctctacaaatatctttattcatctatttatttaggtaagactctttctctgagcttctaaagcattttactttatgagaagcagatcgtttttccccgtccacagggctccagggttgagcagaaggcactggaagagagaatagtcatggagccgtgtgcctgtgttcctccttcccagcaggtgtcacaggttcagaaacgtcttccttgctgtccacgtaatagtcacaaagtccttcactctttccagcctagttcctcaactctataactaggagttgaaagcggtgacctgcacagctccttcagctctaaatttctaagactgtaagaggcgagccagtggctgagaactggctctatggtaaaaactggggggcgggccccaaaggtccacccagaatgtcactctggttagcaaaggcaaggctgacgcagcaggaaaattagactcagggctgctccctgtgcatctctaggtgaaagagctgccactgctcagtaaata

SEQ ID NO: 723268 - DNA, 1203 bp, Homo sapiens
tcaatccttcaggaagacaagtgttcacatggaacccaggatgagatacgtgaacaggcacagaaaagccctgaagggtttggagcaaggggctggcctgagcagatgtgtgggttcctgtccttcttcccacaggyggcaccagagtgggccagctcaggagagctgacaaaacccacgtccccaaaggactgactcgtggttgggtgcctttgagatccacggtcacagctctacctttgagctgttcccagcagcagtgggaccagaggagtgggtgcgttactagaaagaacactgctgagatgccaggagctctaaagacctgggtgcgaagagccccgaggctcctggctctaagtctttctggtaggtggtcacatgatgatgtcagctggggagtcaaccgagtcctggctggcccctgcacaccaacagcacagttctgggctggaagggggcctggtggaattgaacagcagtgagtttgatttccacttcctcaagttcattcctttgagtcttgagagctgttttggccttcaagaatcccttatgatacaaacctcccaaatcccttatcaggcaacgttttagccctcagaaaactctttaatatggattaacaagaatgaacctagaacagaaaagaaaaggcagtttgctttacaaaagtacaaataccattagtatctctacaaatatctttattcatctatttatttaggtaagactctttctctgagcttctaaagcattttactttatgagaagcagatcgtttttccccgtccacagggctccagggttgagcagaaggcactggaagagagaatagtcatggagccgtgtgcctgtgttcctccttcccagcaggtgtcacaggttcagaaacgtcttccttgctgtccacgtaatagtcacaaagtccttcactctttccagcctagttcctcaactctataactaggagttgaaagcggtgacctgcacagctccttcagctctaaatttctaagactgtaagaggcgagccagtggctgagaactggctctatggtaaaaactggggggcgggccccaaaggtccacccagaatgtcactctggttagcaaaggcaaggctgacgcagcaggaaaattagactcagggctgctccctgtgcatctctaggtgaaagagctgccactgctcagtaaata

SEQ ID NO: 723269 - DNA, 1203 bp, Homo sapiens
tcaatccttcaggaagacaagtgttcacatggaacccaggatgagatacgtgaacaggcacagaaaagccctgaagggtttggagcaaggggctggcctgagcagatgtgtgggttcctgtccttcttcccacaggtggcaccagagtgggccagctcaggagagctgrcaaaacccacgtccccaaaggactgactcgtggttgggtgcctttgagatccacggtcacagctctacctttgagctgttcccagcagcagtgggaccagaggagtgggtgcgttactagaaagaacactgctgagatgccaggagctctaaagacctgggtgcgaagagccccgaggctcctggctctaagtctttctggtaggtggtcacatgatgatgtcagctggggagtcaaccgagtcctggctggcccctgcacaccaacagcacagttctgggctggaagggggcctggtggaattgaacagcagtgagtttgatttccacttcctcaagttcattcctttgagtcttgagagctgttttggccttcaagaatcccttatgatacaaacctcccaaatcccttatcaggcaacgttttagccctcagaaaactctttaatatggattaacaagaatgaacctagaacagaaaagaaaaggcagtttgctttacaaaagtacaaataccattagtatctctacaaatatctttattcatctatttatttaggtaagactctttctctgagcttctaaagcattttactttatgagaagcagatcgtttttccccgtccacagggctccagggttgagcagaaggcactggaagagagaatagtcatggagccgtgtgcctgtgttcctccttcccagcaggtgtcacaggttcagaaacgtcttccttgctgtccacgtaatagtcacaaagtccttcactctttccagcctagttcctcaactctataactaggagttgaaagcggtgacctgcacagctccttcagctctaaatttctaagactgtaagaggcgagccagtggctgagaactggctctatggtaaaaactggggggcgggccccaaaggtccacccagaatgtcactctggttagcaaaggcaaggctgacgcagcaggaaaattagactcagggctgctccctgtgcatctctaggtgaaagagctgccactgctcagtaaata

SEQ ID NO: 723270 - DNA, 1203 bp, Homo sapiens
tcaatccttcaggaagacaagtgttcacatggaacccaggatgagatacgtgaacaggcacagaaaagccctgaagggtttggagcaaggggctggcctgagcagatgtgtgggttcctgtccttcttcccacaggtggcaccagagtgggccagctcaggagagctgacaaaacccacgtccccaaaggactgactcgtggttgggtgcctttgagatccacggtcacagctctacctttgagctgttcccagcagcagtgggaccagaggagtgggtgcgttactagaaagaacactgctgagatgccaggagctctaaagacctgggtgcgaagagccccgaggctcctggctctaagtctttctggtaggtggtcacatgatgatgtcagctggggagtcaaccgagtcctggctggcccctgcacaccaacagcacagttctgggctggaagggggcctggtggaattgaacagcagtgagtttgatttccacttcctcaagttcattcctttgagtcttgagagctgttttggccttcaagaatcccttatgatacaaacctcccaaatcccttatcaggcaacgttttagccctcagaaaactctttaatatggattaacaagaatgaacctagaacagaaaagaaaaggcagtttgctttacaaaagtacaaataccattagtatctctacaaatatctttattcatctatttatttaggtaagactctttctcygagcttctaaagcattttactttatgagaagcagatcgtttttccccgtccacagggctccagggttgagcagaaggcactggaagagagaatagtcatggagccgtgtgcctgtgttcctccttcccagcaggtgtcacaggttcagaaacgtcttccttgctgtccacgtaatagtcacaaagtccttcactctttccagcctagttcctcaactctataactaggagttgaaagcggtgacctgcacagctccttcagctctaaatttctaagactgtaagaggcgagccagtggctgagaactggctctatggtaaaaactggggggcgggccccaaaggtccacccagaatgtcactctggttagcaaaggcaaggctgacgcagcaggaaaattagactcagggctgctccctgtgcatctctaggtgaaagagctgccactgctcagtaaata

SEQ ID NO: 723271 - DNA, 1203 bp, Homo sapiens
tcaatccttcaggaagacaagtgttcacatggaacccaggatgagatacgtgaacaggcacagaaaagccctgaagggtttggagcaaggggctggcctgagcagatgtgtgggttcctgtccttcttcccacaggtggcaccagagtgggccagctcaggagagctgacaaaacccacgtccccaaaggactgactcgtggttgggtgcctttgagatccacggtcacagctctacctttgagctgttcccagcagcagtgggaccagaggagtgggtgcgttactagaaagaacactgctgagatgccaggagctctaaagacctgggtgcgaagagccccgaggctcctggctctaagtctttctggtaggtggtcacatgatgatgtcagctggggagtcaaccgagtcctggctggcccctgcacaccaacagcacagttctgggctggaagggggcctggtggaattgaacagcagtgagtttgatttccacttcctcaagttcattcctttgagtcttgagagctgttttggccttcaagaatcccttatgatacaaacctcccaaatcccttatcaggcaacgttttagccctcagaaaactctttaatatggattaacaagaatgaacctagaacagaaaagaaaaggcagtttgctttacaaaagtacaaataccattagtatctctacaaatatctttattcatctatttatttaggtaagactctttctctgagcttctaaagcattttactttatgagaagcagatcgtttttccccgtccacagggctccagggttgagcagaaggcactggaagagagaakagtcatggagccgtgtgcctgtgttcctccttcccagcaggtgtcacaggttcagaaacgtcttccttgctgtccacgtaatagtcacaaagtccttcactctttccagcctagttcctcaactctataactaggagttgaaagcggtgacctgcacagctccttcagctctaaatttctaagactgtaagaggcgagccagtggctgagaactggctctatggtaaaaactggggggcgggccccaaaggtccacccagaatgtcactctggttagcaaaggcaaggctgacgcagcaggaaaattagactcagggctgctccctgtgcatctctaggtgaaagagctgccactgctcagtaaata

SEQ ID NO: 723272 - DNA, 1155 bp, Homo sapiens
ttttttttttgagacggagtttcactctgtcacccaggctggagtgcagtggcacaatctcaactcactgcaacctctgcctccygggtttaagcgattctcctgcctcaacctcccgagtagctgggactacaggtgtgcaccaccacgcctagctaatttttgtatttttagtagagacagggtttcaccatgttgactaggctggtcttgaactcctgacctcaggtgatccacctgcctcagcatctcaaagtgctgggattacaggcatgagccaccacgcctggccacttttgatcatttttgagcattaacaacttggatttgttatatatgaaatattcataaattggcttaatttcacatttttattgattgatgcagagaaagatgtatctcagcaataccagttatttttcccattaaaaagatatttttctgatcatcatctttgctgagctaccagactgcatctcattccacagactgttgcctcagccgctcctgagaacaaagcccacagaccccctccacagcacagcctgccagctcaggcccctcccagtgggggcaactcagctttagtgcccctcatggaaccagagccttagtggggacctctgggtcctggggacagtcccaggcaggtcccgtccagctgccacacctgggatctgatgcctgcgggcttctccgggcagcgtgctgtgtacatcatactggaagtgttttgactacatactacctgcgacgccctgttctaggaacaaggaggaggagaaagagggattgtctctttcatcctcccagtggctcagtgaggaccacaccattattacctcattttcagctgaagatgtggaggcaccaaataagaggcctgcaggagcagccacagtagagcaagttttaaacttaggcagtcttgctctcaagcgcaggttccgggccaccatggcaacggctccccagatgtggtctggggagcctaggcatggccctttcagagggtcttcaaggtcaaaactcctgctaagtcacactaaaatgtcacttgccatcttcattcaatacactcgggggtagcctggcgtctccccagctgctggaagaatggtcacatcgtcactccaacaaataagagaatgtgtg

SEQ ID NO: 723273 - DNA, 1155 bp, Homo sapiens
ttttttttttgagacggagtttcactctgtcacccaggctggagtgcagtggcacaatctcaactcactgcaacctctgcctcctgggtttaagcgattctcctgcctcaacctcccgagtagctgggactacaggtgtgcaccaccacgcctagctaatttttgtatttttagtagagacagggtttcaccatgttgactaggctggtcttgaactcctgacctcaggtgatccacctgcctcagcatctcaaagtgctgggattacaggcatgagccaccacgcctggccacttttgatcatttttgagcattaacaacttggatttgttatatatgaaatattcataaattggcttaatttcacatttttattgattgatgcagagaaagatgtatctcagcaataccagttatttttcccattaaaaagatatttttctgatcatcatctttgctgagctaccagactgcatctcattccacagactgttgcctcagccgctcctgagaacaaagcccacagaccccctccacagcacagcctgccagctcaggcccctcccagtgggggcaactcagctttagtgcccctcatggaaccagagccttagtggggacctctgggtcctggggacagtcccaggcaggtcccgtccagctgccacacctgggatctgatgcctgcgggcttctccgggcagcgtgctgtgtacatcatactggaagtgttttgactacatactacctgcgacgccctgttctaggaacaaggaggaggagaaagagggattgtctctttcatcctcccagtggctcagtgaggaccacaccattattacctcattttcagctgaagatgtggaggcaccaaataagaggcctgcaggagcagccacagtagagcaagttttaaacttaggcagtcttgctctcaagcgcaggttccgggccaccatggcaacggctccccagatgtggtctgggkagcctaggcatggccctttcagagggtcttcaaggtcaaaactcctgctaagtcacactaaaatgtcacttgccatcttcattcaatacactcgggggtagcctggcgtctccccagctgctggaagaatggtcacatcgtcactccaacaaataagagaatgtgtg

SEQ ID NO: 723274 - DNA, 876 bp, Homo sapiens
gcttcaagagaggaggtgattagaaaaagacatcgggggctgggtgcagtgactcatgccagcaatcccagcactttgggaggctgaggtgggaggatcacttgagcccaggagtttgagaccagcctggcaacatagtgagacttcatgtctacaaaacaatccaaaaaaaaaaaaaaattaactgggcttggtggtgagcgcctatgttcccagctttttgggaggctgaggcaggaggatctcttgagcctaggaggtcgaggttgcagtgagccatgatcatgccactgcagtccagcctgggccatagagtgagaccctgtctcaaaatgaagacaaaaataaaaacatgtctgaaaaggcactttgggaagctgcccaggagaaaggctaggaaacactgttctagagcatctgcagtggcatgctgcccctgcattcactcactcatcctcaggcacagcagcaggcatcaccaccctgcattcccattcctgcyattattttatttttatggctcagacatatgggatgtgatatggtttggctgtgtccccacccaaatctcatcttgaattttagctcccataattccctcctgttgtgggagggacctgttgggagacaaatgaatcatgggggaggtttcccccatactgttctcatggtagtgaatgagtcttacgagatctgatggttttatccggggtttcccctttctcttggttctcattctctctcttgtctgccaccatgtaagatgtgcctttcaccttccaccattattgtgaggtctccccagccacgtggaactgtgagtccattaaacttctttttctttataaattccccagtcttgggtatgtctttatt

SEQ ID NO: 723275 - DNA, 876 bp, Homo sapiens
gcttcaagagaggaggtgattagaaaaagacatcgggggctgggtgcagtgactcatgccagcaatcccagcactttgggaggctgaggtgggaggatcacttgagcccaggagtttgagaccagcctggcaacatagtgagacttcatgtctacaaaacaatccaaaaaaaaaaaaaaattaactgggcttggtggtgagcgcctatgttcccagctttttgggaggctgaggcaggaggatctcttgagcctaggaggtcgaggttgcagtgagccatgatcatgccactgcagtccagcctgggccatagagtgagaccctgtctcaaaatgaagacaaaaataaaaacatgtctgaaaaggcactttgggaagctgcccaggagaaaggctaggaaacactgttctagagcatctgcagtggcatgctgcccctgcattcactcactcatcctcaggcacagcagcaggcatcaccaccctgcattcccattcctgctattattttatttttatggctcagacatatgggatgtgatatggtttggctgtgtccccacccaaatctcakcttgaattttagctcccataattccctcctgttgtgggagggacctgttgggagacaaatgaatcatgggggaggtttcccccatactgttctcatggtagtgaatgagtcttacgagatctgatggttttatccggggtttcccctttctcttggttctcattctctctcttgtctgccaccatgtaagatgtgcctttcaccttccaccattattgtgaggtctccccagccacgtggaactgtgagtccattaaacttctttttctttataaattccccagtcttgggtatgtctttatt

SEQ ID NO: 723276 - DNA, 901 bp, Homo sapiens
tgttcaattcccacctatraatgagaacatgcgcccagccatcccattactgggtatatacccaaaggactataaatcatgctgctataaagacacatgcacacgtatgtttattgcggcactattcacaatagcaaagacttggaaccaacccacatgtccaacaatgatagactggattaagaaaatgtggcacatatacaccatggaatactatgcagccataaaaaatgatgagttcatgtcctttgtagggacagggatgaaactggaaatcatcattctcagctctaaagtatttttaacagtccatcctgagttcgtttgtgagtttatgttagaaattctactctctggcccagccctaaacccaagcactttctcttctgctcaaatcctaggttacatccgtgtcatggttctgaagggccctttgtggtgagcacaaatacaaacaagccacaagccttgtcccttctcaggctcatcacctggtccctcctttcttaatccaaggccgctgtattagctttctatagctgctgtaacaaatcaccataaacgtagccattgacaacaccatcaattgattctcttacagtctggatatcagaaagctagcatcaaagtatcatagaattgtgtttcttctggaggcccagggaaagccggctttctcgcctttttcagtttctagaggctgctgcgttcctcggcccgtagtggcatcactctactttctgcttccatctccacctggccttctccttctgatctcctacctccctcttataaggacctctgtgattacattggacccccctgggccacacagggtaatctacccatctcaaaatccttaattcagtcacatctgcagagttcctgttgccatataagg

SEQ ID NO: 723277 - DNA, 901 bp, Homo sapiens
tgttcaattcccacctatgartgagaacatgcgcccagccatcccattactgggtatatacccaaaggactataaatcatgctgctataaagacacatgcacacgtatgtttattgcggcactattcacaatagcaaagacttggaaccaacccacatgtccaacaatgatagactggattaagaaaatgtggcacatatacaccatggaatactatgcagccataaaaaatgatgagttcatgtcctttgtagggacagggatgaaactggaaatcatcattctcagctctaaagtatttttaacagtccatcctgagttcgtttgtgagtttatgttagaaattctactctctggcccagccctaaacccaagcactttctcttctgctcaaatcctaggttacatccgtgtcatggttctgaagggccctttgtggtgagcacaaatacaaacaagccacaagccttgtcccttctcaggctcatcacctggtccctcctttcttaatccaaggccgctgtattagctttctatagctgctgtaacaaatcaccataaacgtagccattgacaacaccatcaattgattctcttacagtctggatatcagaaagctagcatcaaagtatcatagaattgtgtttcttctggaggcccagggaaagccggctttctcgcctttttcagtttctagaggctgctgcgttcctcggcccgtagtggcatcactctactttctgcttccatctccacctggccttctccttctgatctcctacctccctcttataaggacctctgtgattacattggacccccctgggccacacagggtaatctacccatctcaaaatccttaattcagtcacatctgcagagttcctgttgccatataagg

SEQ ID NO: 723278 - DNA, 901 bp, Homo sapiens
tgttcaattcccacctatgaatgagaacatgcgcccagccatcccattactgggtatatacccaaaggactataaatcatgctgctataaagacacatgcacacgtatgtttattgcggcactattcacaatagcaaagacttggaaccaacccacatgtccaacaatgatagactggattaagaaaatgtggcacatatacaccatggaatactatgcagccataaaaaatgatgagttcatgtcctttgtagggacakggatgaaactggaaatcatcattctcagctctaaagtatttttaacagtccatcctgagttcgtttgtgagtttatgttagaaattctactctctggcccagccctaaacccaagcactttctcttctgctcaaatcctaggttacatccgtgtcatggttctgaagggccctttgtggtgagcacaaatacaaacaagccacaagccttgtcccttctcaggctcatcacctggtccctcctttcttaatccaaggccgctgtattagctttctatagctgctgtaacaaatcaccataaacgtagccattgacaacaccatcaattgattctcttacagtctggatatcagaaagctagcatcaaagtatcatagaattgtgtttcttctggaggcccagggaaagccggctttctcgcctttttcagtttctagaggctgctgcgttcctcggcccgtagtggcatcactctactttctgcttccatctccacctggccttctccttctgatctcctacctccctcttataaggacctctgtgattacattggacccccctgggccacacagggtaatctacccatctcaaaatccttaattcagtcacatctgcagagttcctgttgccatataagg

SEQ ID NO: 723279 - DNA, 901 bp, Homo sapiens
tgttcaattcccacctatgaatgagaacatgcgcccagccatcccattactgggtatatacccaaaggactataaatcatgctgctataaagacacatgcacacgtatgtttattgcggcactattcacaatagcaaagacttggaaccaacccacatgtccaacaatgatagactggattaagaaaatgtggcacatatacaccatggaatactatgcagccataaaaaatgatgagttcatgtcctttgtagggacagggatgaaaytggaaatcatcattctcagctctaaagtatttttaacagtccatcctgagttcgtttgtgagtttatgttagaaattctactctctggcccagccctaaacccaagcactttctcttctgctcaaatcctaggttacatccgtgtcatggttctgaagggccctttgtggtgagcacaaatacaaacaagccacaagccttgtcccttctcaggctcatcacctggtccctcctttcttaatccaaggccgctgtattagctttctatagctgctgtaacaaatcaccataaacgtagccattgacaacaccatcaattgattctcttacagtctggatatcagaaagctagcatcaaagtatcatagaattgtgtttcttctggaggcccagggaaagccggctttctcgcctttttcagtttctagaggctgctgcgttcctcggcccgtagtggcatcactctactttctgcttccatctccacctggccttctccttctgatctcctacctccctcttataaggacctctgtgattacattggacccccctgggccacacagggtaatctacccatctcaaaatccttaattcagtcacatctgcagagttcctgttgccatataagg

SEQ ID NO: 723280 - DNA, 901 bp, Homo sapiens
tgttcaattcccacctatgaatgagaacatgcgcccagccatcccattactgggtatatacccaaaggactataaatcatgctgctataaagacacatgcacacgtatgtttattgcggcactattcacaatagcaaagacttggaaccaacccacatgtccaacaatgatagactggattaagaaaatgtggcacatatacaccatggaatactatgcagccataaaaaatgatgagttcatgtcctttgtagggacagggatgaaactggaaatcatcattctcagctctaaagtatttttaacagtccatcctgagytcgtttgtgagtttatgttagaaattctactctctggcccagccctaaacccaagcactttctcttctgctcaaatcctaggttacatccgtgtcatggttctgaagggccctttgtggtgagcacaaatacaaacaagccacaagccttgtcccttctcaggctcatcacctggtccctcctttcttaatccaaggccgctgtattagctttctatagctgctgtaacaaatcaccataaacgtagccattgacaacaccatcaattgattctcttacagtctggatatcagaaagctagcatcaaagtatcatagaattgtgtttcttctggaggcccagggaaagccggctttctcgcctttttcagtttctagaggctgctgcgttcctcggcccgtagtggcatcactctactttctgcttccatctccacctggccttctccttctgatctcctacctccctcttataaggacctctgtgattacattggacccccctgggccacacagggtaatctacccatctcaaaatccttaattcagtcacatctgcagagttcctgttgccatataagg

SEQ ID NO: 723281 - DNA, 901 bp, Homo sapiens
tgttcaattcccacctatgaatgagaacatgcgcccagccatcccattactgggtatatacccaaaggactataaatcatgctgctataaagacacatgcacacgtatgtttattgcggcactattcacaatagcaaagacttggaaccaacccacatgtccaacaatgatagactggattaagaaaatgtggcacatatacaccatggaatactatgcagccataaaaaatgatgagttcatgtcctttgtagggacagggatgaaactggaaatcatcattctcagctctaaagtatttttaacagtccatcctgagttcgtttgtgagtttatgttagaaattctactctctggcccagccctaaacccaagcactttctcttctgctcaaatcctaggttacatccgtgtcatggttctgaagggccctttgtggwgagcacaaatacaaacaagccacaagccttgtcccttctcaggctcatcacctggtccctcctttcttaatccaaggccgctgtattagctttctatagctgctgtaacaaatcaccataaacgtagccattgacaacaccatcaattgattctcttacagtctggatatcagaaagctagcatcaaagtatcatagaattgtgtttcttctggaggcccagggaaagccggctttctcgcctttttcagtttctagaggctgctgcgttcctcggcccgtagtggcatcactctactttctgcttccatctccacctggccttctccttctgatctcctacctccctcttataaggacctctgtgattacattggacccccctgggccacacagggtaatctacccatctcaaaatccttaattcagtcacatctgcagagttcctgttgccatataagg

SEQ ID NO: 723282 - DNA, 1720 bp, Homo sapiens
tcctgactctttgttgaaagctagatatgtggaacttgaatacaagctttgaaattaaagtactttttttattggctacaccgaggcacaagctcttattaaacrcttagtttggggcatattaacatttcttgaaagtttacaaagcattttcatattcattttctcatttgatcctcactacggccctgtggagaaggtattatctctattttatggctgagggaaagaaatcctaaagagcttaaaagtctggcccaaagtgactttgcagtaaaaggcagagcagaaatagaactcagctctcctaattcataggccagcattctggtattccgtggcattctagtctactatgccctctttcaataagatttggggaacaaacttgttacaaaataaacttaggcacattaaaattttaaagagtttatttgagcagacagtgatttataaattgggtagcaccaaaccacaagtggttttgctccacagcagggatgtgaagggaaaacttataagattcttgcagaaataagacaaagaaactatttgattggttaaagtggaaagtccctagttagaggttagttggtggtttttaattggtaaagtctctagttagaggttagttgttggtttctaattggttaaaattaagtgtcattttgctatttacagtgacttgggtattggttggctcaagtaggaaccaaaggcactggagccatctcagcctaatgacctctcaattaatttttttaacagacttaatgtatttatgtgatgaagatcatctaatgctatagtagaaaagaacaattaatgaatttataaatttgtagtcaaagcaagtctgtaaatataggtagcattctgcagtgctataaatggaaaaatctaataaattagccttatagataatatctgaggcccctaactgcttgcatttagatttgatgtgtatgtgtgcatgtgtgcatgtatgcgtgtgtgtgtgtgtgtgtgtgtgtgtgtgtgtgtactgaggggtgggataaattcagaactatgtttctgcttctgttaaataagagattgtggttagtataatttttacagtctataccagaaataaatctagtatagagacttaccattttcttttttctttaattaaggtattcttaccagcagtaaaatgcacaaattttaagtgcatagttcagtgaaattttatgtatgtgtaaactccacactggaaagttatagacatttctggtccctcagaaggttctgtcttgcctcctcccaggtaataccacctcccaaatgtaacacctgttctgaccactgtcatcatagattcgttttgcctggtttcaaactttatgtaaattgagtcatactgtatctactattttgcatctggcttcttttgtttaacatgatgtctgtgagattcagttccttttcattgctatgtagcattccaaagtatggtacaccacaaattttttaatccatttccctgttgatggacatttgggttgtttctaggtttttaaaatcatgaatagaagttgctatggacatctttgatcatatctcttggtgaacataagcactcatttttattggatataaatctaggagtagactcactagagtaggtatgataaaaaaaagttttaacttagaaaagtcttaatgaaggaactgatggctaaccatcttataa

SEQ ID NO: 723283 - DNA, 643 bp, Homo sapiens
ttccagagttgagctacccttccttgatgagtcctaaaatgctgttctccccataggcacaactccagatgttccgagctcagtggatgtttgaacttgctccaggtgtaagctctagcaatttagaaaatcgaccttgcagagcagcaagaggctctctccagaaaacatcggcagataccaaaggaaaacaagaacaggcaaaagaagaaaagttaagtattatagatattgtaacaaattacatttttttttttttggcacatggaaattttcactgacacagtaagtaggcaytataaccagactttcgggacataaacacatatcttgtaaaataaaaattttgactagtatactagtttatatatttctcacaatttcttctaggtactttggatggtaccactactcctgcatggcttttttctctgtgggtacactgtcttcattgagctgtcttttgttaatttatagacctctgggattcatgtggttcctaaaagattggtgtctctgaatttattaacagaaccaaaaagaaaaaacagaattttctaaatttattaatagaaccaaaaagattgctcacatgttaatgtctttccagaggtcttaatttcatgcagtattttgttatatt

SEQ ID NO: 723284 - DNA, 1536 bp, Homo sapiens
ggatcccagtttcacagtgaccatccattggtcactgtgaccagtcacgatagcctccacatccaaaaagtgatttcagtctttggttatgtatagtgaacaacacctgcacatttatctccactgtctcctgaaactccactaaaatagtagtaaagaaatagggctgggtgtggtggctcatgcctgtaatcccagcactttgggaggctgagaccaggggatcacttgagtgagggcaacatagggagtttgagggtaacatagggagaccactgtctttcaaaaaaaaaaaaaaaaaaagaaaagacttaagtccttcaagacagggaggacaggagaggtgctgaaagcagacaggacaggttagaatttggaaaatagaaagcaggtgggcaagtggtaaagtggcattaagcatgggctgtgtgttgaagtgctagatccacgactgagttcgagcaagttagttaactctccatgtcatgataaattagaggaaatattatcataatacctacccacagagttgaaaggagtaacagataacactccacgttaattgcataggacaatgcctgactgagttggtgctcagtaaatagcagccattatatgtattataactgttgctgttccagagagatctgagacctcagccagaagcaggggaagctaaaaagtgcaaatcaactcaactggcctcccatggaaggtaaggtaccacatggaaacagcaagaccctgcgggaagtatccccagccaactcccagaactcaagttgtcaggctcacaccatcaggcaggaaagtggaggcttcccctctaggaaaagaccccttcccacaaaaaaaagacctacggatactgacatttaggaatcaacagaataggtcctctcccacgcctctcagtcagcaagtaccacctacccacgtagtttctagttaacatcgtagtggctccttcttggctatcaatggacaagcaaggaacaccaagtatttgaagacaaagtctaaatgagtgacagagaatcagactttttaaataagcagagaaaggggacatgatggaaataaaaaartgcaggtagtagaagaaatctgaaaaacaaaattctatttcttcaaagacatggaagaagaaacaagaacaaaaggctatgaggaaacattggaagtcagagcctttgaataatacttaatgtgatagtgaaatatgtttaaatgtcagatgacacatagaatgtcaaagctggaagtttccctagaagtcacttactgaccaactatccccatgtggaggtgaggaaatgggggctcatgaagggtgaagttgtttgcctcaggtggtataaccaggaccctcacaaattaaaggcgtgtattcatgcagagggcctggcagttgtaagcactcagtaaattctagtcttaataatgtttattaagaacttagatgttactgcatgatcttacttatttgtaaaatctaaaaaagtcaaactgatagaagagagtagagtggtggtt

SEQ ID NO: 723285 - DNA, 959 bp, Homo sapiens
attaatttctgtagtttaaaccaccaagtctgtggcattttgttatggcagccctagctgacaaattagccttcttttcctaatattatgactctgaccttaacctgaaaatgtactagagccaaatagtgaacatcaacagaccaaccctcttccagagcagagtgggaacaggaaaccacacactgaaaggcatatgctaattaaatcataacaattatcgtgtagcctttcccattgtttttatataatgttgtgaacacctgaaaagataactacggaagtactaactcacatgccaaacagaatatactaagtttagaatgaaagctataagcyacggggtgctgaaggaaagagagcttaatggagcatatgccatttaatttagagcttgaagaataagtaaggtttagatggaagataaagcatgccaaacactgttaatggcatgagcaaaagcatggaagtaggataatgcaagatttctgtttttaggaaaagtgaacagaccagtttgattggacaagataatcaacataggagtagtaagaatagatgaggcttgaaagaaaggttgaggcagaatgtggatggtcctaaagatgaagcatgtgaactttgtcctgcaggaagtacagagccatttcagttgttttagttggtggaagagaagagttgacatggtgactatcatattccctagtgaagatgatcattcacttcaagcatagagacaggaagctatttgaaaaattgaaacagtgaagtaaataaatgttcaggtctatgaattgggactaggaacatattattatagaagacattcagttagtcgcattctctttcacttcagccatttcatttattgctttgtcccatctgtctactcatttaaacaatcaactcattcctccatcattccccaattaagttggaaagtcccacttgattcctaa

SEQ ID NO: 723286 - DNA, 959 bp, Homo sapiens
attaatttctgtagtttaaaccaccaagtctgtggcattttgttatggcagccctagctgacaaattagccttcttttcctaatattatgactctgaccttaacctgaaaatgtactagagccaaatagtgaacatcaacagaccaaccctcttccagagcagagtgggaacaggaaaccacacactgaaaggcatatgctaattaaatcataacaattatcgtgtagcctttcccattgtttttatataatgttgtgaacacctgaaaagataactacggaagtactaactcacatgccaaacagaatatactaagtttagaatgaaagctataagccacggggtgctgaaggaaagagagcttaatggagcatatgccatttaatttagagcttgaagaataagtaaggtttagatggaagataaagcatgccaarcactgttaatggcatgagcaaaagcatggaagtaggataatgcaagatttctgtttttaggaaaagtgaacagaccagtttgattggacaagataatcaacataggagtagtaagaatagatgaggcttgaaagaaaggttgaggcagaatgtggatggtcctaaagatgaagcatgtgaactttgtcctgcaggaagtacagagccatttcagttgttttagttggtggaagagaagagttgacatggtgactatcatattccctagtgaagatgatcattcacttcaagcatagagacaggaagctatttgaaaaattgaaacagtgaagtaaataaatgttcaggtctatgaattgggactaggaacatattattatagaagacattcagttagtcgcattctctttcacttcagccatttcatttattgctttgtcccatctgtctactcatttaaacaatcaactcattcctccatcattccccaattaagttggaaagtcccacttgattcctaa

SEQ ID NO: 723287 - DNA, 959 bp, Homo sapiens
attaatttctgtagtttaaaccaccaagtctgtggcattttgttatggcagccctagctgacaaattagccttcttttcctaatattatgactctgaccttaacctgaaaatgtactagagccaaatagtgaacatcaacagaccaaccctcttccagagcagagtgggaacaggaaaccacacactgaaaggcatatgctaattaaatcataacaattatcgtgtagcctttcccattgtttttatataatgttgtgaacacctgaaaagataactacggaagtactaactcacatgccaaacagaatatactaagtttagaatgaaagctataagccacggggtgctgaaggaaagagagcttaatggagcatatgccatttaatttagagcttgaagaataagtaaggtttagatggaagataaagcatgccaaacactgttaatggcatgrgcaaaagcatggaagtaggataatgcaagatttctgtttttaggaaaagtgaacagaccagtttgattggacaagataatcaacataggagtagtaagaatagatgaggcttgaaagaaaggttgaggcagaatgtggatggtcctaaagatgaagcatgtgaactttgtcctgcaggaagtacagagccatttcagttgttttagttggtggaagagaagagttgacatggtgactatcatattccctagtgaagatgatcattcacttcaagcatagagacaggaagctatttgaaaaattgaaacagtgaagtaaataaatgttcaggtctatgaattgggactaggaacatattattatagaagacattcagttagtcgcattctctttcacttcagccatttcatttattgctttgtcccatctgtctactcatttaaacaatcaactcattcctccatcattccccaattaagttggaaagtcccacttgattcctaa

SEQ ID NO: 723288 - DNA, 959 bp, Homo sapiens
attaatttctgtagtttaaaccaccaagtctgtggcattttgttatggcagccctagctgacaaattagccttcttttcctaatattatgactctgaccttaacctgaaaatgtactagagccaaatagtgaacatcaacagaccaaccctcttccagagcagagtgggaacaggaaaccacacactgaaaggcatatgctaattaaatcataacaattatcgtgtagcctttcccattgtttttatataatgttgtgaacacctgaaaagataactacggaagtactaactcacatgccaaacagaatatactaagtttagaatgaaagctataagccacggggtgctgaaggaaagagagcttaatggagcatatgccatttaatttagagcttgaagaataagtaaggtttagatggaagataaagcatgccaaacactgttaatggcatgagcaaaagcatggaagtaggataatgcaaratttctgtttttaggaaaagtgaacagaccagtttgattggacaagataatcaacataggagtagtaagaatagatgaggcttgaaagaaaggttgaggcagaatgtggatggtcctaaagatgaagcatgtgaactttgtcctgcaggaagtacagagccatttcagttgttttagttggtggaagagaagagttgacatggtgactatcatattccctagtgaagatgatcattcacttcaagcatagagacaggaagctatttgaaaaattgaaacagtgaagtaaataaatgttcaggtctatgaattgggactaggaacatattattatagaagacattcagttagtcgcattctctttcacttcagccatttcatttattgctttgtcccatctgtctactcatttaaacaatcaactcattcctccatcattccccaattaagttggaaagtcccacttgattcctaa

SEQ ID NO: 723289 - DNA, 596 bp, Homo sapiens
ttttgttgtttattgtacaaactgaayattaagttaaacgcgttcttgtaccttttcatctttctgtcactcacttctctggtctccaggagacagtctggtggttgtcaggatttttttttttcttttttttttttgaggcgagtcttgctctggtcgcccaggctggagtacagtggcgcgatctcggctcactgcaacctccgtctcccgggttcaggcaattgtctgcctcagcctcccgagtagctggtattgtaggcgcccgccaccacgcctggctaatttttgtatttttagtagagacagggtttcaccatcttggccaggctggtcttgaactcagttgtcaggattttttaagtggaagtacaacgatgaaaaagcacttatgtgtttggcattctccgtcatcattctggccggggcgggcagttctaggagttggaactcagtcctggtggaaaaggaagtcgtggagggagggctagggccgtgggggaactgctctgctgagcctcttcctcacctgctgcttcctaggactaacctgaaaggctaaggtaccaggctgaaagtcagtgctcagaaaacca

SEQ ID NO: 723290 - DNA, 1336 bp, Homo sapiens
gataaacaccagctatgaccatgtgaccagttgtagaaacaaggactgtgatagttatgagtatttcttccttattttaatgtgaataagtttatatatatattagccaaatatttttgttttcttcctttctgggtcttagctaccacagagctcagatcaccctctcccatcccagtagctacagtggcccttattattggcatagttgtggtctccccttttgtctcaatcatttcctcatgattgcatttgtctctttttgttaaccaattcatatatttttgggagagaagtagaaatcaaataaacaaacaatgattgtagtagtaatcagcttttggacatttcctttattttcctttttacataatacacatttatagtggtactacacattttttccttgggaacacacacacacacacacatacatacatatatatatatatwtttttttttgagacagaatttcactcttgttgtccaggctagagtgcaatggtgcgatctcggctcaatgcaacctctgcctcccaggttcaatcgattctcctgcctcagcctaccgagtagctgggattacaggcatgtgccaccattcccggctgattctgtatttttagtagagacggggtttctccatgttggtcaggctggtctcaaactcccgacttcaggtgatccacctgcttcagcctcccaaagtgctgggattacaggcgtgagccaccgcacctggccaggaacatattatatgtaataacaatgaaacaggggctgaagaaagttttcttcctaaaggggctttatcagtcaagattaaatcagagaagcagaaccatcaggaaaaatatatatataatatatacatgttattttatacacacacacacacacacatatatgaatttgctacagggatttaaccttaggtggtaggagatggtaaaaagtctctgtaaggttactgtcttcacatctgatgctggaaattcaagtccacaaggcaagcagttggcaagggaagatggatgtaaagtaagaaagagcagaagtaagtctgagcccacaagcacaagctgaagcctgtgagaaccaaccaaaacccacgtgtattattagtctattctcatgttgctaataaagacacacccaagactgggtaatttataaaggaaagaggtttaatggactcacagttccacatggctggggaggcctcacaaccatggtggaagaccaaggaagagcaaaggcacatcctacatggcggcagccaagagaacgtgtgcaggggaattccccttcataaaaccatcagatcttgtgagac

SEQ ID NO: 723291 - DNA, 1357 bp, Homo sapiens
tctactaaaatacaataaattagccgggagtggtgacacatgcttgtaatcccagttacttgggaggctgaggcaggagaatcgcttgaacccaggagatggaggttgcagtgagcggagatggcaacgctgcactccagcctggcgacagagagactccgtatcaaaaataaataaataaataaataaatacataaattaaaaaaaccctgcctattgtctactatccgcactacccgggcgacaaaataatctgtacagaaaacccctgcaatattaatttacccacataataaacctatgcatgtaccctgtaaacttaaaataaaagttggaaataaaaaagaaagcatcatttcaccattttgtatttgactaaatgttttcaggtggcataaactctcttcttctctacctttaggactyacctgtgtttgtacataattctgttttcattttcaaggatgtcataaataaacacaggtattaagagacattatataattttgatttggagcctcagtgaagtggggtgccttgaattttaatacatacatggccaagaataatagagctataaaagtgccacaagctgattttaggtatgatatttcctattttgaaagttgatttctcagatttccatattatcacaaaagtgtttttttcaatggcatctatgttatatgtctacatgtatacactgagagataagttgcgtgcatgtgtgtgtctagtacaacatggaaaattacatccactgaggtatatttttagaaacacagaacatagatgattgacagaacaaagcatatggaaatgaagacaaatctaaccgacatttagatctaagaaaaaaatatttgcctgaagggaaaatattaattagtttgtctacatgcaagataaaagtctggaagacgtatctatcaaaaggcagtggaataaacagcaaaatggaaattatttgtaaactgacagtaaacttggcaaacattaagggggtaaacaagttatttggcatgcaaagcattttgaaatcacagcctctgtcaggaggcatctgtgcctagattcacttatttgacagaaattaacattttgcagaaatctttgttgcatgctaaagatttcttcaccctccttaattattttaattgctgcttcagaatgttccaaataaacactaaaaagatgctaaactccacaaagtccaatccaatttcaatattacagagtgattgcactctgagttgactgtaatacctaccaagaggtgatctatttaagtaaatatacccagcatatttttatgggataaaatataagggccatgtaaatccagtaataagcctta

SEQ ID NO: 723292 - DNA, 1357 bp, Homo sapiens
tctactaaaatacaataaattagccgggagtggtgacacatgcttgtaatcccagttacttgggaggctgaggcaggagaatcgcttgaacccaggagatggaggttgcagtgagcggagatggcaacgctgcactccagcctggcgacagagagactccgtatcaaaaataaataaataaataaataaatacataaattaaaaaaaccctgcctattgtctactatccgcactacccgggcgacaaaataatctgtacagaaaacccctgcaatattaatttacccacataataaacctatgcatgtaccctgtaaacttaaaataaaagttggaaataaaaaagaaagcatcatttcaccattttgtatttgactaaatgttttcaggtggcataaactctcttcttctctacctttaggactcacctgtgtttgtacataattctgttttcattttcaaggatgtcataaataaacacaggtattaagagacattatataattttgatttggagcctcagtgaagtggggtgccttgaattttaatacatacatggccaagaataatagagctataaaagtgccacaagctgattttaggtatgatatttcctattttgaaagttgatttctcagatttccatattatcacaaaagtgtttttttcaatggcatctatgttatatgtctacatgtatacactgagagataagttgcgtgcatgtgtgtgtctagtacaacatggaaaattacatccactgaggtatatttttagaaacacagaacatagatgattgacagaacaaagcatatggaaatgaagacaaatctaaccgacatttagatctaagaaaaaaatatttgcctgaagggaaaatattaattagtttgtctacatgcaagataaaagtctggaagacgtatctatcaaaaggcagtggaataaacagcaaaatggaaattatttgtaaactgacagtaaacttggcaaacattragggggtaaacaagttatttggcatgcaaagcattttgaaatcacagcctctgtcaggaggcatctgtgcctagattcacttatttgacagaaattaacattttgcagaaatctttgttgcatgctaaagatttcttcaccctccttaattattttaattgctgcttcagaatgttccaaataaacactaaaaagatgctaaactccacaaagtccaatccaatttcaatattacagagtgattgcactctgagttgactgtaatacctaccaagaggtgatctatttaagtaaatatacccagcatatttttatgggataaaatataagggccatgtaaatccagtaataagcctta

SEQ ID NO: 723293 - DNA, 1357 bp, Homo sapiens
tctactaaaatacaataaattagccgggagtggtgacacatgcttgtaatcccagttacttgggaggctgaggcaggagaatcgcttgaacccaggagatggaggttgcagtgagcggagatggcaacgctgcactccagcctggcgacagagagactccgtatcaaaaataaataaataaataaataaatacataaattaaaaaaaccctgcctattgtctactatccgcactacccgggcgacaaaataatctgtacagaaaacccctgcaatattaatttacccacataataaacctatgcatgtaccctgtaaacttaaaataaaagttggaaataaaaaagaaagcatcatttcaccattttgtatttgactaaatgttttcaggtggcataaactctcttcttctctacctttaggactcacctgtgtttgtacataattctgttttcattttcaaggatgtcataaataaacacaggtattaagagacattatataattttgatttggagcctcagtgaagtggggtgccttgaattttaatacatacatggccaagaataatagagctataaaagtgccacaagctgattttaggtatgatatttcctattttgaaagttgatttctcagatttccatattatcacaaaagtgtttttttcaatggcatctatgttatatgtctacatgtatacactgagagataagttgcgtgcatgtgtgtgtctagtacaacatggaaaattacatccactgaggtatatttttagaaacacagaacatagatgattgacagaacaaagcatatggaaatgaagacaaatctaaccgacatttagatctaagaaaaaaatatttgcctgaagggaaaatattaattagtttgtctacatgcaagataaaagtctggaagacgtatctatcaaaaggcagtggaataaacagcaaaatggaaattatttgtaaactgacagtaaacttggcaaacattaagggggtaaacaagttatttggcatgcaaagcattttgaaatcacagcctctgtcaggaggcatctgtgcctagattcacttatttgacagaaattaacattttgcagaaatctttgttgcatgctaaagatttcttcaccctccttaattattttaattgctgcttcagaatgttccaaataaacactmaaaagatgctaaactccacaaagtccaatccaatttcaatattacagagtgattgcactctgagttgactgtaatacctaccaagaggtgatctatttaagtaaatatacccagcatatttttatgggataaaatataagggccatgtaaatccagtaataagcctta

SEQ ID NO: 723294 - DNA, 926 bp, Homo sapiens
tgacacttttgtggcactccatttctaatttatattctaagatgtgtcataaagattcaatgaaaatttggcagagaatattttatattgctcttcttttctaaagataaaaatggtaccatgtcttcctcctgacctgtgtactaaaccggaaagaatggcttgcggatgggcagggagacgttgctgggccrggctgggagtgagaggtcggcggctccctagagcaggggccacatcgggacagccaggactctggtgctgcctgaaaacattccctgagcacccgcagtccctgtggatgctgctgtcccacagtgctctggtctctctgatggcgtccccgcccaggccctccccacctccctgcatacacacacacacacacacacacacacacacacacacaggccctccaggccctccccacctccctgcatacacacacacacacacacacacacacacacacacacacacacacacacacacaccgggcaggccctccccaaacagcacacagagcgcgtgcgagccgcgcttagctgccttttaaaatgacatctgctgctgcggaactctcaagttcatgcaatgaggacgtcatgaaggatgattattttagcctcaactgagagagagtcttttaaaacagttaaaaatcctcagttacagacaacatgcatgaaaatacaattcatttttacatatatggtaatacaaaattccactaacaatgtttaaacattagatattagaagatagtgagggataattacatcacaataaattaggttccagggaggcagttgatcaatttagagcaagcactttcttcagtggaacctggcatgaatcttgcctttacctctttctggctatatgaccttgaacaagtgatttcacctcttttattgctagtttca

SEQ ID NO: 723295 - DNA, 926 bp, Homo sapiens
tgacacttttgtggcactccatttctaatttatattctaagatgtgtcataaagattcaatgaaaatttggcagagaatattttatattgctcttcttttctaaagataaaaatggtaccatgtcttcctcctgacctgtgtactaaaccggaaagaatggcttgcggatgggcagggagacgttgctgggccgggctgggagtgagaggtcggcggctccctagagcaggggccacatcgggacagccaggactctggtgctgcctgaaaacrttccctgagcacccgcagtccctgtggatgctgctgtcccacagtgctctggtctctctgatggcgtccccgcccaggccctccccacctccctgcatacacacacacacacacacacacacacacacacacacaggccctccaggccctccccacctccctgcatacacacacacacacacacacacacacacacacacacacacacacacacacacaccgggcaggccctccccaaacagcacacagagcgcgtgcgagccgcgcttagctgccttttaaaatgacatctgctgctgcggaactctcaagttcatgcaatgaggacgtcatgaaggatgattattttagcctcaactgagagagagtcttttaaaacagttaaaaatcctcagttacagacaacatgcatgaaaatacaattcatttttacatatatggtaatacaaaattccactaacaatgtttaaacattagatattagaagatagtgagggataattacatcacaataaattaggttccagggaggcagttgatcaatttagagcaagcactttcttcagtggaacctggcatgaatcttgcctttacctctttctggctatatgaccttgaacaagtgatttcacctcttttattgctagtttca

SEQ ID NO: 723296 - DNA, 623 bp, Homo sapiens
ggaggtaaaggagctgtttgaaatgcttttaaaatttttagtttcaaattattgaacactccaagaaaaaaacttagatttttctagggataaaataaagcaaaccttacttcagatatgtgtaaagcataaatacacttaacactcttgaaagctatattgttgactatttgaaaagagggctgggaatattttcttcttaatgaataagtaaattcacttcacctgaggacttagtacaaatgggctcctacatcatctttactggccctttcccaccatggtgtaaggctatggttccttcctctcttcwgggcacggccaccacttctcaccttcttatcttgatgttctagccaactgtgactccagttacggtacttacctggggtttgcctcctacctctataattttcttcaccccaatctgcgctactggtgctttgtcctcaatcttcttctggggcccaggtctctgcatgacctcccattggctgaattattaattgttaatgggaatgtatctctgggtccctgaattgcttcctcaatttggtatcacataaaattaactatcaaggacgagttgttattaacatgaatatggaaaggtaaacatgcaa

SEQ ID NO: 723297 - DNA, 2325 bp, Homo sapiens
ttagtgggtcagtcatcccctaggtttttgactcttctgttgaatcagtctcaaatttctagaagacaaaatctgactacctagcttggatcagatgatttcctttggttctattaactgacatgggggaagggtaagttatgtacatcaaacatgggtgcagtagtcattcttgtgggttggggccatttatacagaaggggaaatgagctgggcagatcccatcaaaagatgtgttattcaggcagacatttttacttcatatattagatctttatatatttgaagaaaatcatccagtcttcttatttcccacaagctttattattttctcatgagaatgcatatttccgctttcttaggggcaacatccaggttattacagtagcttatcaactttcctaaaattcagctgtaaacttccttccaatttcacctgttgggtgaattaactacactcttaattaattattctcaagttctgaattcctgcatggcttgattcaatcaatcaagcaacctttaaccttgcttgtacagttgcctagcattaattttcagcttttcaaactccatatcttgccccattgaagatgaagaccatgtcttatttgccctttgaattaatcacaatataatgctgactgtattccttccttaattgtattcaaaaacttaataatctctccttcctcaggaatactttcatgtttacagaaggaaatcttcatttatctcttgattctgtgataagcattgtccttaattggtctacagaatgtgtcatttactctcaagaaatgcagactccaagttaccatgtattgaggctcgctatgtactgggaactctgttatgcaattttatacgcattatttaatcccacaacaagcctatgagatagttactattattatttccaagatcacacagctaatctaattctggaactttagtctcttgagtttccaagctcttgccttctttttcttttttttttgagacgcagtctcgctttgtcgccgaggctggagtgcagtggcgcaatcttggctcaccgcaacctctgcctcccgggttcaagggattctcctgcctcagcctccaaagtagttgggattacaggcacacgccaccatgtctggctattttttgtgtttttagtggagacggggttttgccatgttggccaggctgatctcgaactcctgacctcaggtgggctgcctgcctcggcctcccaaagtgctgggattacaggcatgagccactgtgcccggccttgctcttgccttcttaattgcaactctgtactgacatgcatgttaataaattggccaaactggcattctcactgcagctctgttsttttccaatccttgaacctctcattatggatgcctcatctcatcctgttgccttttccactgtgggttgtattgatcagaaagcagatctgtttatggaaggaaagaaaggtattgggtttagtagttattagaaatagaaatattagaataaagacaacattgaaagaaacagacaagagaaagaggatgaggttccccatgtttacattcctgtgactcaagagtgcagagagccaagaacaaagctgaagtttagccagggaaaggagagtgttcaactaaaattaactctgtaggcagcattcccagttgtttgagtttcaggatcccctcctcaatttcctaagaaaaacaacatgcaagttaaaaaaaaaaataaacagtagttaggggcaaagaaaccggtgtaattagggctaaagtgatctgtggtatctctaaatggtagctccatttagagaatgatctcagaggcagttttggaagggtttggatcagagcaaggaggagatcatgagtgcaagactataaactatggtctataaatcagaaagtttatactaaattcagaaactttaatgcttcttggggactgtgggcttgttaatatgctactggcctgattttggttaagtctaaggataaactggaaaatcattagtccatgtggctatatctgttctacctggtactgtagttgtgcagagggctgctcccacccttcagcactgagatcatggagctcgttctcttggtggttttcatgattgaacctggattaatagttactaattatatatatgtataactatcaatagtgtaatcatggttattatgaaatattgatataattattaatgcaactaactactctccctatattctctggtctctagtttctatcaaggaagactgagcccacacaaaggcttaggataggaggagaatcaacatt

SEQ ID NO: 723298 - DNA, 882 bp, Homo sapiens
atctctgctcactgcaacttctgcctcccaggctcaggcaatcctcccatctcagtgtcccgagtggctgggactacaggtgcataccaccacacttggaaaaaattttaaggtttttgtagctacgaggtcgcattatattgcccagactggtctcgaactcctgggctcaagtaatcctcccacctcagtctcccaaagtgctgagattacaggtttgagccactgtgcctggccttgatcattcatttagacttgcagtctgtgccatgggaaatccaaaagctccaccatgacaaattaactccctgttacagacgtagctgttgtctctccgtatctggagaccctcagagcatttttaaaagcatgacattttaaatgttaatttttattgcccagcaaagttaatcacacctatctatgaagagttaatttccaattaaacagttctctgttcactatctataattccctcaaaggaaccaatcatacttaaagggattcagagcctgttatatttcttatcgtctattttcatgagagtatgtacttattataccagatttctggcatttagtgttatagatatgcaaattccattttaactccccttaagatttccaacacccaaatgaacaattaagttttaacttttcatctgtgttctctctctctctcatctgtgttytctctctctctctctctctcagcacatgctgttaaaactttagtttatgctataggtccttgtagcgacaattttagaaacacccctttcttgtgtttatactattataactttggggtctctaaaccaattctaaatatgcattataattataactttatatgttacattcttatcctacttttgtctta

SEQ ID NO: 723299 - DNA, 2444 bp, Homo sapiens
tagacaatttgcataatataaattggctttcatatgcacatatttattaggtttcaaatattcaaatatattacacctatataagactcctactaaaatcctgtgttcccacttagcatttgattttttaaattcccattcatattgatattaactaactcattttttcaaatatgcacttgaggatactaatttttatgagttttaagtagtataatttcttccaaccagctctaaattactgaaatctttcaatgtcaggctgtttataggaatgctaaaatgcaatttcaaatgcccagcatgttaataagcaacatcatttggcttatctctgccatgttaagcaatgcaaggaatatggcatttatttgtacagcaggcattatttcccaagtgacacatcgtttcttattcttcagcctaaactgctgaatattttctattttaccgagtaactgaaacttgaatatcggtagtgcatggtacatagacctaaaaaagatttaattcaaactaccctctactgtctctgtggatatcttcagtaacaactttcttggaacagtggtgcttattttaaaagataatgttaggctgggtgaggtagctcacrcctgtaatcccagcactttgggagtctgtgcatgctttcagtaacagtttccttgaaacagcactgcttattttaaaagatagtattagaccgggcgagctggctcacacctgtaatcccagcactttgggaggctgaggtgggcagattgcttgtgtcaagaagttcaagaccagcctgggcaacatggcaaaaccctcgtctctacaaaaaatacaaaaatcgggccgggcgcggtggctcatgcctgtaatcccaccactttgggaggccaaggtgggtggatcacgaggtcagaagatggggaccaccttggctaacacggtgaaaccccgtctctactaaaaatacaaaaaattagccgggcatggtggcaggcgcctgtagtcccagctacttgggaggctgaggcaggagaatggcgtgaacctgggaggcggagcttgcagtgagccgagatcgcaccactgcactccagcctgggtgacagagcgagactctgtctcaaaaaaaaaaaaaaaaaaaaaaaaattagctggatgtggtgatgtgtgcctatagtcccagctacattagaggctgaggtgggaggatcacttgagcccaggaggttgaggctgcagtgagccatgatcacaccactgcacatgataaattggtatcatgtcttaatttttttcttaaaaaaaatattatggctatggaaaagatggagtttctcacaaatatgtggttaagaaaagtccaaattttatctgttatattgcagacttgtggaaattcctcctaatgaagccactaatgcaaaattagtatttatcattttcagggtgtgcaaaagagttcaaggaaaatgccaaactaacctgctcaaggctggtggaaagatttttctcttccaacctaggaagcgcttcaatggagcgactattttattcatttttatagcccaggatgtaacacagtgccagtatgcagtagacaggcaataaatatttcttgaatgtgtttctctgcctagcgattcatcttcccttttctgattcaagataatttcagttgcaaaagaaggacattgaaatccacaggctgaagcaaaaagagcttagggctcatgccaccactgagtccaggagcttcagtcttggtgctttaagatccacgatttgaatatgtgactgggactttgttgctctctgttaatttctcatttctgattcctcagtactgtttccacttcctgaagctgacagtagctccaagagctatatacttcaggttcaaatcccagatgatccctggaccaatcattctggccagggacatcaacatgattaatttagccatgggcatatgttccacccctggatcacaggcgaagtcaatgcctgcagaagtactcaagcccacagtagtaaggggttggacccattgatagaaagagggggacagttatcaggagaagactgaatggatgctgaacaaaactaagccagagttgtcccttaaagatacttacagtatttgttaagcattcagtcagtcagctacatgctatgtactgcatttgctgtattttaagatgtacatgttttctcttcacatctttatatctccaaaatcaggcagcatcatataatcactgttggcccaatggcagtcatgacacggcttgactgtgcttacccaaatattaaaaactccaaaatcaagacctgtccaaaggggtgtcagcagcttgagaaaaaatccggagacaaatatgggatcattttcttagctctcagaacccaaattgtaatgggaagaggggtagggacaagtagtg

SEQ ID NO: 723300 - DNA, 2444 bp, Homo sapiens
tagacaatttgcataatataaattggctttcatatgcacatatttattaggtttcaaatattcaaatatattacacctatataagactcctactaaaatcctgtgttcccacttagcatttgattttttaaattcccattcatattgatattaactaactcattttttcaaatatgcacttgaggatactaatttttatgagttttaagtagtataatttcttccaaccagctctaaattactgaaatctttcaatgtcaggctgtttataggaatgctaaaatgcaatttcaaatgcccagcatgttaataagcaacatcatttggcttatctctgccatgttaagcaatgcaaggaatatggcatttatttgtacagcaggcattatttcccaagtgacacatcgtttcttattcttcagcctaaactgctgaatattttctattttaccgagtaactgaaacttgaatatcggtagtgcatggtacatagacctaaaaaagatttaattcaaactaccctctactgtctctgtggatatcttcagtaacaactttcttggaacagtggtgcttattttaaaagataatgttaggctgggtgaggtagctcacacctgtaatcccagcactttgggagtctgtgcatgctttcagtaacagtttccttgaaacagcactgcttattttaaaagatagtattagaccgggcgagctggctcacacctgtaatcccagcactttgggaggctgaggygggcagattgcttgtgtcaagaagttcaagaccagcctgggcaacatggcaaaaccctcgtctctacaaaaaatacaaaaatcgggccgggcgcggtggctcatgcctgtaatcccaccactttgggaggccaaggtgggtggatcacgaggtcagaagatggggaccaccttggctaacacggtgaaaccccgtctctactaaaaatacaaaaaattagccgggcatggtggcaggcgcctgtagtcccagctacttgggaggctgaggcaggagaatggcgtgaacctgggaggcggagcttgcagtgagccgagatcgcaccactgcactccagcctgggtgacagagcgagactctgtctcaaaaaaaaaaaaaaaaaaaaaaaaattagctggatgtggtgatgtgtgcctatagtcccagctacattagaggctgaggtgggaggatcacttgagcccaggaggttgaggctgcagtgagccatgatcacaccactgcacatgataaattggtatcatgtcttaatttttttcttaaaaaaaatattatggctatggaaaagatggagtttctcacaaatatgtggttaagaaaagtccaaattttatctgttatattgcagacttgtggaaattcctcctaatgaagccactaatgcaaaattagtatttatcattttcagggtgtgcaaaagagttcaaggaaaatgccaaactaacctgctcaaggctggtggaaagatttttctcttccaacctaggaagcgcttcaatggagcgactattttattcatttttatagcccaggatgtaacacagtgccagtatgcagtagacaggcaataaatatttcttgaatgtgtttctctgcctagcgattcatcttcccttttctgattcaagataatttcagttgcaaaagaaggacattgaaatccacaggctgaagcaaaaagagcttagggctcatgccaccactgagtccaggagcttcagtcttggtgctttaagatccacgatttgaatatgtgactgggactttgttgctctctgttaatttctcatttctgattcctcagtactgtttccacttcctgaagctgacagtagctccaagagctatatacttcaggttcaaatcccagatgatccctggaccaatcattctggccagggacatcaacatgattaatttagccatgggcatatgttccacccctggatcacaggcgaagtcaatgcctgcagaagtactcaagcccacagtagtaaggggttggacccattgatagaaagagggggacagttatcaggagaagactgaatggatgctgaacaaaactaagccagagttgtcccttaaagatacttacagtatttgttaagcattcagtcagtcagctacatgctatgtactgcatttgctgtattttaagatgtacatgttttctcttcacatctttatatctccaaaatcaggcagcatcatataatcactgttggcccaatggcagtcatgacacggcttgactgtgcttacccaaatattaaaaactccaaaatcaagacctgtccaaaggggtgtcagcagcttgagaaaaaatccggagacaaatatgggatcattttcttagctctcagaacccaaattgtaatgggaagaggggtagggacaagtagtg

SEQ ID NO: 723301 - DNA, 1553 bp, Homo sapiens
ttgaaagcagaggcccaagagtcaataaagtggaggactctgaaaatgcaagtaaaatgtgacaaccaatagtctaatcctggagaagtttggggttttgagctgaagtcacagggattagcttttgcaaggagaaccattttctcagagaagaaagaagaaaaataaataatggaaagatgcaaaaatatttgtgaaagctccagtgggaagtatttctacttgaagaagaaggcaattcactctgttgagaatgaggaggaggaaaagttgagatcttggatgcaaaaggtttagaattgcagaggtagaaaatgtaataaagagatgatatggtttgctgtatcccacccaaatttcatcttgaattgtagctcccatactccccatgtgtcatgggagggacccagtgggaggtaattgaatcataggggcaggtttttcccagctgttctcatgatagtgaataagtctcacaagatcagatggctttataaagggcagtttccctgcacactttctcttgtctgccaccatgtaagacatgacttttctcctcctttgcctcccaccatgattgtgaggcctttccagccacgtggagctgtgagtccattaaacttctttttctttctttgttttttttttgagacagagtctcgctcagtcgcccaggctggagtgcaatggcacaatcttggctcactgcaacctccatctcctgagttcaagcaattctcctacctcagcctcccgagtggctgggattacaggcacctgccaccacacccaattaatttttgtacttttagtagagacggggtttcaccatgttggccaggctggtcttgaacccctggcctcaggtgatctgacggccttggcctcgcaaagtgctgggattacaggcttgagccaccgcacctggcctaaacctctttttctttagaaattacccagtcttgggtatttcttcatagcagtatgaaaatggactaacacaagagatgatgaaaaagatgctaaaaagctgtatgtgctcttctgaaattatattcasagtagatccaatcaacatactcttttgatgtcccagtagcacgtaacaatttgagaaagtaacaaaacaagtgaatgaggggagatttctgactggaaatggagagaagtcaaggaaatgaagagtcatgcttatggcggtaaggaaataagtgcacacacgtacacacaaaaccacagcaacaaaaactgacctatagtgagtggagaggtaagggaagtcagaatggaggtaatgaactaagaaagtaggaagaggttctagggattaaaggtcacaaagacattttttaaaataggaagcaagacaaggtgggcagaataagaggctgtggcaacaaaagggaattctatatccttggagtaatttattcattaaggtggtcccttacattggtaactaatgagttcctggaaatgtgtttaaaggcaaaaaacaaaacaaaaaaaaaaatagaaaaagaaaaaaacaacaaaacctgtagatgttagaa

SEQ ID NO: 723302 - DNA, 615 bp, Homo sapiens
gggcaatcctgaagggactggctagtgggagccctggtgccctgaacattcttaggcatcttttagctttggaccaaacagaccagggctcaaatgggccccacatatttattcaacagaccagggctcaaatttggaactgccagttctcaaatgtgtgatctcaggcaacttgtgtaacctctcgaagtcttggttaactcatctccacagcagagatattaaaacctgccttggagagttgatatgaggcttaaggaagcttgtgcacagtgggttacagaacgaccatagtttctggcatggaggtggccctaaatcagtttgaaatcccatttcacttctgtcccaggwcaaggcgaggatgtgtggggtgggaaaaggagtgtggattagaaaaggttcttacgcctccctcacgtggggtgccatttgagagtgacttgtctccaagacttgccctgcctgtggtttatttggacagcttggactgagaatctagtgaaaaatcagatcctgtctgccttcaactcctgtctgtcttttacccaaaagtgtggctggcaggtcctaatggctccaggtccaggggaggcctcagagttccagattaga

SEQ ID NO: 723303 - DNA, 592 bp, Homo sapiens
tgaccacgtgcatcctaagtacacggagtcttgttttccatccactaaatgtcgttgaccagtttacttttcattccctgcacaaataaacgtttgctacaaacgtgacttgtgcatggccccttgayggcaggggccaagtctgttctactagaaagatgccttggagaccatgtattccaacctctctctttacccctgaagaacctaaggtccacagaggataagtgatttttacaaggtcacacagcaagcaaccagagcggagatgacagctcaggtctctggcttcttagctgctgccctttccattgtcacaggctcctgttcaaaataccccagaaccactcatttatatatcgattgtgagtatatgcattacaaagttttatttattgaatactctatgtactaggcatggtgccaactgctttacctgcattctgtcatttcagtttcataaacagttcagaaatgagaacattattatcctcatttcatctctgggacaactgagcctccaggaggtgaagtgacctgctccaaaccacagagctggaaagagccaggattgcaacccaggcctgtctga

SEQ ID NO: 723304 - DNA, 633 bp, Homo sapiens
cccagctctaggggctattacttctataatacctcagcgttctattttgacccttttggttacttaattaacaacatcagaggcccggcctggtggctcacgcctgtaatctcagcactttgagaggccgaggcgggcggatcacgaggtcaggagttcgagaccagcctggccaacatgatgaaaccccgtctctactaaaaatacaaaaattagtcgggcatggtgacacgcacctgtaatcccagctactcaggaggctgaggcaggagaatcgcttgaaccagggaggcggaggttgcagtgagccaagatcccgctactgcactccagcctgagcaacagagcgagactccgtctcaaaacaaaacaaacaaacaaacaaaaaacaacctcatacctaattaacaatatattaaattctgtctccttcaccttggcagccacaggtctttctgggagtggcagctgaatccactttatagtttttccaacaattgcagaacagctttattgcccccaccctcactcacccagatccccacactagcctgccagtgcctcctcctcagaggtctgggttccagtccratgggcctgtggacccagagatatgggcaccagccaagtgca

SEQ ID NO: 723305 - DNA, 601 bp, Homo sapiens
ataaaagatgttaagcaagaaactcatgggtggaaagagagtattattgagatgattggcaagaccacttaggctgtcagataattaaatgaagccaagaaggggttatgggaaataagctgattacggcaggtaagacaggaaggaatgatggaagaactggaggaaaaggagcacctattaatcttggggaattttrtcatgtattcagatttttaaaaaatcaattaatgaacatttgactatagaccatataaatcagggctgattcatagttttcccttttcttaaaactaattagcagatattagctataacaaaggatcttttgacctcaaaagaatacccttggtacattttctcatcaaactaatacttagaaacaatagggaaacaggaaattaatgagacatctgaaactttatgatttcttttcatctggaaatattagggggaaatcaaataaaatatacattttatcatgctgtttttacatcagacttttcccctagtattctttctcatttggaacatgttaatgtactacaaatgaaagaggatgaaacacttgaaaaatttctggattgtaatatgtttaaaa

SEQ ID NO: 723306 - DNA, 1047 bp, Homo sapiens
ctaatttttgtattttttgtacatagggggttttgtcatattgtccagactggcctcgaactcctgggtgcaagcaatcttcccacctcagcatcccaaagttctgggattacaggcatgagccgtggtgaccggccctgttttgtttttaataaatggcattatactttggggaacaacaacaacaaaaaacagtaaagctgcttgtaatactaaaagctaataacttgtcagtgtgtgttcatatatatagctactmatatgcatattatatatttcaaattggagtataatcatggatacatactgctttatagcctactttttaacttaaatatattatagttatctttccatatctgtttttcatgactcctaacgtcccattatttgagtattctgtaacttcatcagtcatttattgtttttttcactattataaatatttctgttcacttgcttaattattttcatctctctctctctttttttcctttgagacagagtctccctctgtcacctaggctggagtgcagtggcgtgatctcagctcattgcagcctccgcctcctgggttcaagtgactctcctgcctcatcctccctggtacctgggattacaggcatacaccaccatgcctggctaatttttgtatttttagtaaagacgaggttttgccatcttggctaggctggtcttgaactcctgacctcaggtaatctgcctgccttggcctcccaaagtgctaggattatagatgtgagccactgtgcccagccttcaattcttttttttttttttttttaattgtgacataaaacccatgtatttatttggggcaaattccgagaagcggaattggcaggtcaaggtatgcccttttgaaggttcttgataaacattgccagattgcccccaagaagtatgtaccaattaattttaacaggcagtagaaagcctgattttggataattatgtttttatctttaccaggtagatttatctgatagataaaaggtgttacttgttttattttgtgtttccttg

SEQ ID NO: 723307 - DNA, 1047 bp, Homo sapiens
ctaatttttgtattttttgtacatagggggttttgtcatattgtccagactggcctcgaactcctgggtgcaagcaatcttcccacctcagcatcccaaagttctgggattacaggcatgagccgtggtgaccggccctgttttgtttttaataaatggcattatactttggggaacaacaacaacaaaaaacagtaaagctgcttgtaatactaaaagctaataacttgtcagtgtgtgttcatatatatagctactcatatgcatattatatatttcaaattggagtataatcatggatacatactgctttatagcctactttttaacttaaatatattatagttatctttccatatctgtttttcatgactcctaacgtcccattatttgagtattctgtaacttcatcagtcatttattgtttttttcactattataaatatttctgttcacttgcttaattattttcatctctctctctctttttttcctttgagacagagtctccctctgtcacctaggctggagtgcagtggcgtgatctcagctcattgcagcctccgcctcctgggttcaagtgactctcctgcctcatcctccctggtacctgggattacaggcatacaccaccatgcctggctaatttttgtatttttagtaaagacgaggttttgccatcttggctaggctggtcttgaactcctgacctcaggtratctgcctgccttggcctcccaaagtgctaggattatagatgtgagccactgtgcccagccttcaattcttttttttttttttttttaattgtgacataaaacccatgtatttatttggggcaaattccgagaagcggaattggcaggtcaaggtatgcccttttgaaggttcttgataaacattgccagattgcccccaagaagtatgtaccaattaattttaacaggcagtagaaagcctgattttggataattatgtttttatctttaccaggtagatttatctgatagataaaaggtgttacttgttttattttgtgtttccttg

SEQ ID NO: 723308 - DNA, 1971 bp, Homo sapiens
tttcatattttaatgattgaatgttgactttgtaacccagtaaagagttacattgactactttgaaaacagctgtacaagatttacccaaaatattcaaatccatctatgtgatgtaagtgacaccattctaacaggatgggggctcataaaattcaatgggtaggagagggaaagaatggtagtgatctttcatgggtggtcaaaggccgagtaaatgttcattgaaagagagggcagacttgggaaatggctcccccaactcaaagggaaattattgtgrggaaacacccctaagaggccatatttttgcaattttctaaggggaaaaccctgtatttgctttttagggtcttttcactgctaaatttcagatgttcagagtaatagagaagttatgagtctgagtagctcaggctttatgatgaccaaaccctaacttaaaaatgtaaaatgagcagtggcttatttttatgaataccattttattgccactcaacttctttccattttagactaaaaatattcaattgaaattaataaaacaaacaacatgcatttgttggtaagaaactgagaggaattattccaaagcttgcacatctggttgtaacttaaaagatttaaaatattactaggcttcattggtgattcagtattgtaattacccatgaaaaggtatgttagtgctttattgtgtgaattaattaccaatcccatgagacaccacctgcaagcccatatttaatgcatctctgttcccattagcaacattcatgcaaacagagcattcagggagtaaatctaccaagtcattttttgtagtattaatacaagtcaccatagttttcagtttttaaatagagatgttgaagcactacacctactgattgcccttgtattacagctgtatgagtcaataatgataagtaagaccttaaatcaggtgagcctcctggatatccacactattatatcattcttgccattggcctagactagtaagaaatagagggaaagcattctattatgtatgttgatatacggatttgaagtcgccaaaataccttggggaggaacaatatgatttttaaaaactcttcaactttccttagtatactatcctgcttaatattaatagcagtaccagctcttctgttggtttggtcagatcagttaaaaattccaaaagatggcctggtgtggtggctcatgcctgtaatttcagcagtttgggaggctgaggtgggcagatcacgaggtcaggagatggagaccatcctggccaacatggtgaaaccccatctctactaaaaatacaaaacttagctaggcgtggtggggcgtgcctgcaatcccaggtactcaggaggctgaggcaggagaatggcttgaaccagggagtcggaggttgtagtgagccaagatcacaccactccactccaacctggcaacagatcaagactccatctaaaaacaaaaacaaaaacaaaaaaaatccaaaagaccctgattgttgccagcagatgaaaaaaatacatgggcttatagtagaaggatttataatcctttgggtatatgtttattgcagcactatatgtttattgcagcactatttacaatagcaaagacttggaaccaacccaaatgcccatcagtgatacactggataaagaaaatgtggcacatatatatcatggaatattatgcagccataaaaaagaatgaactcattttatgcagtcataaaaaagaatgagttcatgtcctttgcagggacatggatgaagctggaagtcatctgaagctggaagcaaactgacacaagaacgaaaaccaaacaccacatgttctcactcacaagtgggagttgaacaatgagaacatatggacacagggaggggaacatcacacaccagggcctgttgggggctggggggcaaggagagcgagagcattaggacaaatacct

SEQ ID NO: 723309 - DNA, 1971 bp, Homo sapiens
tttcatattttaatgattgaatgttgactttgtaacccagtaaagagttacattgactactttgaaaacagctgtacaagatttacccaaaatattcaaatccatctatgtgatgtaagtgacaccattctaacaggatgggggctcataaaattcaatgggtaggagagggaaagaatggtagtgatctttcatgggtggtcaaaggccgagtaaatgttcattgaaagagagggcagacttgggaaatggctcccccaactcaaagggaaattattgtgaggaaacacccctaagaggccatatttttgcaattttctaaggggaaaaccctgtatttgctttttagggtcttttcactgctaaatttcagatgttcagagtaatagagaagttatgagtctgagtagctcaggctttatgatgaccaaaccctaacttaaaaatgtaaaatgagcagtggcttatttttatgaataccattttattgccactcaacttctttccattttagactaaaaatattcaattgaaattaataaaacaaacaacatgcatttgttggtaagaaactgagaggaattattccaaagcttgcacatctggttgtaacttaaaagatttaaaatattactaggcttcattggtgattcagtattgtaattacccatgaaaaggtatgttagtgctttattgtgtgaattaattaccaatcccatgagacaccacctgcaagcccatatttaatgcatctctgttcccattagcaacattcatgcaaacagagcattcagggagtaaatctaccaagtcattttttgtagtattaatacaagtcaccatagttttcagtttttaaatagagatgttgaagcactacacctactgattgcccttgtattacagctgtatgagtcaataatgataagtaagaccttaaatcaggtgagcctcctggatatccacactattatatcattcttgccattggcctagactagtaagaaatagagggaaagcattctattatgtatgttgatatacggatttgaagtcgccaaaataccttggggaggaacaatatgatttttaaaaactcttcaactttccttagtatactatcctgcttaatattaatagcagtaccagctcttctgttggtttggtcagatcagttaaaaattccaaaagatggcctggtgtggtggctcatgcctgtaatttcagcagtttgggaggctgaggtgggcagatcacgaggtcaggagatggagaccatcctggccaacatggtgaaaccccatctctactaaaaatacaaaacttagctaggcgtggtggggcgtgcctgyaatcccaggtactcaggaggctgaggcaggagaatggcttgaaccagggagtcggaggttgtagtgagccaagatcacaccactccactccaacctggcaacagatcaagactccatctaaaaacaaaaacaaaaacaaaaaaaatccaaaagaccctgattgttgccagcagatgaaaaaaatacatgggcttatagtagaaggatttataatcctttgggtatatgtttattgcagcactatatgtttattgcagcactatttacaatagcaaagacttggaaccaacccaaatgcccatcagtgatacactggataaagaaaatgtggcacatatatatcatggaatattatgcagccataaaaaagaatgaactcattttatgcagtcataaaaaagaatgagttcatgtcctttgcagggacatggatgaagctggaagtcatctgaagctggaagcaaactgacacaagaacgaaaaccaaacaccacatgttctcactcacaagtgggagttgaacaatgagaacatatggacacagggaggggaacatcacacaccagggcctgttgggggctggggggcaaggagagcgagagcattaggacaaatacct

SEQ ID NO: 723310 - DNA, 594 bp, Homo sapiens
taatttacattcccaacagcagtataaaataatttccttttctcggcaacctcaccaacatctgctattattggacttttaataatagcaaacaacctttaaataaccagtacagcaagattttcaaattttgatatgtgtaaaaattacctgggaagcttataaaaatgtagctttccaggctccactctagaacatctgatttagtaggtatagggagtgctgtgaacatcttttattaaaaataatagaaaactggtgaaagcgactgaaatcaatctaatccaaataagtaaaatgtattgtgcttttactaagyccatatggaaattaacaagatagagtcttagttgttcatcttataaaaagaataacaatactgaacaaatcctttcccaagaagtaaaaagtatgtgttgattgtgtgacagatttggggaaaagcaagtgaaactaacagggagggaaaagatggggaaaggaggggtcaaagaaggggaatgttctatctcttgctgtatacaaaaccactaagagacttaatggcttaaaaggcaacaatcatttcatttgtttatgaatatgaaatttggg

SEQ ID NO: 723311 - DNA, 601 bp, Homo sapiens
caacctgagcatggataagaattcactctctcaaagtaccaaaacaaacaaaaccccaaacagcaattcaaagtactaaaaaaaagtaaaaataaaggtaaattaaggaaagaaaagaattaacttggatgttctttccttttccttttcagcagctttattaaggtatactttacatccyataaaacttacccatttatagtatacagctcaatggttttcagtgtattcacagagttgtaccaccatcactgccatctaatttaagaacattgtcattactccaaaaagaaactgtatccattagcagtcactctctattccctttcctcccaggcacaggcaaccactaatctttccatctctacagaatcacctattctgaacattccatataaatagaatcatacagtatgttttccttctgtgtgatgtgagacttctttcagttagcatcatgttttcaaggctatccatgttaagcacattatcagtgcctcagtcctttgaatggctgaataataccctattgcatgggtgtacgcattttttttttttttttttttgagatggagtcttgctctatggcccaggctggatg

SEQ ID NO: 723312 - DNA, 1279 bp, Homo sapiens
tatacagttttaaaaacctgtattttataaactttcattattcaaaaaatttgccagttacaaatactctggtgcctttacactacccatttatcaagaaaatgtctcgaaacttggtttaacttttgaacaatatatatttgtactttacaaagcattttcacctctattatttctcatttaacttcacaaaattccaagaaaggtatggcagaaatacaactggcactttgccaactaaagctgagcaaccagcatattgctcttaatgataaaggggagggatgtaaactgtaataacaaaagcctggagatccaaagaaacataatagatagtccaaatcttagtagacttctggggtcatttttaacttatgacttatttatgatacactcaatttggtccttcttcagctaaccagaaacagtattgggggcccaagatcagaaatggttcattgtgagtcctcaagtaaagagaacaaacagaaactgtttttaaagtaatatgaatgtatacatattaccataaaaggtaggaaattgctgacagtagcttctatttcatttaacgtgaatcagaaatctcagaggcctccatcaatacctgtaagtcaactgtattttctacgccaatctggagtcgctagttccaacaaatgttggaaaaagttctcgtgttctaatttgttacagtgacccaactgtggcactatcttccatcacttcaaatttggctaaatttcttccttctaatgaaaacagcttgaagaagtgtatttcttctttataagcatattttcaaagaaaaactacaaaaatctacctctaagaacttgtaatttcaaaattaacattttatgtgagggaccaaaacaacaggtagtttaagctcagtaaacattcatatctacaaatcacatggagatatgatgctatcttgcctattagttaaatttaaaaacacacccacacacacactcttactcaatttgsaagtgtttgggaagttgaaaccaaacatatttcttaaatgctcccaaaataaatttctgtagggcctgcagacaggactgcatttctccttttggctttccatgatacaacactagggttagtctaataatgccacaatccttaaataccttcaacatgtacttttaaacactatcatattctaaaacaggactaaaatgagtctaggtcaaaagataaatttcattttggtcaggaacacacaataacaatattcaaatgaactgtatccaaaaaaacgtta

SEQ ID NO: 723313 - DNA, 578 bp, Homo sapiens
tctggtaagatcagttaccacacaaaagcaatggctcttcaagttaccttcatggaatacagtacagagtttgtgttaaaaatgcattttcacttasttgtggttattaaagactttgatcaaggcagaacctctggaaatacaacgaatcttgacaatttaaataaaaacagctccttagtcatggctcattattcttcctttcaaagcctcttgcttcaaacagtattactcttagccaattaatattctgtaaaaggtgctgagaatttttgatcaaataaaatgcaacagatattttaataccattttaagcccagcacaattatatatttaaagctttaaaacaatgagggaacacatagtacaggcaaacacatccattttccaaacaaagtaaataatacaactaaagtgttctctacatcactacaggagttcacacattacaactacatctaagtgcaattactgtaaattataaagtgctaagacacacagcagcactagtcagcagtcagtgctgtacattttgaaagcatctaatgtaggcagcaagcatgatgtggatagcaaaa

SEQ ID NO: 723314 - DNA, 652 bp, Homo sapiens
cagatgtcataattttcagtgtcgatagcaattcccaaagcataagctctatgagggcaggaggtctggtctgttttgagcactggttgtatggctagcacatagyagatgacaagtatttttttaaataagtgaatgaacgaagtgtttccaaaacattggtcccaggaggtgttctgtgacaaatgggttctatgaataaataacttggggaaacatgtctagtcttgaaggttcatgcggcccaccaacacattcaaggctctaataagtcctgcagtgaaggacttccatagtattttatttaatccaacaatttctaaaaacgtttggccacagatatcccctttcctgtccatcttagatcacagtttgggagatgctggctcgctgaatgtatcaaaggcggagctttgaggcaggagagcacagtgcggagtctggaacctcaggttcctcagggtcttgttctcactccgacatttactctccatgtaactgcaaataatattcgtgatgagaatgcgaacaatagcaacaattgcaaccctagtttcccagaatattccagtctaggaggaagaactggggacacagtgatgggaacttccggtgatgctctggtctgtccactcggagcttcccatccatc

SEQ ID NO: 723315 - DNA, 652 bp, Homo sapiens
cagatgtcataattttcagtgtcgatagcaattcccaaagcataagctctatgagggcaggaggtctggtctgttttgagcactggttgtatggctagcacatagtagatgacaagtatttttttaaataagtgaatgaacgaagtgtttccaaaacattggtcccaggaggtgttctgtgacaaatgggttctatgaataaataacttggggaaacatgtctagtcttgaaggttcatgmggcccaccaacacattcaaggctctaataagtcctgcagtgaaggacttccatagtattttatttaatccaacaatttctaaaaacgtttggccacagatatcccctttcctgtccatcttagatcacagtttgggagatgctggctcgctgaatgtatcaaaggcggagctttgaggcaggagagcacagtgcggagtctggaacctcaggttcctcagggtcttgttctcactccgacatttactctccatgtaactgcaaataatattcgtgatgagaatgcgaacaatagcaacaattgcaaccctagtttcccagaatattccagtctaggaggaagaactggggacacagtgatgggaacttccggtgatgctctggtctgtccactcggagcttcccatccatc

SEQ ID NO: 723316 - DNA, 652 bp, Homo sapiens
cagatgtcataattttcagtgtcgatagcaattcccaaagcataagctctatgagggcaggaggtctggtctgttttgagcactggttgtatggctagcacatagtagatgacaagtatttttttaaataagtgaatgaacgaagtgtttccaaaacattggtcccaggaggtgttctgtgacaaatgggttctatgaataaataacttggggaaacatgtctagtcttgaaggttcatgcgrcccaccaacacattcaaggctctaataagtcctgcagtgaaggacttccatagtattttatttaatccaacaatttctaaaaacgtttggccacagatatcccctttcctgtccatcttagatcacagtttgggagatgctggctcgctgaatgtatcaaaggcggagctttgaggcaggagagcacagtgcggagtctggaacctcaggttcctcagggtcttgttctcactccgacatttactctccatgtaactgcaaataatattcgtgatgagaatgcgaacaatagcaacaattgcaaccctagtttcccagaatattccagtctaggaggaagaactggggacacagtgatgggaacttccggtgatgctctggtctgtccactcggagcttcccatccatc

SEQ ID NO: 723317 - DNA, 652 bp, Homo sapiens
cagatgtcataattttcagtgtcgatagcaattcccaaagcataagctctatgagggcaggaggtctggtctgttttgagcactggttgtatggctagcacatagtagatgacaagtatttttttaaataagtgaatgaacgaagtgtttccaaaacattggtcccaggaggtgttctgtgacaaatgggttctatgaataaataacttggggaaacatgtctagtcttgaaggttcatgcggcccaccaacacattcaaggctctaataagtcctgcagtgaaggacttccatagtattttatttaatccaacaatttctaaaaacgtttggccacagatatcccctttcctgtccatcttagatcacagtttgggagatgctggctcgctgaatgtatcaaaggcggagctttgaggcaggagagcacagtgyggagtctggaacctcaggttcctcagggtcttgttctcactccgacatttactctccatgtaactgcaaataatattcgtgatgagaatgcgaacaatagcaacaattgcaaccctagtttcccagaatattccagtctaggaggaagaactggggacacagtgatgggaacttccggtgatgctctggtctgtccactcggagcttcccatccatc

SEQ ID NO: 723318 - DNA, 652 bp, Homo sapiens
cagatgtcataattttcagtgtcgatagcaattcccaaagcataagctctatgagggcaggaggtctggtctgttttgagcactggttgtatggctagcacatagtagatgacaagtatttttttaaataagtgaatgaacgaagtgtttccaaaacattggtcccaggaggtgttctgtgacaaatgggttctatgaataaataacttggggaaacatgtctagtcttgaaggttcatgcggcccaccaacacattcaaggctctaataagtcctgcagtgaaggacttccatagtattttatttaatccaacaatttctaaaaacgtttggccacagatatcccctttcctgtccatcttagatcacagtttgggagatgctggctcgctgaatgtatcaaaggcggagctttgaggcaggagagcacagtgcggagtctggaacctcaggttcctcagggtcttgttctcactccgacatttactctccatgtaactgcaaataatattcrtgatgagaatgcgaacaatagcaacaattgcaaccctagtttcccagaatattccagtctaggaggaagaactggggacacagtgatgggaacttccggtgatgctctggtctgtccactcggagcttcccatccatc

SEQ ID NO: 723319 - DNA, 1027 bp, Homo sapiens
tttttgtcagggtctcaccatgttgcccaggctagagcacagtggtaagatcatggctcagtgtactcttggactcctgggctcaggcagttctcaggcctcagcttccccagttgctagaattacaggtgtatgccaccataccgagctaattttttattttttgtaggtatagggtctcgttatgttgcctaggccggtcttgcactcctggcctcaagtgatcctcctgccttggcctcccagtgctctgggattacaggtgagagccaccatatctggtcagaactttgcttcttgatggtattttcccaagtctggagagtttggatttctaatttgtgacatttaagtaaatcttcataatcaaaagaaccagattcagtcctttaatgtgttagaaaggagactgaaatccagagaaatgctttgctgaagtccacataaggtagagatgacccaggattaatatttgggtcccctgactcccaggcttggagcccttctgttacccccggctgtagcctggctgagtgtgacaggggacaccagatgcagggcatgctttatgatcagatgtataattgaggaaagccaggcattcttaaattgtatattgggtttaagtggttgcttttcttctctaattaatttagattttgagtctctcagtcttcctccctgtcagagcttttaaaaatagctactaatgatcaagtgcttattgtgtgccaggcactgggcacagtgctttgctcacatttaacagacaaggtagatggcatgtgccagagaggtaaagtcacttgtcaaagtcactgagcaagtcattagtgcagctgaggttcaaatcctggtctgtctgattctaagccatttctgttttcacaagcccgcttcacttcacactttcttatgatgaggttatgggaactgatgtggaatttagagttgagtttaaacccaaaaygattgaccaagaaataagtctataacgtcaactgagaaaatcccctatcctcacaaa

SEQ ID NO: 723320 - DNA, 979 bp, Homo sapiens
tgggattacaggtgcctgccaccatgccctgctaatttttgtatttttagtagagacagggtttcaccacattggccagtctggtctcaaactcctgacctcaagtgatccacctgcctcggcctcccaaagtgctgggattacaggcatgagccaccacgcccagccagtagtttctttttgacgggaaggcaaggatgggyagaatagatttattttttaaaatccttaggaatctcattaataaaaaaagtaaaacatcattgtaaaaattcaaagagaggtgcataaagtagcaaatcaacgctttctgggtgtctttccgaacatttttctttgggtataaacatatacaccatttctgtgtttccccacccacctccaagtgcaaattgctttttatttttatttattaatttattttgagaccaggtcttactctgtcacccaagctggagtgcagtagcatgatctcaactcactgcagtgggatcttgactcagtgcagcctccactctcaggctcaagcagtcctcccacctcagcctccccagtagctgggactacaggtgcatactcacttttgtattgtttatagagaccaggtctcgctgtgttgcccaggctggtttcaaactcctgggctcaaacaattttcccacctcagccttccaaagtgctgggattatgagtgtgagccaccgcgcccggtttgcaagttgctttttaaggatgtttgattgcagaccttgcgttctagcaaatgaagacctgccttgctctttttttttttttttttttttgagacagagtcttgctctgtcgcccaggctggagtgcagtggcgccatctcggctcattgcaagctctgcctcccgggttcacgccattctcctgcctcagcctcccgagtagctgggactacaggagcccgccaccatgccttgctgattttttgtatttttaatagagacgggg

SEQ ID NO: 723321 - DNA, 979 bp, Homo sapiens
tgggattacaggtgcctgccaccatgccctgctaatttttgtatttttagtagagacagggtttcaccacattggccagtctggtctcaaactcctgacctcaagtgatccacctgcctcggcctcccaaagtgctgggattacaggcatgagccaccacgcccagccagtagtttctttttgacgggaaggcaaggatgggtagaatagatttattttttaaaatccttaggaatctcattaataaaaaaagtaaaacatcattgtaaaaattcaaagagaggtgcataaagtagcaaatcaacgctttctgggtgtctttccgaacatttttctttgggtataaacatatacaccatttctgtgtttccccacccacctccaagtgcaaattgctttttatttttatttattaatttattttgagaccaggtctyactctgtcacccaagctggagtgcagtagcatgatctcaactcactgcagtgggatcttgactcagtgcagcctccactctcaggctcaagcagtcctcccacctcagcctccccagtagctgggactacaggtgcatactcacttttgtattgtttatagagaccaggtctcgctgtgttgcccaggctggtttcaaactcctgggctcaaacaattttcccacctcagccttccaaagtgctgggattatgagtgtgagccaccgcgcccggtttgcaagttgctttttaaggatgtttgattgcagaccttgcgttctagcaaatgaagacctgccttgctctttttttttttttttttttttgagacagagtcttgctctgtcgcccaggctggagtgcagtggcgccatctcggctcattgcaagctctgcctcccgggttcacgccattctcctgcctcagcctcccgagtagctgggactacaggagcccgccaccatgccttgctgattttttgtatttttaatagagacgggg

SEQ ID NO: 723322 - DNA, 979 bp, Homo sapiens
tgggattacaggtgcctgccaccatgccctgctaatttttgtatttttagtagagacagggtttcaccacattggccagtctggtctcaaactcctgacctcaagtgatccacctgcctcggcctcccaaagtgctgggattacaggcatgagccaccacgcccagccagtagtttctttttgacgggaaggcaaggatgggtagaatagatttattttttaaaatccttaggaatctcattaataaaaaaagtaaaacatcattgtaaaaattcaaagagaggtgcataaagtagcaaatcaacgctttctgggtgtctttccgaacatttttctttgggtataaacatatacaccatttctgtgtttccccacccacctccaagtgcaaattgctttttatttttatttattaatttattttgagaccaggtcttactctgtcacccaagctggagtgcagtagcatgatctcaactcactgcagtgggatcttgactcagtgcagcctccactctcaggctcaagcagtcctcccacctcagcctccccagtagctgggactacaggtgcatactcacttttgtattgtttatagagaccaggtctcgctgtgttgcccaggctggtttcaaactcctgggctcaaacaattttcccacctcagccttccaaagtgctgggattatgagtgtgagccaccgcgccyggtttgcaagttgctttttaaggatgtttgattgcagaccttgcgttctagcaaatgaagacctgccttgctctttttttttttttttttttttgagacagagtcttgctctgtcgcccaggctggagtgcagtggcgccatctcggctcattgcaagctctgcctcccgggttcacgccattctcctgcctcagcctcccgagtagctgggactacaggagcccgccaccatgccttgctgattttttgtatttttaatagagacgggg

SEQ ID NO: 723323 - DNA, 1631 bp, Homo sapiens
ttctaaattatatattttttatttgtgcagaggaatgcagttgtaaagaaaataaataaatttatattttgaaatggggcaaaaaagatgtcaaatattgagatataaaaagtagtaccagataaaagatgcatagataaccctaagaatgagaatcacattttatatgtagggctaagccatttcctatatatattttctggctgactaattagcaatggtaaagatcaagttttacatcaatgctttcaaatcatggtgtttattttttctacttgctgagcccgtactttggaattatatattactatattttattgtgtgccctcttgaatgtatttattcatgtagcaaaaataaaaattaattaattaataagataaaggtaattatgtaagattaagaaagtcacagaaacatagaaactgacctaagttagtgcgtactataataaaacctacttatttctttgtctatgtctaaaaatgcatttctttctctatgtctaaaaatgcacaattcaaattccagataaactctagacctgcccatccagtttcctcctctttgtcaacagaactccaattccattcgggtatcaagggagactgtgcacaagcaatgtactcatcccaaagaacaaatcatgattggccaggctaatcatgttgatcctgttctttttctgccagggactgcctggaatggagtgaaattgagatgcctaaaccaatgacagaaaagctacctctgcactccttgctacatgaaataattcaccttttttcccgagctacatttatctggtattcaggtatatagtgttacatgcaatagatatatgaccawcagtgttatatgcagtagatatatgaccaatctagttttttaatataatggtatattggatattttttatactatcaagggattcttctccccagagataccaactgagaaaacctgtggttggcagtgcaggtggcttgtgggccacatcttgagaaaataatgtcttaaaggaattccagtgaaataaataaataaggaaaatatgtttagtttaacttgtgaagaaagcagcaaatgttaatgtgtgaaataagaactttctagttggggatacccttagagctacaatagtttacatttactgaggattcaaacaattccaactgaaatagaaagcaattttatgtcaatacttaaactactcaagcatttagaacatgttactaaaatgttagtatataatctctgaggtagcctataaaaatgtttcagctttctttttacaaatggaaataaatatcttgaagatgaagctagaaacagcgttttctcgtgttcaagaggcatggtattgagaaacaatttacagaatgaaatgagtgaaagaggaagctacagtcagatattttgagatgatttacaggaaagcataaaacaaacaaaaataaaacaaaacaaaaacaaggcagctaccagagagagatactgacagatttttttcttaagtactatctccttttgtcttttagtggggtctatccacctcactcacttcctttagcttaagttgccttccctttaccaaattttgcctcttatcattaacagccacctatctg

SEQ ID NO: 723324 - DNA, 590 bp, Homo sapiens
tatagtatgaatatttgtgttcctccaaaatttaaatgttgaaagctaatccccaagaggttggtattagggggtgaggtctttaggttgtgattaggttatgagtacagagccttcttgtttgggattagtacccttataaaagagaccctagagagccagctcgcctcttcatcatataaggacacagcaacaaggtaccatctagtagctaggaaacggtctgtcatcaggcacagagtgtgccttcatcttgatcttggacttcccagcctccagaactttgagcaatgaatctctgttgtttctacgccacccagtttattatttttttagtttacgccacccagtttattatttattwttttttatagaagcccaaatggatgaagaatgatagttatttcatagtgaagaatataaaaataatcagcatcactacatccataatcagagaagggaggggtgggataatgaacagagtcataagtataatgtatttagaaatctgggatgaaatcccataaactgaattgagttgagtgccctcctcccccatgatgagtgtgtatgaaaatgcactagagaga

SEQ ID NO: 723325 - DNA, 478 bp, Homo sapiens
agctcaaccttggggaatatctttaaaagagggggaagaataaaccttttggcaatgttatgcaaatatatgrccacttaatgaaattttaaattcattttttaaaatgtggtttttgccaaaggtaggttaattcttccctaaccttcttcttcctcttttggtaaaaagtagtttaaacatggcattcctatcccactgttccatataaataagtttcttttgaggcccatattagctctgtatgagcatcacatacttatttttttagtcactcaatgctttgttggttgatctgggtcccagttttcttcatgacctataaaattgtcttttccaacttcttggcagcagcctcttacagccttgatgatgtttcatgtggcctgccccttttcttggctaagctcagatcatatgtccatcatcggaagtgtacacaatgtggtctaaccacgaaagagacttccaagacaaa

SEQ ID NO: 723326 - DNA, 478 bp, Homo sapiens
agctcaaccttggggaatatctttaaaagagggggaagaataaaccttttggcaatgttatgcaaatatatgaccacttaatgaaattttaaattcattttttaaaatgtggtttttgccaaaggtaggttaattcttccctaaccttcttcttcctcttttggtaaaaagtagtttaaacatggcattcctatcccactgttccatataaataagtttcttttgaggcccatattagctctgtatgagcatcacatacttatttttttagtcactcaatgctttgttggttgatctgggtcccagttttyttcatgacctataaaattgtcttttccaacttcttggcagcagcctcttacagccttgatgatgtttcatgtggcctgccccttttcttggctaagctcagatcatatgtccatcatcggaagtgtacacaatgtggtctaaccacgaaagagacttccaagacaaa

SEQ ID NO: 723327 - DNA, 1374 bp, Homo sapiens
taaaattttacagaataaaataggttttaagacttttataaatttgaaaaagaataaaaggagtaactatatcaccagataggcacaccagtgatatagttatcaggacagtgagatactgttatggtcaatagacaaaggtggtgctgtcatgcacattacgttaatgacagagtggagagcttagagacaggcccacatgtatattattttctctgtacgagaagtggtattgcaaatcattgtggacagaatcaactaaaaataattactaaattataatattactccaaatgatataaaaacatacatttcagattctaaatgtgaacaacaaaaaactttaaaacttttaggagactctgtaagaaaatcccttgatggacacagagcaaagtttaatgtcatcaacaagacaaaattcacgacccatgaaggaagtgaatgataaattgactaccctwaaatgaataaaatctgtggaaaaaaataacaccatgaacaaagttaaaatccacaccacagattggcagaagatattaacaatgaatgtagccagtaaacgcttagtagccaaaatacttaaggcatgcctccaaaacaatgggaaaaaaataaataacctgatagaaaatgggcaagagataaatgggaaagtctgagaaggagaaaagaatatgccgttaaacatggaaaatgctacttaatttcactagtacagagaaatagaaattgacatcatactgagatccatatagccatctgtcttacacaaattaaaatagattaaaaagacagaagtctgataatttcaaaaggaggtgaggatgaagggtaatgtacattaattaagctaaaaatattagctgaaactgaaagtcacaattgcagcagcttcatacaataaaaattcattttttatgtcctagtccagtggacatgttgtacagcctctgatgaggtcattcagaaaacctggtttctctcatcttgaagctcagctttctttatggccctccgagaactctccattcagttgatagatgggtaaataaacctttgggaagattcacttattggtcactgtaacttaaggaccacacatctcttctactctcatgtcaccagtatcgtcttttggtaacacctagctgccaggaagactaggaaactgagtccagctttatcatcagaagaaaaaaaataggacttaatgaatgtcataatctcttgccacacaataagacacttgtacattactggtgagactgtacattagtactgccattttggagggcaatttttagtaaagtatacttagaagacattttaaaaattaaatatatcagtgtaagtacatttgaaaatgtaaat

SEQ ID NO: 723328 - DNA, 609 bp, Homo sapiens
gtttctattttttgaaatatcgcttaaactttcttaacgctttacttgctatagtgattttaagttacatacactatctttaccctcttctttttcacattaaaaacaawctaatttgtaaattaaattgtatgcagtatgaatagagagccagtcctgcttgttaatctctgccacaccaactttgaaccagatctttgcacaggaaaatgctgaacaactatttgctaaatgggtaaataaatcaataaacgttattgataaaacatgattcttctactatatcagaataagaaatttaaaatactggcatttcttctttcttcctcagtcctgttactattcttattttattgaaataaaactggatattgctgttaatttgtttttaacaatatgttcttttccatccatgagttagtttttgacgtttgtcaagtttcataactatgtttataacaattactcagacaccaactctgtgttaagttcattactcactgccttttcctttgaaccacacataccctcaaattgagttaatttattggttttgattcatttcttggttgaatgaagcacttccttgagtaatcttttcaagacaga

SEQ ID NO: 723329 - DNA, 842 bp, Homo sapiens
tacctctccttccatctgccttcctgccttttttcctttccaggtctctttcttcttcctccctctcactggcccatttcttctccttcctccaaagtgtttttatcaaatgtcatgaaaatggaagtgtaaccgggattatcttttaatcttaatatattcccctccatactctcaaattccacagatggctttatggttttgctctatttctgtttaatgtgaatctttagaatcagttaatagaaatctaccatatttagctcctggaaatgtccttaatgaaagctgacaacaaatggagtgcttatgacagggaaatggaaagtgaagacaggaacatgaggacctctcttgcaactccctgggaagtttggggaggttggtgtgaaatgcaggccaggtggcataaaccatatgtgtggaagagattgcttccccagcagctgcctagcaaccmaaatgtgtacctgacagggcttttaacgggcaaggtgatgctgtgcctaggtacttagtaaatgataaaacagctttcttgctgaaggatctgatactgctcaatagctcagaagaatctaatacgttcccagtttaaacgctcattttgttttatttaaatagaaatactccaaaaggtaggcaatgtagattgattgtaaaatatattagactggcaaataagacactaattttagattaaggtaggaaacaaaataccaatgccctgaagaaggtaataggcccctctaaaccccaacttaaccattacttaagctttgggtattaggttaaacagagcccagtagatcagattttagcattaaactcactatcatttt

SEQ ID NO: 723330 - DNA, 842 bp, Homo sapiens
tacctctccttccatctgccttcctgccttttttcctttccaggtctctttcttcttcctccctctcactggcccatttcttctccttcctccaaagtgtttttatcaaatgtcatgaaaatggaagtgtaaccgggattatcttttaatcttaatatattcccctccatactctcaaattccacagatggctttatggttttgctctatttctgtttaatgtgaatctttagaatcagttaatagaaatctaccatatttagctcctggaaatgtccttaatgaaagctgacaacaaatggagtgcttatgacagggaaatggaaagtgaagacaggaacatgaggacctctcttgcaactccctgggaagtttggggaggttggtgtgaaatgcaggccaggtggcataaaccatatgtgtggaagagattgcttccccagcagctgcctagcaaccaaaatgtgtacctgacagggcttttaaygggcaaggtgatgctgtgcctaggtacttagtaaatgataaaacagctttcttgctgaaggatctgatactgctcaatagctcagaagaatctaatacgttcccagtttaaacgctcattttgttttatttaaatagaaatactccaaaaggtaggcaatgtagattgattgtaaaatatattagactggcaaataagacactaattttagattaaggtaggaaacaaaataccaatgccctgaagaaggtaataggcccctctaaaccccaacttaaccattacttaagctttgggtattaggttaaacagagcccagtagatcagattttagcattaaactcactatcatttt

SEQ ID NO: 723331 - DNA, 1771 bp, Homo sapiens
cgtgcctcagcctcccgagtagctggaattacaggcgtgcaccaccatgcccagctaatttttgtatttttagtagagatggaatctcaccatgttggtcaaactggtctcgaactcctgacctcaggtgatccacccacctcagcctcccaaagtgttgggattacaggcgtgagccaccgcgcctggcctatttttaactttttggagaactgccaaactgttttccacagtagctacgcaccattttatatcctcaccagcagtgtacaagggttccagtttctccacatgcttatcaacacttgttattgtctgtttttaaagaaattatagtcattttagtgggtgtgaagtatattgttagtttgctttttctggaaagtcatgcaagtggaatcacatagtatggaccctgtgtgagccttcatttgctcaacttatatgcgaagattttttagatgtgtggtttgagggcctggaaagtcatgtcctggcctatggaatatattaaaggggaagataggattccttaaggcaaaagtggcagttcattaaccccctcccctgcaaatccctgccccacccccatcccgctgccacataaagatggacctgtctgcctgccttcactgcagagcaaaaattttatttatttatttttttttttttttaagacacggtctctctctgtcgcccaggctggaacacagtgacgcgatcccagctcactgcaacctccacctcctgggttcaagcaattctccttcctcagcctcctgagtagctgggattacaggtgcccaccaacatgcctgactaatttttgtatttttagtagagatggggtctcaccatgttggccaggctggtcttgaattcctgacctcaagtgattcacctcaagtgatccacccgccttggcctcccaaagtgctgggattacaggtgtgagcaaccacgcccggcctgcagagcaaaaatttattgagcacctgtggtgtgccaggactcatttataagtaaatagaaaaggtccctgtccttgtagggtttataaactatagggggaaactacaagtccacatacacataacctaccatttaaaagtctgactaaatgctgtgaaggagtaagcaaggtgctttgatagggaacagagggacagtgtgtgtataggaaggccagtcaggtgggtccctctgaggaggtgacacttaagagaccygaaggatgagaactgagccagccatgcagaaggatggggaggctgggctagaggagagtgttctaggcagaacaaaatagcacaagcaggggccctggggcagtgaaagcctctggtggttcagtgcaaagttaggaaggtgtgaaacagtgggaagggaagggacagggatgctcctgctggctgatggcccatactgtaggggccacaactttgtcttagctgcaagcaggaccggagacatgaagggccagactctgggccaatttccttgctgcgttctcagctccaagaggcagctcggctgggatattgtggctcattctagtgtcttgcagcctctcaaactggagggctggagggttggggcgtggttagtggcagctgtgacggagacttatcaggaagcaggcatgtaattcctgcagtgattcacacccagtccccagtttactgcagtcctgcagtgattcacacctgggccccagtttaccgcagctgcacctttaaacagggctcggatgcctgcatctccctgaccc

SEQ ID NO: 723332 - DNA, 617 bp, Homo sapiens
ttttacactgatccttttattatctgaggaaactgactcacagtgagggaaagttgttaatttatccaagacaaaaaggctcgtaaaaactggaggtaagagttgaactcaggatggctgaattcagaatccttacctgctggcatatgagtgacttagccccctaacctgcccactctacttctctgtcaagtcctgttcactttgcctcctatgtcctactctttctttcaagcasgtcctactcttcttcatcccctcagctacctctagttccggccaccatttctatcatcttgaagtcctttaagatactctgttcctcctattttaaactcgatagatgtagtatgaacctggtcatatgatgccccgcctcggtggattgccatagcccttgggatccaggcaagactctttaatctggcccaccatacctgaattgtttgatctctgcccacccagaatctgttttccttgtaccatgctcgtgctcactctgcgttctggactcccaaggccccaccactgagcctttgtgcatgctactgcctgtgcctggaaaacccctccacccactttttgcctaaaacattacccatctttctcaactcaac

SEQ ID NO: 723333 - DNA, 617 bp, Homo sapiens
ttttacactgatccttttattatctgaggaaactgactcacagtgagggaaagttgttaatttatccaagacaaaaaggctcgtaaaaactggaggtaagagttgaactcaggatggctgaattcagaatccttacctgctggcatatgagtgacttagccccctaacctgcccactctacttctctgtcaagtcctgttcactttgcctcctatgtcctactctttctttcaagcaggtcctactcttcttcatcccctcagctacctctagttccggccaccatttctatcatcttgaagtcctttaagatactctgttcctcctattttaaactmgatagatgtagtatgaacctggtcatatgatgccccgcctcggtggattgccatagcccttgggatccaggcaagactctttaatctggcccaccatacctgaattgtttgatctctgcccacccagaatctgttttccttgtaccatgctcgtgctcactctgcgttctggactcccaaggccccaccactgagcctttgtgcatgctactgcctgtgcctggaaaacccctccacccactttttgcctaaaacattacccatctttctcaactcaac

SEQ ID NO: 723334 - DNA, 617 bp, Homo sapiens
ttttacactgatccttttattatctgaggaaactgactcacagtgagggaaagttgttaatttatccaagacaaaaaggctcgtaaaaactggaggtaagagttgaactcaggatggctgaattcagaatccttacctgctggcatatgagtgacttagccccctaacctgcccactctacttctctgtcaagtcctgttcactttgcctcctatgtcctactctttctttcaagcaggtcctactcttcttcatcccctcagctacctctagttccggccaccatttctatcatcttgaagtcctttaagatactctgttcctcctattttaaactcgatagatgtagtatgaacctggtcatatgatgccccgcctcggtggattgccatagcccttgggatccaggcaagactctttaatctggcccaccatacctgaattgtttgatctctgcccacccagaatctgttttccttgtaccatgctcgtgctcactctgcgttctggactcccaaggccccaccactgagcctttgtgcatgctactgcctgtgcctggaaaacccctccacccactttttgcctaaaacattacccatctttctcaacycaac

SEQ ID NO: 723335 - DNA, 1231 bp, Homo sapiens
tcatcattttctccacatttatccttgcagcttatttgttcatatatttattcctgttaacttctctagctgaaagagaattttattatctgaatggagttccccatcaccttacgtacaaaatattagtgaaaagctagtgtaaatgtaagattgtattttcatgtcatgccatatttctgcatttattttttgctagcattaaatttttcgtatttaaatgatgctgtatagaatatgagataatctgccaattgctatgatattgcttgcttacaatattcagtttttgttgatagctttaaagtatattgcacacttgtcatctagcacactaataaataactatttttgaaaggatacactgacaaattcttaagttaatggctttaacccaacatttttagtcagttaaagaacagcaatggcaaaaacattgacaatacagttcatggtccagttctcccatcttacggtacaggttccatcagatgtggtatcccaaaaacaggagctgctgtgcgaaagccatatgcgctcttctggaccactgcacatttcacaatacatttataagcttttcccagcttaggcagatgtgttaacgataattccactatgcttgcggtccactggttgatgttgttgtaattataatcttcaccacctaaaaccccgtctgcacattctttgacaatattgtgggcttcctcagcattgaggccaacctcgtcgcagtggcgatggtactcctccatggtagcgcctgttctccctgggggcggagctacgcctgtgcctggtatttcatacatggtcttatttaaccacacaagaatcatacggccgggcgcggtggctcacgcctgtaatctcagcactttgggaggccgaggcaggcggatcacaaggtcaggagatcgagaccatcatggctaacacggtgaaactccgtctttactaaaaatataaawaattacccgggcacagtggagggcgcctgtagtcccagctactcgagaggctgaggcaggaatggcgtgaacccgggaggcggagcttgcagtgagccgagatggcgccactgcactccagcctgggcgacagagcaagactccgtctcaaaaaaaaaaaaaaaaaaaaaaaaagaactatccacaatgacagtgaaacttcgagtgcttaaataacctgcccaagctctcatgagcagtaaacatagaagcagaat

SEQ ID NO: 723336 - DNA, 1231 bp, Homo sapiens
tcatcattttctccacatttatccttgcagcttatttgttcatatatttattcctgttaacttctctagctgaaagagaattttattatctgaatggagttccccatcaccttacgtacaaaatattagtgaaaagctagtgtaaatgtaagattgtattttcatgtcatgccatatttctgcatttattttttgctagcattaaatttttcgtatttaaatgatgctgtatagaatatgagataatctgccaattgctatgatattgcttgcttacaatattcagtttttgttgatagctttaaagtatattgcacacttgtcatctagcacactaataaataactatttttgaaaggatacactgacaaattcttaagttaatggctttaacccaacatttttagtcagttaaagaacagcaatggcaaaaacattgacaatacagttcatggtccagttctcccatcttacggtacaggttccatcagatgtggtatcccaaaaacaggagctgctgtgcgaaagccatatgcgctcttctggaccactgcacatttcacaatacatttataagcttttcccagcttaggcagatgtgttaacgataattccactatgcttgcggtccactggttgatgttgttgtaattataatcttcaccacctaaaaccccgtctgcacattctttgacaatattgtgggcttcctcagcattgaggccaacctcgtcgcagtggcgatggtactcctccatggtagcgcctgttctccctgggggcggagctacgcctgtgcctggtatttcatacatggtcttatttaaccacacaagaatcatacggccgggcgcggtggctcacgcctgtaatctcagcactttgggaggccgaggcaggcggatcacaaggtcaggagatcgagaccatcatggctaacacggtgaaactccgtctttactaaaaatataaataattaccygggcacagtggagggcgcctgtagtcccagctactcgagaggctgaggcaggaatggcgtgaacccgggaggcggagcttgcagtgagccgagatggcgccactgcactccagcctgggcgacagagcaagactccgtctcaaaaaaaaaaaaaaaaaaaaaaaaagaactatccacaatgacagtgaaacttcgagtgcttaaataacctgcccaagctctcatgagcagtaaacatagaagcagaat

SEQ ID NO: 723337 - DNA, 1106 bp, Homo sapiens
tcctgccaagaacttgaatgagactggaagcaaattctcccctaacagcctctggacaagggcccaggctggccaacatctttctttctaccttttgagacccagagcagagaaaccgataggacccacccagacttcccacctacacaactgcgatgacacgggtgctggtggtgactcatcaaggcagcaacagaaaatggacacagccgtgtttcatcagctacatgctatagcttgttactgagtgagtataagcacatctgtcattttatttaaaatgattcagtaatattttgataactgttttaatataattagtttctttttttttttttttggaaacggggtctcattctgttgcccaggctggagtgcagtggctcagtctcagctcactgcagcctcaacctctccaggctcaggcagtcctcccatgtcagcttcctaagtagctggaaccacaggcacgcaccaccacgcccagctaatttttgtattttttgtagaggtggggtttcgtcatgtggcccaggctggtctcaaattcctggactcgagcagtccactcaccttgccctcccaaagtgctggcattacaggcgtgagccaccacacccagcctggtttcctttaaattatctgtattttattttatgcctttaccatcatttttctgagaagcggtctccatcagaatgccamgggtgggagtggaggaggcagcacagaagagatgtttgagaccctgctttagagacgagggcagcagggaaaagccaggaagtcctcctgcagccactcaggacagaaacaggcggccaaccagcggtttcatttcatgttctcagaaaccaggttaatctgttgtgaaatttcttattttgatattcaacaaatacctgtacataaagagaggaacattctttttgtcctggaactggaatttgccatctaggctgggctccttcatctttctcagtatctctagggcagtggttttcaactttatcaccaccgccccaggaaaaaccacatttctcattgcgagccatacacatcagataggtaggtgtgtgtgtgtgtgtgtgtgtgtgtgtgtgtgt

SEQ ID NO: 723338 - DNA, 869 bp, Homo sapiens
agtcacctgctggaggacgccaggaaagacagatcactccccaggagcggtgctggccttggtcctgtgctaataatgtaactgctagggccagtgaaggaaatgggcccatcctgtgacagcaagaacgacagttctgggaagtctcacctgtctcctggctccctgaggtcccatgactgtcttcctgctctccacggagaagggaagcttgcagatggccaatctgtgggaggagagaagtcagagggtggctgggtgcagctgccctccccatgtgtgacagttggtgtgattccaataccaactggggatctggggagggcgcacctgcacaattcccctgtggggatctggccaaaaggtctagggagccaggctccctgcaaatccaggacaagctcatctgggagtgaagtgtgccccaggagctgggtgacgtttgttgcttacatcactgaggggctaaaaggatgaggaacacctgcagatgaggtcttgcatttaaggttagggctcagagttccaggtgttctttgcactggacagaatacacaagagctgtctgcctcttctagcctctgtctccccgggtttgaagtcaggataaccacaggtgcagacaaacttgagaaggccacaggcagatggcattggcagttattcagtactgtacaacaccaaagcctttaacaaattaatagcatggggagtgtgagctgtcaggaataaaagtcctcaracacatggttaatctaaggcaatgagtgatccaatgcaatttggatcctgattgcaacaaagaatatgtgaggagtattaacagccagtgaaatctgaacactaattggatattagattatcaaaca

SEQ ID NO: 723339 - DNA, 637 bp, Homo sapiens
tttgttttggaaaatgagatgtttggagaagaggtctatgtacgtgtgtgtgtgtgtgtgtgtgtgtgtgtgtgtgtgtgtgtattttccctgctccaagcatttcattcacctgattttgataagacagcctcaaaatttcggttaatgaatcatagctcccaccaccctctcagctaaggtaatttggttttaatgggccccaaatagggttgccacataaaatatagaatgcccagttaaatttgaatatcagataaacaatactttttttttttttgacagagtctcgctctgtcacccaggctggagtgcagtggcatgatctaggctcactggaactccacctccctggttcaagcaattcccctgcctcagtctcctgagtagctgggattacaggtgcgcactaccacgcctggataattttttttgtatttttaatagagacggggtactkttatagtacaactatatcccaaatattgcatgggacatattacatcagaaataattcagctgggtgtggtggctcatgcttgtaatctcagcactttgagaggctgaagcaggaggattacttgagctcagaaatttgagaccaacctgggcaacatagtgaaaccctgtctctaca

SEQ ID NO: 723340 - DNA, 637 bp, Homo sapiens
tttgttttggaaaatgagatgtttggagaagaggtctatgtacgtgtgtgtgtgtgtgtgtgtgtgtgtgtgtgtgtgtgtgtattttccctgctccaagcatttcattcacctgattttgataagacagcctcaaaatttcggttaatgaatcatagctcccaccaccctctcagctaaggtaatttggttttaatgggccccaaatagggttgccacataaaatatagaatgcccagttaaatttgaatatcagataaacaatactttttttttttttgacagagtctcgctctgtcacccaggctggagtgcagtggcatgatctaggctcactggaactccacctccctggttcaagcaattcccctgcctcagtctcctgagtagctgggattacaggtgcgcactaccacgcctggataattttttttgtatttttaatagagacggggtacttttatagtacaactatatcccaaatattgcatgggacatattacatcagaaataattcagctgggtgtggtggctcatgcttgtaatctcagcactttgagaggctgaagcaggaggattacttgagctsagaaatttgagaccaacctgggcaacatagtgaaaccctgtctctaca

SEQ ID NO: 723341 - DNA, 637 bp, Homo sapiens
tttgttttggaaaatgagatgtttggagaagaggtctatgtacgtgtgtgtgtgtgtgtgtgtgtgtgtgtgtgtgtgtgtgtattttccctgctccaagcatttcattcacctgattttgataagacagcctcaaaatttcggttaatgaatcatagctcccaccaccctctcagctaaggtaatttggttttaatgggccccaaatagggttgccacataaaatatagaatgcccagttaaatttgaatatcagataaacaatactttttttttttttgacagagtctcgctctgtcacccaggctggagtgcagtggcatgatctaggctcactggaactccacctccctggttcaagcaattcccctgcctcagtctcctgagtagctgggattacaggtgcgcactaccacgcctggataattttttttgtatttttaatagagacggggtacttttatagtacaactatatcccaaatattgcatgggacatattacatcagaaataattcagctgggtgtggtggctcatgcttgtaatctcagcactttgagaggctgaagcaggaggattacttgagctcagaartttgagaccaacctgggcaacatagtgaaaccctgtctctaca

SEQ ID NO: 723342 - DNA, 656 bp, Homo sapiens
tataatttgcaaccaaatctgatctcccgccatatttgccttctccttctttttcctggagacttctttcttctccctttaaaagcaaatatttttacttgaaagtatagtaacccaggtgaggttcaccttcaagactctccatctgaggtcaaactgggcatgtgacatttctcagttgatttaccatccacgttgactacccatctattaggcagattttggagacaacctctttgtcctcctaactgtgcaatggaattaggcttctcccttatcgacaatgaccccatacctaacttcagccttcctggaactccctttttatctraacacttctcctggccctgatgaagaatgcagtccagaaggaaagccagtgaactttaaggtcaggtgctcctgtcccttgggagcaaacctcggtaaagactagatcccaaatgtgggtgctatatacaactagttccaccccttactatgttaccagtgttcccatggtgatgctgagaatgttacaaggacctttcactcagctattgtatcagttcaggctgcttggtctgggcatgccaataaccatatataaatgttttgtttctctttattctaattaatctgcccacttaacttggctggtatggcttctcatccct

SEQ ID NO: 723343 - DNA, 646 bp, Homo sapiens
ttaaggagatttcaaaaaggcacagagtgatgtctaggatttgcatgataaactggaatcttacttggagcacattttaccaacaccccataatgaaggttacacacagaaacagcctcagactctccagaaggaactgtcgaatttgatgagcacacatagagctagactaaatggatggggtgctgaggctgggcttccataccttaagtacctacgaatcatgtgagtgattaaaagatttcttaggtcaggcctaatttctaatcatctctcactcaagccagcatatggccactgtatgagttcaagagtgagcatttttttgaaacgcagttaagacttcagtttcctgcaccgaagaactaagtcactggcaacttgtcatgctagagaaaaaggcaggggacaattccatctcaggtatcatcacttcacgttgcttaccctacctacctaaatccagctagcatgtttgctcagccccacgtcagctagagtagaaattacttatccacttctcctctacacaaacctctctttatgagtacarataaggaaaacaagcctgccaaatgacagtttgtcattgcaggagccatggccagaatccacatttcccatatctaatgagtgtgactccagc

SEQ ID NO: 723344 - DNA, 1467 bp, Homo sapiens
ataaatcactgagcctgttgactcggacttctgatgggctacataagcccaccaaggtatgttttaactctgctgtctttgcctttctaatatttcacattgaagttcttataatgcagaatctccctgaaacttctaatgggtttcattcttttgttgactcttcattcattcaggtaagtaacttcscatttttcatttgtactggtatcagccatttcctaaacattttaatgttgctggttttgaataatagccactccacgcatagcaatctcaacctcccgctccactcaggcaaatgcagccatccatttacagatgtgcataggagctctttgcttatcagggctgccgttttcacaagatcccaagccttatagattccattacactccgcaaaacggcacacttggtctttgtgttgtatgcacttatgtccaagttttatgattattcaagagagtggtcgtggcataagaactctgaattaagcctgagtgatgctggcatgccagaggcaagtgtgagcacagatcttgacagccaaatagcacatcctgttccatatcacataaagttaagtgtgcacaccatatgaatagccacgtacattatcttatactgcagttcagagtagttggtaaacggaaaaaaaaagattctctgttttcctcatttctatgcatgatgacagatcttgacagtatcttggagggttgctaatttagtttcaggcagaaccatgcaattcctattgtctcagcatgactagaccacctcttcagatttcataatgggaaaataacacaatatctgcatttgttcttctggcagccagctagtggtgtgattgcattgttttctcaatcaagaagtaccattatttcagatagactggtacatggaagaagaaaaaaagtaccattgcttttgtcttcattgagttacatcaggatgattttctttggtagtgttatattagagaaagtaggcagggcgcggtggctcacgcctgtaatcccagcactttgggaggccgaggcgggcggatcacaaggtcaggagatcgagaccatcctgactaacacagtgaaaccccatctctactaaaaatacaaaaaattagccaggctcggtggcagcggctgtagtcccagctactccggaggctgaggcaggagaatggcgtgaacctgggaggcggagcttgcagtgagccaagatcgcgccactgcactctagcctgggcgacagagcgagactccgtctccaaaaaaaaaaaaaaaaagagaaagtaatttacagttttattttctctcatttaagcatctaacattattatatgcctaacagagtatatttatctcataaaagttgctgagaattcttttaaattaaatttactccgtagttgcattatattataaaataagagatgtattccagggaagaaagttttaagta

SEQ ID NO: 723345 - DNA, 3263 bp, Homo sapiens
ccccctccacgtccttctccagcctgcagccggagtgagctttgtagaaaaaccaaatgagttcactatcactgtcttcccttaaaatccttgattttcttccctttgcccttaggctaaagtctgtaaactttggtacttcccaggaggccctgtttgtctgtttggcccctggctgcctctgactcagctcctgactccctccctccctccctccctcctgcttttcaccctctgttctagctgtattggatttctttgtctggccctccctcttctggatattgtcgagtcctgtgcctggaacattcttcttgccttctactattagcccctggctggttttcctcacagaatcacttccctggagaagccttgccttactcctacaagccaggccaggtcccctttacatacttccccagcatggtgtgcttatagctctcagcacctttgttataatttacttagagtatttgaaattatttgttagttgccatctcctcttttagattgtaagcaccacgaaagtagacaccatacctattttattcaccaaatctgtaccacagagcacaattcctggcacatagtcagtgttcgttaaatatttggtgattaatttttctgtattaggaatgaaggggtctgcaaaatttgaatatctaatttgctttaagtgatatttaatctttttaaagttgccagatctggctgggcgcagtggctcacgcctgtaatcccagcactttgggaggccaaggtgggcggatcgcccaacgtcaggagttcgccaccagcctgaccaacatggtgaaaccctgtctctaatacaaaaattagccgggcatggtggtgcatgcttgtaatcccagctactcgggaggctgaggaaggagaatcgcttgaacccaggaggtggaggttgcagtgagccgagatcgtgtcattgcactctagagcgaaactccgtctcaaaaaaaaaaaaaaaagttgccagatctatctcatttaaccattttatattagagcaagagttggcaaactaaggcctgttggctgcttttgcatataaaattttcttggaacagggtctcaccattgcccagattggagtgcagtggtgccatcttagcgtacttcagcttcgacctctcaggctcaagtgatcctcccacttcagcctcccaagtagcttggactacaggcacaaacaaaccaccatgcccagctaatttttaaaattatttttgtagagacagggtcctgctatgttacccaggctggtcttaaactactaagctgaagcagtcctctcacctcgcccttccaaagtgctgggattacaggcatgagccatcatgcctggccacataatattttatggattgtctgtggctgcttttacaagagtgattatatagcctgtaatacctagacatttactgtctgactcttgacagaaaacggttgtcaacccctggattagaacattttaaaacattatttcattatttgatttcttcctctgatcttcaagtggggcataatcttgaactttgttgatggctgtactataatggttgctgttttgttactgtatggggatactgatggagcttatgtagaagtttttttttttttctagatttgctttttactcactgtgaagcttttatgtcttacatctgcctgccacccacaaatggatccttaccctttgctctgaatgtgtggtttatgaccctctatgagcaaaggaatgagattactaggcttttcagaattaatgtttaaagagtaagaggttcagagggaagccctgcaggataagtgaagaacagccactatttgtgtgtaagaaagtaagacatccagtttgactatttggaggccttctaggtggatccttgtctgttcagttagccgagatcattggctgaagaaaaggcttgggataaatgcggtgctgctgtatcagcccatatcatgtactgttgcataagtgaatttatacaagtggacagttgctatgatcaagttttcaaactttccatctcattctgagtttaatgctctgatagtgttcaggtagaaagtcaactccaattccttgtggacattcacctttacactttaacaccctgaaccctggctttctgccaaaatattttctttcccagtggctggaaactgattagctagatggkagaacaaaggtggctttgtactggggcatattgcttttgagaatttagcagagagcattcaaatggagtctggatgtgatgccaaattatgcagatttggagtttattttggttaggtttcccatgagtaggtatgtaggcaacgtaatactgttctcagtttatatggtctggaatttcccttataaatgttatataggctttccttattgattgttttaaaacacaaatatgtatgattttgagaaaacacattaccagaagactattcttgataggtttttttgccaaaaagattgttgtaccaatggatttatatccaaagccatattataaatacatttctgtctctgtaagagcccaatgcaaatacttataaatgattacaagtgtccccaaggggaaaaaaatgccaaaaaaataagatacccgtaaccttatatatttatctgaaactaggttttgaagagtgttcacgcagcatcagaaaagaatactaaagctccccatactctgacataattgatacttggcattcattattgtgacttggaagatactagcctcgtaagaaaacctgggctctagttctttctgtgtaacttacgttgtacccttaatttattggttataaagtgaagatgataatagtttagcaatgagggggtttaggattaaacaagagaatatgagttgaagcgctatacaaacgcaagatggtgagattggtgttttctgtggcagcagctgagactaggattttcaactattttgtggaggaggagggaagccatttattttttgttgttgtcttttcttttctttttctttttttctttctttctttttttttttttttttttttttgcctagccactggaaaaccagggagaggcattattgaagttgttgtgttttttttttaattcatgtaaatttcactttttagtttatcctcattgtagttatttttgaaaatactattttaacttttgtttctgctgttagtttcattttctgttttacctctcattctctgatgaaatgttttgt

SEQ ID NO: 723346 - DNA, 597 bp, Homo sapiens
cactctgttacccaggctggagtgcagtggtgcaatcatgggcccaagcgatgctcccacctcagtctcccaaattgccgagacaagtgtgcaccaccacacccagctaagggagtagacttttaaaggtaaggtttaaagaaggtgkttttttatttttgtctttaggagggaaccaatttggagattaagagctgctgaaggcaaagctttgatggcatcagatagaacccccattactgctgaaagcagagcaagtcccctagcccaaggccaaaaggattgggaggcaaataagttgcaccctcatctataaaacaagacctgctaatattgtgaaaagtaaatactattatcaaagcatttggcatagtcactcattaaatagtaactgcatttaggaaaacattctgaaatagaagagctaaactctccgggtgtgatggctcattcctgtaaaggaggccaaggcaggcagatcacttgagatcagcagttggagaccagcctggctaacatggtgaaaccccatctctactaataatacaaaaagctgggcgtggtggcgcaggcctgtaatccccgctaccctggaga

SEQ ID NO: 723347 - DNA, 637 bp, Homo sapiens
gaggctgaggcaggagaattccttgaacccaggaggtagaggttgcagtgagccaagatcgtgctccagtatggggacmgagtgatactctgtctcaaataaatatttaaaaaataaaactgggtagagcgcagccataggtgttttttaaagccccttaggtggttctggcacatactaaaacttaagacccactattctagtggttttgtcaaattccaattttaaaaaaaaatttgaataggatgtgcaagtgcaggtttgttacatgcatatattctgtcggtgagtctgggctttcagtgtgcccatcaccacctttatttttgtttcaaaacttcttgggggctgggcatcgtggctcatgcctgtaatcccagcacttttgggaggctgaggtaggcagatgacttgagcccaggaattcaagaccagcctgggcaacatagggagaccctgcttctacaaaaaaatagaaaaattggccaggcatggtggcaggtgcctgtagtcccagctacttgggaggctgaagtggaggatcacctgggccctggaggtggaggctgcagtgagccgagatcacgcctctgcactccagcctgggtgacagagcaagactgtctcaaaaaaaaga

SEQ ID NO: 723348 - DNA, 597 bp, Homo sapiens
cagacagtggccctggctgggaatcgatttgttttctcaacaacgttataacaaaaggatgttgagtgtaatgatgttatttgaggacttgctgtaattaaccaactggccagtcgactgcatytttatagttactattattccatgtgcaaacaggagatccaaagaaggagagaagggttagaaatccatttttttcttatcaaaatatattattttatccatttcattacagtcttttatccatttcattacagtctttcctgagcaaagtggaagttcaagtcaaaagtcagatgaaagtcgctttaaagttcaaagaggagaagaaatgaacttttcttttgagagcctcttttgtgccaggtgcttgccccttgctatgagaaatgtcaagatctttgcatctattgaagtacagagtaaaaatttttttaaaaacgcaaagatgaatacgatgagagtttgtgacctcatgccacataccaaatcaggacaaggctatcagtaatagcacctgagattctccgggctagaataaacctccatcatcatcttgttctatcccttatctgatactcgagtcagctcttgctt

SEQ ID NO: 723349 - DNA, 597 bp, Homo sapiens
cagacagtggccctggctgggaatcgatttgttttctcaacaacgttataacaaaaggatgttgagtgtaatgatgttatttgaggacttgctgtaattaaccaactggccagtcgactgcatctttatagttactattattccatgtgcaaacaggagatccaaagaaggagagaagggttagaaatccatttttttcttatcaaaatatattattttatccatttcattacagtcttttayccatttcattacagtctttcctgagcaaagtggaagttcaagtcaaaagtcagatgaaagtcgctttaaagttcaaagaggagaagaaatgaacttttcttttgagagcctcttttgtgccaggtgcttgccccttgctatgagaaatgtcaagatctttgcatctattgaagtacagagtaaaaatttttttaaaaacgcaaagatgaatacgatgagagtttgtgacctcatgccacataccaaatcaggacaaggctatcagtaatagcacctgagattctccgggctagaataaacctccatcatcatcttgttctatcccttatctgatactcgagtcagctcttgctt

SEQ ID NO: 723350 - DNA, 583 bp, Homo sapiens
tgtgaaaatattcctgaaatgtaccacttactatcatgtttctaaaaaatgactaaataagagggacagctcagtacatgttgaatgtgagygttccataaataaggaatgtgtggagaggggaccagctgagcttgcctctgactagagaaacgtcactcaggatctatgcccacaggcccagtcttctgatcaatacctgttaaccatgtgaaaaagatactgcacaagagataagaatacccctctgattcattcaattaaagacttcctggaccaaactcaatgccattataattggtgcactgggcagttgctaattgctctaagtcattttcaggcaagtagagagacaaagttatttcatttttggtagtatgcagtctaggtaatttaaaggatccctatgctaaaatgcaaatatatcctggatacatttataaaaaggtcaattttgatggcctggtatggtagctcatgtctgtaatcccaacactttgggaggctgaggcaggaggatcacttaagctcaggagttccagagcagccagggcaacatagcaagacctcgtctgtactaaaa

SEQ ID NO: 723351 - DNA, 976 bp, Homo sapiens
gaggtcaatgacaccagccaggaagctcatgtcaccggctctaaacgccccagtctccttgtgaagataatctggcttcccatttggttatgaccataaagaagctgccactgtcaaagcacacatagttggaatttctggtggttgtatttctcatagaatattaatagatcagcatgattgcttttcatgcattactccctgtgtttggtggatgtggttaatgtgaatttacatttgcgaaataatgaagtagatgttgtcagtgccatgcatatcccctgggtcctccagcagagactttcctcctatttcaaggcatccctattcttcttggcccaatagtcaggcrgaatgttcagggaaggctggatgtgtcagggagttaacactccaggagtgaccctcaaccaatgaagggcacatgttggttgaaaaatattccaacttcctcacccctccatgggaaactgaggcattgtctctccttgaaggttttcaggagatctgcttttgaggaaactcaaactaagagagataaatcctcatgatgagaagtcaaacttctcactcttcaaaatcaaaccagggctatgatgaattcaacagggtgtagaaggccatccaagaagatctctctggaagacaagctggctttgcctaaagaagtacaacatgtcccaaagctcatgcaagtgtaccatctccacttgaataatcacagaaagagaagtggcttttgcttgcattggttctctttaagttcttttttttaattatcattatactttaagttctagggtacatgtgcacaatgtgcaggtttgttacatatgtatacatgtgccatgttgatgtgctgcacccattaactcatcatttatattaggtatatctcctaatgctatccctcccccttcccccgaccccacgacaggccctggtgtgtgatgttccccttcctgtgtccaagtgt

SEQ ID NO: 723352 - DNA, 957 bp, Homo sapiens
tgacttttatttttattttactttattttattttgagacagagtttggctcttgttgcccaggctggagtgcaatggtgtgatctcagctcactgcaacctctgcctcctgggttcaagcgattctcctgcctcagcctcccaagtagctgggattacaggcgtgcaccatcacacccggctaattttatatttttagtagagacggggtttcgccatgttggtcaggctggtgtcgagctcctgacctcagctgatccatctaccttggcctcccagcgtttgacttttaaaaggtcacttgtcattcctgatttagccagaagatggcgatagcattgcctaaactgaatttgttccaagtggatgtcttttctcttttctctcgttataaatggggcatataatatcacattttttttttttttttttttttggagacagactttcactcaatctgtcacatagggtggagtgcagtggcatgatctcagtccactgcaaactccacctcctggcttcaagtgattcttctgcttcagccaaccaggtagctgggattacaagtacccgccaccatgctccgctaatttttgtatttttagtagagacagggtttcaccatattgccaggctggtcttgaactcctgacctcaagtgatccgcctgcctcggcctcccaaagtgccggkattacaggaatgagccactgcacctggcctaatgttacatttaattaggtttgtctcaaagctgcaaatgaagactttttaagaataatttttataaagaattttctcacacaatttgtcatttctctgaaaagagatttagattcaaggcccaaatatgtttgtttgtttacaggaagaataaaatttaaaaagttgaagaggctatttattttatcttttatattacaggttctgtaaaggcacctgccaaaacagaagatct

SEQ ID NO: 723353 - DNA, 957 bp, Homo sapiens
tgacttttatttttattttactttattttattttgagacagagtttggctcttgttgcccaggctggagtgcaatggtgtgatctcagctcactgcaacctctgcctcctgggttcaagcgattctcctgcctcagcctcccaagtagctgggattacaggcgtgcaccatcacacccggctaattttatatttttagtagagacggggtttcgccatgttggtcaggctggtgtcgagctcctgacctcagctgatccatctaccttggcctcccagcgtttgacttttaaaaggtcacttgtcattcctgatttagccagaagatggcgatagcattgcctaaactgaatttgttccaagtggatgtcttttctcttttctctcgttataaatggggcatataatatcacattttttttttttttttttttttggagacagactttcactcaatctgtcacatagggtggagtgcagtggcatgatctcagtccactgcaaactccacctcctggcttcaagtgattcttctgcttcagccaaccaggtagctgggattacaagtacccgccaccatgctccgctaatttttgtatttttagtagagacagggtttcaccatattgccaggctggtcttgaactcctgacctcaagtgatccgcctgcctcggcctcccaaagtgccgggattacaggaatgagccactgcacctggcctaatgttacatttaattaggtttgtctcaaagctgcaaatgaagactttttaagaataatttttataaagaattttctcacacaatttgtcatttctctgaaaagagatttagattcaaggcccaaatatgtttgtttgtttacaggaagaataaaatttaaaaagttgaagaggytatttattttatcttttatattacaggttctgtaaaggcacctgccaaaacagaagatct

SEQ ID NO: 723354 - DNA, 627 bp, Homo sapiens
tgatgaatggttgcccagggcacctgcgagttagaggagcttctggaaacagctcttttaacatgtgaatgccttttcccggagccctttattctgatcaggaaacctgttccctccgcccttatcttcttcgtggcacctgcagatccgcagcggacctcctcctccgtcacttgctttctagacggacagatgcagggcagactcgggaacaagtgccagagggtctcaacccgcgtgggatttgcgcaagtttttgcttccacaggctgtgaacacaaacctaccccaagccccgcaaagcaaccctccaagctaggctctcacctgcggagcgcatcgttagtgcagcacctggtcgctgagttacgcgtagacgcggaggctccacgctgatcagagacaggagtaaggaacaaggaggaagtctgcacatgcgcagacggggctgccaaagaccggttcccggggccctsccggggcgatccatcaacttccagactccgtttcccacaagtctccgcgcccccttccttaaggaacgtctgaagagtttctggcttacttggcaagttgggggatttgtggtccaaagtcatctttacttttatttggagccctagttcc

SEQ ID NO: 723355 - DNA, 1489 bp, Homo sapiens
tgttagaagaattacaaaatactcttctgaatacctgctatgaaattatctatacccatgaagaataggcattttccaatattaaattggtgcattgtggtcatactccataaagatactgaaaagcatcatccgtaaaaattttttttgttttacctgggaaatgtacttcttacaaaagggcggctgcaaaatacagagactttggcaactgttagtccaaactgcaccattttgtaagccccgtgccatttcgcagaccttggtcaaagtgaaacactccacgggggttcgggtcatgagaaatattcctatcataccctgccgggcaagggcccaactgaagagacatccctatcataycctgctgaacaaaggtccaaggaacatcttatcacatcccactggaaaaagggccaaactgcttgaccacaggtacatcttatcaatatcctgccaggcagtaagccagatggcccagacccctcctgcccatacctataagtaccccagcctgtaagtggtggtagactctggctttaagctgatcccccaactctgcaggtttttgcaatatgcctgtgttgctgttgagccccactctctctgtgtgtctttctttaaccctcaccttcccttcaaaaccaaacagcaacaattacttgtttttttcttaaagttaaagaatgagtgggatccaaggaacaaaatggtagaccaggagcaggtccaagttattttcaggaaacagagcaacaaagcacaaaggcaaaatttccaatagaaattcttttaataacttagcttgtctctgggattaccgtctcctcccctttagcagaaaagtgtgacttattactgtaggccaattactccactacagtaaacaccttagaatgtagttttgaatcacatctgtctacctgaaagatcagaagtggaattacgcaaatacccacaaaaacaaacacaaaaaactcaacaacaaaacacctcgaatggtgacaaaggtttttcaaaaagtgcctggactagaaagcctagattgtaaacagtaaatacaattctgtatccaagccccagtttgtgttaatatgtaggataaccagatagttttaactctatggctaaccccatttctttctttatatagacaggcagagctagcactgctatattaacaactaccaatatactgctttgtcctttaaaatctatctgccacagaaggcttaaaccactaaaccaagtttctctactaaggctaagaatactgcatctatgcagggatgagaggcttatcacatactcacactcacacacaccaagctcttgggagtcaacttgcaactctgcattgattttatgcccctctatcttttatttacattctttctcaattttcctatcattcaaaacatggtagggccgggcacggtggctcacgcttgtaatcccagcactttgggaggtcaaggtgggaggatca

SEQ ID NO: 723356 - DNA, 1081 bp, Homo sapiens
tgtctataaatttgttctgatcatgaggcatccctgaagtctctctgaatctactgcagttctggaggctccccgacttgtgaattgttttttcttcttgctcaattaaactccattaagtttaatttgaagtgttcttttaacattctttaaccagccaaactgcaagtgaatgtgaggacatcataaagacattttaagacacacaaacagattcaaaaagtttataattcactgtccacatagagtaacctttctcaacagggtaccactggcatttggggtggaacaattctttattgtgtaagactgatccacacattgcaggttacttagtgtccttgaccatcatccattaaatgccagtagcatttctcctccccgtgacaatacacagcagccccacatttggagggggtgctgtatcacctctggttgagaaaccatggtgtagaaaatatattcaaagagaaaataaatctaggaaaaaaaaagggatataagaagcacaggtgagcaagaaaatcagtaaagtttacttttaagtctaaataaattataacaataaacctataataataaactaaaatctgagataactcaggatggagagttatgaagtctggaaaggaggtaagagagagaagtaaaagcatgctaggagcttcattttatttatacaattagctctggatgtcaattaataatatgtgcaactatgtatacaaaaatacaaagatacagaaactaaacatatacttttcaagtcattagaagaaaagttagttgggaacaagtaaaatgctagcagctaaccaaagatcagggatgaaaaagaaacacaaaaacagcatataaaatagaaagcacaaggtaaattggtagaaaatgtgcaaatatatcagtaaccataaraaatatgactatatcaaattcgctgctaaaagacagtgactttcgaattgggtttaaaaagagtcaaaccgtgtgtttttgtataagagacagtaaaacacagtaatatagaaaggttgaaaataaagagttggaaaaggtaactgggaaaatgccaggaaaagga

SEQ ID NO: 723357 - DNA, 628 bp, Homo sapiens
cagctgactgttgctgcatgagtgaccccagcaaaataactgccaagctgacacaccaaattgtgacaaataataaattattgttgctttaagctaccaggttttgggkttttttttttcttttttttttttttttacatagctctagatgactgatagagaaatccagttggctgggccattcctctgctgattttgtctgggcttactcacgcatctgagcctaaaccggaggagcagctgactggaaggtccaagatggctcatttacatgtctggcagttggtcttggctgtcggcggggacacattggttctttcatcctccagtaggctggcttccttacatagcagtctcaggactgtgttccaggacagtaaacgtgaaagctgcaaggtctcttaaggcctaatgtcagaatttgcataacatcacttctgccacattctattggccaaagtagtcccaggcgaacccaggttcaaggggtagggaaacagactccacctcttgcccagaacagtggcaaagtcacattagtaagcagccgtgtgcagggcggggaggaattgataacatattttcctatctactatgttccactccactgtcttcctcctgatgttgg

SEQ ID NO: 723358 - DNA, 1267 bp, Homo sapiens
cagtgaggtgcctgcacgagcacatgctgtgtgcctggctcggacactgatgcagacggcaggaccatcacgaggccctggcttccccaagccgccatgtgagttggggaggaggcccggccttgcaggcgaggggccattggtgctcagagcctcctctcaacgctctagacccagcaacctgggacaggtcttgagaagacctggcgtcatagagggtgacagtgatggagttgtcgtcaacgacctatggaagggtcctgcggtgttctagacaagtgcttgagccacagcagtgtccagccatgacccccagcgaccccagggggctctgctggtcttctgtggctgactgagaggtttgaagactgtgggcatctggggcaggctcaggtctcctgctgctcactgggacaggtcagcccggtgcccgcagagacagggacacagagaaagcgagcatgtcggcccatggctgagcatgaccagcacggagctgcccgcaccctccttctcctcctcgaggccggtgcagcgttctgcaggttgccctgcagttcccacagaggaagtggcaggaagtccagagtgaatcattctaggaataatgatcctgggcccttatctttcttaagaaatacaatttccagaaggaggctgacagactgtgggggcaggtattcctgtgctggaaagtgccctgagcgagtcaggccgggctctctgagcgctattaatagcatggcgtggccctgggcaagtcacttcccctggcgggtaggggcgggaagggaggggcctcgaggcttcagtggaagagcacagggcgtggagcctggaactggagctgtgtcttggctccatcaccatcgacgtggggtcaggcagatgactaaactaacgtgagcctctgcatgcccaacttcgaaaagggtaatttctgcccccacccaactgaytgtaagaacgaatgagacagggatgtgggacctaggactgactccgcctcctcccctcctgcatgactgcagggaaaacatgagactctcaacgaggtacccaggctaggaaagctcccacggggccctctgctgacccgagggccataaaacagagaagtggttttcctgtctcactgaaatggccaatctctaccgcgtgcaggaatcggaaatgccgtggcttaaagaaggaaatggaagattttgaaaatgtaattggaaatgctgggtcagaataaagatattttagcggcatagagaaagca

SEQ ID NO: 723359 - DNA, 2129 bp, Homo sapiens
atgctttgagttctgaaataaaagagaaattaaagcacataagaaacgtaaagccagcatgaaattcggaggaacgccaatctggtgacacttgtctattaaaatacgggaattaaggaaacatgcattgacagagcagggagccctccatttggcgaatcacacgatgctttcccagtcttcatgaagccagactgcctccaccgcagggaacagtgtgacgcataaaccagcaccacgccggcctctgctggctgtgcagcctggctctacatggtgaccaggaacacggccgccaaccgcacccaggttcgcgtttgtgtgaatgctgttaattcatcactgcacacaaggttccagcagagcccgaggaccagaggccrgcacacacctggtcacgtcattgtcacaagttaggcagtgccccaccccaccaccaccgtgtcctttatgccaggtcctatgaaggtgaatgccagctcaggggtgtgtgtggagccggtgcgcccgcggtccaccgtggtggctgctggtgcagtagcatctgtgttggcttctgtggccatgcagggctgcctgtccttccccttctcggaatgtccctctggggtctacgctccctctgtcccagtttaaatgctccctcgacccaccttgggttataaaagtaacacaggcttactgaagaaaattagaaaagtacagagttcattcttaacatcgataagccactgcatgtggaaattcaaaagcaatccaggtccgagtctacagggtttagtccttcctctgatttgacagtaaacaggaagaggcagagaagactctgtgcgtgttgtttgctgacggagtgtgtaacaggagagaagcttccatgtttcacagaaataaaagcagcagcagctggtggcatcctaggtcccgaaaggtggaagctggtggccccctgcctcccgcctgcagaacccctgtggggctcacaggccggcgccagctgggacgtgagtctgagccttaggtcagccaggctcctctctgaaaaatccccacacgtgactcgggatgctcccagaggctgagaacaacaggtcagtgaagcgaggggagcagctctctcagagccaggcactccaccgtgtctcagaatgctcgtggggcacacatgggctgctgttctgcagagaagctgcagatcctttgatcagcacgccctctcagaagcagagaatgactgtttcaggtccaaaagggaccttggagacacggggaccaagtcgcagagaaggaaataacttgttcaaaagaacctactggggtgtgtgtactgatgacgatcccattctctcagtaatttaaaaacacgtccatgcatgagtcacacacggacgggtgtccagaagccagaaccctactgaaaggagccaccagcctgcccacagtggctgcctccaggctgggattatggagatttgtactatttgggtctttacttcattctttgtagttcctaagatccctacagtgaatatagaaatgcataattttaagaaggcagctagaattttagaaagacagaaaagctaaaaaggtgttcagcattcggggaaaaggcaagggggaagggtgcagagtcctgagtcctgcccgagagctccttcacccggagacagcactcattagcacgagttctctctatcctgagagcaaaaccacttccaattctccccagacagaccgcagtgtttgctggaatttcaggcgacaagtgagactggatggctgatgctgtctacggagagggaagcccggcagagccacgagggctaactcacatttcagctccctgggacgcttgcaagagcccagccaggcaaggggagagatcagaagacacctgtgcggatgtcgtggcttcgtacctttcttgtgaagtagtaataaggcacttccatccccaggagactgtgggaggtggcaggccgggggaagctctcatgaagcaggaagccgtgctcttcggaaatgaagaaggacaggatcaaaacatctgcctgggagagaaagaaaagtactgttctgtttttttttttaacttacataaatttctggggtatgagtgccattttgct

SEQ ID NO: 723360 - DNA, 1282 bp, Homo sapiens
gcacgcacgtgtgcacacacacgcatgcacgcacgtgtgcacacacacggatgcacacacatggacgcacatgcacacacagatgcacacacacattcacatgcatgcacacacacatggatgcacacacaagcacatgcactcacatacacacacatgcaggcacacacacaggcacacacaagcacatgcacgcacatgcacacacacgcacacacatgcacgcacgtactcccacaagcacaggcagcacaccctgcaagtggcctcggagcatccccacccagggccaccctcgcattccaggctgctccctgcagataagcctcagtccagcccacagtcttagcagggcagcagccctgcagcctccccgctggcacggtcacaggccgctctgaggactggagggaccagccgcccacagagccccgagcccgtggtcccggtgagtgagcggagctgtgctgcgtgcagctgggcgttttcctaacggccctgcccctgtgagaaggaggggctcgggaggacagccagggagcccagtcccacggtggtacctccatctccgggaggtgtgggctgcccacatctcagcttccctggctcccacagaatcacagggcaatggctccgagatggtagccccgggcaggctcggygcacttgtgtctgagtctaggggctggacgcaggttcctgggatgggccctgcggtggtgtctgtggctgcaacgcggcatacccaggtgcccgctcccgaaagccagcaggtactttgtgcctggttttacatgtactcgggtgaattccacggacgcattccaccacccagggacgcagggcgggcaggtgcatgtgtcttagcagcaaccaacctggcagcccctgccatgtggcacagtcatgcctggagccaggagagggtgtgtccaaacccacgggccaggccctcgtgggggtgccaagcgtctggggggccgggaagtgagcctgcctccctgccactgccattgcatgcgtgtcctctgatggcctcacatggggctcctcacagcacctgggtgcacccactggcagcttcctggacgctcagtcggcgctgcggtgaaggtgacaccgggtgcatgggaccccagggaggtgccccaggcgcagcgtcctgatctccgattcgcgctcctcagtcttttgggttcggaactcttgccaccaactcagcacagggagaggcctgagcacccggcccaccagcccctcaggctgtgctgccctcggtcct

SEQ ID NO: 723361 - DNA, 641 bp, Homo sapiens
aaaaaaacaaaaacaaaaacaaaaaaaaaactttctgtgagggtgatttcaaggagcaggtgttcacgtgcaatttcatgccaagcaccaagacctcaattcccaaggctcaagactgagtgggaaggacccgcctcagagtggcctcacccagccagccctgccttccaaggctgtccccacacatccctgcaggccgtggggctgccctcctgcacgggcccttccctcccaagtccccacccccaaccccgaatggcaagcagggaccccactgccccttcctagaattaggaagccatcatgaggaggctgagctcaggccaccagcccctgaagccacagcgtgtctcaaactcccgcagccactgcacagaagttgggttgggggtgaggggtgaccagaggatctgggatctgagagcccacgtgccacctggggcagaccagaggaccgcagcggctgcaggagctctgggatacaccctgtgggccggcgccgcctccccagcccagcccagtgttgtggccaacaccgcacagagacctcagcagcgtggggcacaccgcacagggactgccggcctacactgcacagagacctcagcagcgtgsagcacaccacacagggactgccggcc

SEQ ID NO: 723362 - DNA, 906 bp, Homo sapiens
tcatcacccctctaagttcaggccccagactactctgattcaaataaatcaggtggcaagtcgggaatgacagcaactcgcatcagggcctggcggtgtctatgaaatgctccaggtgaccttctccagaaggcactttggtttccgccggggagcagcgtggcctcctgagccggttccccgccgcgtgccggggaatgcaccacccgggaggagaaccccgcggctccggcacgagggtgtgccccgacactgtcttccactcaagagctctgcgactctcctgccacctgccaaccccgaccacctcctccgggctgcaactccaccccgcacccgggctgctgctccggctcctcgggtctgtgcccgccgcccgagtgacctcccgccggggcccgggcggctcgccctggccggaggggccggaaaaggccgagaggcctgacctcccgtggggcttcccttccttcctcctgggcagcgcagcctggagccagcagctctgcaccggccgggcctgctggggcgaaaagccccttacctatcttcacgaccgcatccgccagacaccggtcccacttcctgccgagctccgactcagacatgttccccacccgcgcctccagctttcctctcggccggcccccgcgctccgacccytgaaagtctcgcgagagctggaaacaagtcccaggtcaggaaggcaggcgcagacgctccagatatcgcgagatgatccgctgcttccatcccttccggttttttcagttggtcgtcaaggtgacgagttgtctggaggctcgaggtgaccctgaccttggggctgcgcctatgggtttgcgaggctgacagtttcctaggcgtcaccccaagccgtgaccaggcctttcctcctcaccaaag

SEQ ID NO: 723363 - DNA, 1288 bp, Homo sapiens
ctctgacctttcgggtctctactaggccttcattgttctttrttttttcgatcttttgttaactcgttttcttagacacgtatttatttatttatttatgcaaagccccatcattcttcccccaaaagatttgcaggcatttcaggaaatacagccactaaagcaacaacttatgggcaaatataaaacattaggacccagagaaaaacaaataggaacaggagctctaagtccattgggaagatccaatgcaagggaggcaggcctggagcagaaggcacctgcagccaggcctggatctgaattccagctctgccacttaccagctgagcaaacagaccccatgtacttagtctctacacctcagtcctctcgcctgagaaatgggtctagtaatactttcttcataggacaattgaaagaattaagtggagccaggtgtggtggctcacacatgtaatcccggcactttggaaggccgaggcgggaggactccttgaggtcagaagtttgagaccaccatggccagcatagcaagatccctatctctattaaataaataaataaaatgtaaaaatttaatcagggccagacctggtagttcatacctgtaatcccagtgccttgggaggccaaggcaggaggattgatcgcttgagcctaggagtttaagaccagcctggacaacaaaacaagacgccatctctacaaaaaaaaaaaaaaaaaaaattattttcctttttgagaaggaatctctctctgtcgtccaggctggagtgcagtggtgtgatcttggctcactgcatctccacctcctgggttcaaacgattctactgcctcagcctcccaagtagctgggactacaggtgcctgccaccaaacctggctaatttttgtagttttagtagggacggggttttgccatgttagccaggctggtcttgaactcctgacttaagtgatccatctgcctcggcctcccaaaatgctgggattacaggtgtgagccactgcacccagccaaaattttttttttaattagccagacatggtggtatacatctgtagccccagctgcttgggagactgagtccagaggatcatttgagcccaggagctcaaggttgcagcaggctatgatcgcaccactgtactctagcctgggtgacagagggagaccctgtctctaaatcaatcaatcaataaataaagcacttagcagaatggctcacaagtaataggcattcagtagccactgttttgttactgttatggttattatgttta

SEQ ID NO: 723364 - DNA, 1057 bp, Homo sapiens
gggcctaggctgagctttctgagtgctgccttggagacagggcagggtgctagaacaggaggccgccagcgtgcaggagcctatacccaaacagggtgacagaccctccagccagaggagggggcccgtgaaggctggcggctgcagggctagaaaggaagcaaccctttggggtttgagaaggaggacctgcggggtttcagccaaagctgtgactcagactttggggcaggagggaagattaaacccaaaactgagccctctaagaytggcctgagtagaagccccatccatccagcctctggatgaagcaaacgtgttttcagagcaacagtgtttaaggctcttgatttggaagcacacaggcctgggttctgaggcccaccttcgtttctccatcagtaaaagagggatactggtagcaactgccctcagagttgtgatgatgcttgaaggatttacagagctgaacgtgtgtgtgtttgcatgtatgtacatgctcgtgcacatgattgtccatgtgtacatgtgtgtatgtgtgtgcatggtacatacatgctttgtgaatgacaggtgatgtcaccatttttttcattcatcattgtcaatcacttgggatattcattcagcaaattcagtgagcaccaaacgtaggccaggcagcatggtgggaggctgaggcaggacaatcacttgaacctgggaggcggaggttgcagtgagctaagatcgcaccactgtactccaggtggcagttgttcagcctggggcttgcacatcagcattggctggagggcctgggagagagtggcagcgagcaagactccatctcaatatatatatatatatatatatatatatgtatatgaaaaagataaggaatggacaaagactttgatgcaagacagtcctaggttaaaatcttgcctctgccatttaccttttgaatgggtttagacaaacaacttccctgaattcagtgtccccacctataaaataggaataatagtccctcctgtacagaggttctgggaagattaaatgacattatgaagca

SEQ ID NO: 723365 - DNA, 1057 bp, Homo sapiens
gggcctaggctgagctttctgagtgctgccttggagacagggcagggtgctagaacaggaggccgccagcgtgcaggagcctatacccaaacagggtgacagaccctccagccagaggagggggcccgtgaaggctggcggctgcagggctagaaaggaagcaaccctttggggtttgagaaggaggacctgcggggtttcagccaaagctgtgactcagactttggggcaggagggaagattaaacccaaaactgagccctctaagattggcctgagtagaagccccatccatccagcctctggatgaagcaaacgtgttttcagagcaacagtgtttaaggctcttgatttggaagcacacaggccygggttctgaggcccaccttcgtttctccatcagtaaaagagggatactggtagcaactgccctcagagttgtgatgatgcttgaaggatttacagagctgaacgtgtgtgtgtttgcatgtatgtacatgctcgtgcacatgattgtccatgtgtacatgtgtgtatgtgtgtgcatggtacatacatgctttgtgaatgacaggtgatgtcaccatttttttcattcatcattgtcaatcacttgggatattcattcagcaaattcagtgagcaccaaacgtaggccaggcagcatggtgggaggctgaggcaggacaatcacttgaacctgggaggcggaggttgcagtgagctaagatcgcaccactgtactccaggtggcagttgttcagcctggggcttgcacatcagcattggctggagggcctgggagagagtggcagcgagcaagactccatctcaatatatatatatatatatatatatatatgtatatgaaaaagataaggaatggacaaagactttgatgcaagacagtcctaggttaaaatcttgcctctgccatttaccttttgaatgggtttagacaaacaacttccctgaattcagtgtccccacctataaaataggaataatagtccctcctgtacagaggttctgggaagattaaatgacattatgaagca

SEQ ID NO: 723366 - DNA, 1057 bp, Homo sapiens
gggcctaggctgagctttctgagtgctgccttggagacagggcagggtgctagaacaggaggccgccagcgtgcaggagcctatacccaaacagggtgacagaccctccagccagaggagggggcccgtgaaggctggcggctgcagggctagaaaggaagcaaccctttggggtttgagaaggaggacctgcggggtttcagccaaagctgtgactcagactttggggcaggagggaagattaaacccaaaactgagccctctaagattggcctgagtagaagccccatccatccagcctctggatgaagcaaacgtgttttcagagcaacagtgtttaaggctcttgatttggaagcacacaggcctgggttctgaggcccaccttcgtttctccatcagtaaaagagggatactggtagcaactgccctcagagttgtgatgatgcttgaaggatttacagagctgaacgtgtgtgtgtttgcwtgtatgtacatgctcgtgcacatgattgtccatgtgtacatgtgtgtatgtgtgtgcatggtacatacatgctttgtgaatgacaggtgatgtcaccatttttttcattcatcattgtcaatcacttgggatattcattcagcaaattcagtgagcaccaaacgtaggccaggcagcatggtgggaggctgaggcaggacaatcacttgaacctgggaggcggaggttgcagtgagctaagatcgcaccactgtactccaggtggcagttgttcagcctggggcttgcacatcagcattggctggagggcctgggagagagtggcagcgagcaagactccatctcaatatatatatatatatatatatatatatgtatatgaaaaagataaggaatggacaaagactttgatgcaagacagtcctaggttaaaatcttgcctctgccatttaccttttgaatgggtttagacaaacaacttccctgaattcagtgtccccacctataaaataggaataatagtccctcctgtacagaggttctgggaagattaaatgacattatgaagca

SEQ ID NO: 723367 - DNA, 594 bp, Homo sapiens
tcctcaactgccccaaatctcttaatagcttctagtgctgctacaatctaagtcaggtcaccagagggaagagaacatggcattaaaagaatcacatcttcagaagagaagacactaatattattacccatatacatgatttcagaagatgacataagattcctcttaaagaggaaatgtcaggaatcaagccactgaatccttaaagagaaaagttgaatatgagtcattgtgtctgaaaactgcaaagtgaacttaactgagatccagcaaacaggttctgtttaagaaaaataatttatactaaatttagtaaaatggacttcttattcaaagcatcaataattaaaagaattattttaatgaaatgtgttggattcgttttcttaaacatagacattaatatttattacactttgttttattgtctactgtygaaatagcatgttcctaaatcagtcactggctgtttcaaaacttgaagtgaataataccactctttctaattggcaaaaagctcattgtgtcctaaaattctgggcatggccagatctagcctttgtcacaggttctgcctcagggatttggttgcca

SEQ ID NO: 723368 - DNA, 1221 bp, Homo sapiens
acagtaacatgaattcagaaaatttctagctaagattagaggtacattctgcagtcrtgcaataagtcaaatacaaccagttcctactggcattaacttttgataatgattcaataccaatttcccctaacctatgtatgtgataacataaatctaaaccatggttactgttgacgtcatggctgacatgtcattgagaagtcatccggaggcagcttatttaaaatattgactaatatgtgctttactttgctaatagccttagcaaattggttttcctttacagtatattagtacccagaaggttgctaggttagcattaactgcgtactgtcaaccttactagtttccaaatgttaaccataaaatatgttttattttataacatatataggcatatacaatatattaataagtatatataatagaatatattaatatttataatagaataatatgatatatattatacaattatatgaaagaaatagaaaaccactggtaagactgactccagaagttaaaagcacagaagtagcagcatgaaagcaaattcccagacttaatggaaaagctttttctaacagctttgttatctcttaaaagttagtggcttctgataaatatctccctattttttagttatcacgtttaacaattagtctctattattttgaatggtaattacaaagaaacaagaaatgacaggtctttgctataaaatctgttattactacaaaattgatctaggtgaagttgtcctgtccctctttgtccccatttccgtccctcaggccacttttttgcaaaccccaaatttacatcctcacttctgtccaaactgatgaaacatttaaaaaatctacagaaacttaaaatgggagcaaacaagctagtaatgtactactgcccccttggcacttgtaagaccttttctctcttgctaaagtaattttccagtaagaaatggggaagcctttctcaaggttatgtcagtgcaaatggttgtagaagagcccagagactccattttattctttgtaatagtcagagaagagtgattgcttccttgactttgtggccttgaccattccttaagtggctgagtaaaaaacaacaacatgtctcagaggagagctttctaatggttttcctgtggtccattgcccctggggtgcttccatcacagcgagtcaccgtggtgatgccacagtttgagcc

SEQ ID NO: 723369 - DNA, 1471 bp, Homo sapiens
acttacttttcatgttataaaaataatgctttccggccgggtaaggtggctcacatctgtaaccccagcactttgggaggctgaggtgggtagatcacctgaggtcaggagttcaagaccagcctgaccaacatagcgaaaccctgtctctcttaaaaatacaaaaattagccgggcgtggtggcgaatgcctgtaatcccagctactcatgaggctgaggcaggagaaatcgcttgaacccggggagtgraggttgcagtgagccgagatcgctccatttcactgtagcctgggcgtaaaagcgacactctgtctcaaaagaaaaaaaaaaatgctttccattgcagaaaatttagaaaatacagaacaatagtaaggcaaaataaaagacatcttttagacaaggaagaaccatgttgactttcctcctttcttgtgctggattagctccgcccacctaagcccaagactctgcctcctctggtaattataagtagcattaaaactgcctccgggaccaagttattacttccaagaataatagtctatgttactacaagaaactaattaacagcatgcaatgagggggaaaaattcaattaattagtggcttaataagtgctcacaatgactctgggcttggcttgggcgttgggatgggagggatggagacccccagagggctaggcatggggggctgcagaggtggggcagagcacagggcttgggaatgggcggggtcctgtaggaacctgagaagcccagagagcctagtcaaagaggaaagaaacctgtttgtttctgtttctgtctgttttttgcagacctcgtcctgagctgaagctctcagccttactggtaacactgggtggggaggggtccttggtctggtgttgtcccaacatggtggtttggcaggtgcagggaagtgaggaaagacttgcttttttctgtcctgcaggctggaggtgggaaggggaggtgagcacacgggtgccctcttctctgtcacagcccccgcccaccccaccccttgggctcttcccaactctcagccagagtcttggagtcagctctgacattgctcctccccaagcccacctcccacctggcagaaactcttggggctgctccctgctaagcggttcccctgcttcccttcctcaccctcacccccatcccaccatctcctccaccacatcctgaaggggagactcctgcagtgatctgcctggcgcccaccccttctcctccagcccgtccaccacccgacagccactggggactgacgccagcaccactggggaataggacgaggtcaggcccctactttgagccacgaagccccagctggactggcaccagctcctcttccaggctctctgtggccccaacaccacatctgctttgagttatttgaatgagactaatgcggagttgccaaacaccgatggctctcagggcttgggg

SEQ ID NO: 723370 - DNA, 1471 bp, Homo sapiens
acttacttttcatgttataaaaataatgctttccggccgggtaaggtggctcacatctgtaaccccagcactttgggaggctgaggtgggtagatcacctgaggtcaggagttcaagaccagcctgaccaacatagcgaaaccctgtctctcttaaaaatacaaaaattagccgggcgtggtggcgaatgcctgtaatcccagctactcatgaggctgaggcaggagaaatcgcttgaacccggggagtggaggttgcagtgagccgagatcgctccatttcactgtagcctgggcgtwaaagcgacactctgtctcaaaagaaaaaaaaaaatgctttccattgcagaaaatttagaaaatacagaacaatagtaaggcaaaataaaagacatcttttagacaaggaagaaccatgttgactttcctcctttcttgtgctggattagctccgcccacctaagcccaagactctgcctcctctggtaattataagtagcattaaaactgcctccgggaccaagttattacttccaagaataatagtctatgttactacaagaaactaattaacagcatgcaatgagggggaaaaattcaattaattagtggcttaataagtgctcacaatgactctgggcttggcttgggcgttgggatgggagggatggagacccccagagggctaggcatggggggctgcagaggtggggcagagcacagggcttgggaatgggcggggtcctgtaggaacctgagaagcccagagagcctagtcaaagaggaaagaaacctgtttgtttctgtttctgtctgttttttgcagacctcgtcctgagctgaagctctcagccttactggtaacactgggtggggaggggtccttggtctggtgttgtcccaacatggtggtttggcaggtgcagggaagtgaggaaagacttgcttttttctgtcctgcaggctggaggtgggaaggggaggtgagcacacgggtgccctcttctctgtcacagcccccgcccaccccaccccttgggctcttcccaactctcagccagagtcttggagtcagctctgacattgctcctccccaagcccacctcccacctggcagaaactcttggggctgctccctgctaagcggttcccctgcttcccttcctcaccctcacccccatcccaccatctcctccaccacatcctgaaggggagactcctgcagtgatctgcctggcgcccaccccttctcctccagcccgtccaccacccgacagccactggggactgacgccagcaccactggggaataggacgaggtcaggcccctactttgagccacgaagccccagctggactggcaccagctcctcttccaggctctctgtggccccaacaccacatctgctttgagttatttgaatgagactaatgcggagttgccaaacaccgatggctctcagggcttgggg

SEQ ID NO: 723371 - DNA, 609 bp, Homo sapiens
cctctggtgactcctcaagtgacaaggcttgttttacatttacacaataaattgaggagaatagaagtttcattgcatagtgtcatgaaggaaaggagagatgattgtttaggaactgggccatctaggttagtgtaggttgaataccctggttttctagtccacccagcagcaggagtctgttgatttcccctctcgtgcttccctgtggtgctgcctttgataccgtctgtcattccccctcctgccaccttctttctctttaacagattctgcctgctcagcttttgccttgctgttttctccctccaagtattttgttttcttttccccatttttaagtgctgacctctttgaatgtattccagattgcccatgagagccactggtggatgcttattcaccatcrcttatgatggagactttcatggtcattccacagcagcggctcctggggcctgtgtctagcctcggccagtctctgtgaccagtgtcaccatcatgtagtcagtgcccttcgcagcataacagtttcttctccagtgtaatagctgttgcactttgtaggtttacaaagctctattctcatatcctgtgcattgtctgatc

SEQ ID NO: 723372 - DNA, 386 bp, Homo sapiens
ttggattatgcaagagaaacattgtaatttggatgagtcttggtttattttcactaaatagaataataagatttacttcatcagactgcaaacaaatcccttgagtgcagaaaccacgtgtgtatcttctaccttaattcttagcacrttgcctggcatagagtaggttaaattcagttagccacaactctcagtacctctttgttagactgagctgggggactgcagaagacttggttctcagtctctggggctgaagaagaaattggggtacaccgctcggggagctgtggcatgtgctgaggaagtgatgttagttttcagaacataaaattctgcctatgctgttacatttttatatgaacctttaatgtcttttatctgga

SEQ ID NO: 723373 - DNA, 625 bp, Homo sapiens
ggaagacatgtgattttatttgggggtccacttggctgatccaagatcatcttccaatctcaagatttttaatttaatcacactgacaaaggtagcatttgccaattccagggattgggaagcattaatagtgtctyttgcagggaggcatttttcagcataccataggcttcaaatgactcattaattgtataacaataacaccgtaaccactggaactatcttactttgaattcccttccagctatgagatcgaagatgctatgaatcatatatcaattgcaaagtattccacatttcaacacggcctaaaagaaagctaatgtgatagccttggctgtaacctgtagccataaagatattcctggcttaatggacaatttgtagatgttcgtccctgagaccagtttttcactttgggtccttatctttgcctcaatgttgtcccattcattgtatccaaagcctggccattattctcctgtatagatgtgtgtcattgacagatacaactggctatctaccaataatttggactcccttctccatagcaaacagtctttgctgggaagcagctacccaaccagggggctatatttcccagcacctttaaatctgggtgtgg

SEQ ID NO: 723374 - DNA, 644 bp, Homo sapiens
gccaatgactttattggcaattaatgaatatttactaaacacacgtttcgttacaggtgctgagaatacaacaatgaacaacacagattaagcctctatttttatggagtgccctacagttaaatgacagatgtcacttttgctctcaactaatttactagcactacttaaatggctcaattcaactataagggagaaaagaaatgaaatcctgccatgtacctggagattggagtacaagaaatacttggtaaacagcacaratgaccatcaccacagtgcactcttctcaccacaaaacatttggcccattctctctctcacaggcaaggtactctcccatgggatacaaagcaaacattctacttagacatgtcaggaagctgaaattctagaggctctgaatgatgccaggcagtctctatatcagacggcatttatatcaagtttggatgtgacttatcttcatgcaaagctctatgaaataaaaaagtaacttttatgccctgtatggatatcccagggctgacataacaaataatcacagatttggaggtttgaaacaacagaaatttattttctcatggttctgacaatgagggatcatcaaggctgtgcttcctccagagcctctaggggaaaac

SEQ ID NO: 723375 - DNA, 2941 bp, Homo sapiens
ggaggttaaggggagaaaagtcctcaatattccagaatactcactggcaaggtggccacagatgaagagacagagggtcttaagtgactagcatacacttctttgtcttacaacagacagtgcagccaacaagctcaaatggccatagtgacgaggccttaaaacgaaagccatgtcccctcttccatgtgcttcttcttctctctgttccctgaaggtcacaagccattcctgtcttgtacatcttctattctgcgtggcactatgagtaaactgagtcaggatcccttgtagggcccagccatgtgttaaatgcaagctcccacaaacatgtcaagtgtgccagtcctgattcttgggtttagtggtaaagggtaagtggagttctcacttagacctggagcctgcaatcctggtttcatcagagaagccagcattgggagtttcagaatacttctgccattattaggaatgataattttgatttttatcctggcattgttctttgagtatcacttcctccagaatccttttggaagatggggtgtttgcagtaagggctcagatgttcctgggttcccagtcataatgccttcaaaacagtatcaaaacctctcttaggagatactcatttctttgattggctcgatgaaatattttactaattttaattgacatcttgcatcataaaaaggagtgcttcttgagaaactatgaatgctaaaccaagccccatgctgcaccttcaccagggcctgtgccaagtacttaatagactgcaaagggaaagaggcccaaatatcaacttggactgtgaccaatcagatcagcatttcctcctaggaaggcaaaaaaaaaaaaaaaaaaaaaaaaaaagcaaaggcaattatgttctggaatgagcaaaaaacattttccatttccctccgtacttctttcagttaccttggtcagattgaacttgggtgtggggtgtgacggtccctatctcattctgatatcactctgttgggtcaagatgtgatcgaaatctgtggtctgacttaggtgggctgccatggggaccttaacctgtctgggatcttagtctgacatttctttcctgaagtgtcattttctctgtagcttgtgtttatgcttagtgaagagtttccctgtactgatccaagaagcaccagtcctaagagcttcttcgacaagaagaagaaagagtctggcatcccacacgtttgaaaactcagaatactataatcctccctcagacagtcatataagaataaaaagcctccttaaccttgcttaatgtgagttccccaaacttatttataggaagagtcacgttctgtaaaatactggaatggtagaagacatattggactttgaaataaaaggcctgtgtctggtctctactctgtgattttctgactgtttgcaccagataagttattagggagcctcagtttccttatatacaaaatgggtatacaaaacactggccctacctgcataccatggttgtgagaaacaaaaatgtctatgaaaccatttataaaaacaataataagctattcaaaaatattcttaagtatatgtacctctataacagaagttggcctaactatggcccacagactaaatttggttcattgcctgattttataaataaaggtttattggaacacggccatgctcatttgtttactcatcatctatggctgatgatgagcaacaatggcagaatagagtagctgagacagagaccatatggctcacaaagcccaaaatatttactatttggcctttcacagaaaaaaaattactgatcctgatctacaataagaaatgatttatattcaaggacatgtcatgtctgtaggaggagaaatgacatagatatggtcagctccacctgagggcaagccgtgaagtgggaacagggcctaggttcttgtctcaggatgcccaggtggctctgtgtcccccaccaggtagagcaggtggttaaggtctcaaagcctagcaggaaggtgctgaaataccagacacagactttctccagataataacttgggtgacgaacatggccggacacttacagcaaatcctggaagagtgcccaggccaccccgagtagaaggaggagctcaagagtacagctctaggcctttggaaggggcagagtgacagtttgtcacaaatgtattattgcaagttgcagctcagagcataatatttctatgagcttctacaaaccttggggaccagagacaggtaatcactctcaaaagatyaatccaacattgaaacgtcatggtgacacttgcaaacgtttcatccttaggtcccccctggtgtggtggctgacatttatgaccactgagtacccactttcagggtggttctgcattctgaaaattcatctcaacaactttctagagctcggcaccctaaactcagcggcctcatgttcacagactaagaagcaaacagcaaagcacagaaacaagggatttcttcccggaaagaagaatgttccccacttagtagatggatgagtagtgggataagagccctaactccaggagccagattatggtgtatcgctaaggtctgtgtttcagtcgctccagtcatgaactgctaacagcatctggcgtccataacccttagtagaggaatgtttgccggcctatttgtggagcgtatctctgagtgcacacttaagacacctcatacatttctagccttcctccccacccagcccgggagtagaggctgtgattatgtttatgaccaggaatgaagaaatgttccggagagtcaccatgacatttcaatgctctgttaatcttttgagaattgctcttgcaagggaatacttagctctggtccctagggattttagaaacctatagaaacagaatctaaatcacaacttggg

SEQ ID NO: 723376 - DNA, 614 bp, Homo sapiens
aaatatcatttaatttacgttgtgctcgaacagaatacatagaaagtaccaagagaacacaaaaaaggggagcataacataaatgaaacatttgggtattgctaaaacaagttggaattaatcttacattaaactttgttacccacttaccttaaactattatgtacacagacaagatgaaaaaagaatacctatttggtgaacgtcatctgcagattataaataggagaggggttgactgacacttagtattatttgaggctttcagcattactgctttctattattacctgcattatattgatgcttagctggcaaacctcctcctgtgttttaggttgttggaagacctgtaaggaagaattttgatgaaaatttttggactttgctaagaaaaggtttttgtatatgaagttagatatgaacagttaaaacgtggaacrctgctgcaggagtggtgcccttcctataaaaggaggcgtgcgaagagtgggcctactgggaggtgttccttactgtagtgacttgggctggagaagacaacgcagtcctgggctgatggtcaagagccaggcccatcaatagctgtccacaaagtgctatcactgtaacca

SEQ ID NO: 723377 - DNA, 1258 bp, Homo sapiens
aacttttattaggtcagattctggtacaagaaaactaataatatacaaagtactaaataatgcaaatgggcaaataataaacgttgggggaatgggagtacttactgggaacttcacatatatacacaggtatataagatgggctacaaattattacttactggctcctagcctaagaaccacactacacacttacgtactatccattaccaaagagaattactggtttgcttaaaaaaaaatcataattctgatgtgtttccagactcatgttaattcaccaagtatttctcaaatgcctggacccgaatggggataaccagaactaggagggtccttatggaaattaaccgtggaaagagacacttgtctgatttcttttgataatggcaacctattcactgaataaatatacacrcaagagtaatttctttttagcagtaaaatgtttaaaaagtacaagtctgtcatatgaataagccagtttagctttcagcaaatggtatctagtgggacaataaattctggatataagaaagcactttaatacattttccaatgatttattttctacagatacagtgaaacataaaaggcatagtgttttcttgcttctcagtagtctccctatgagaaacaatggaagatgcttaaataatttgtaaacttgagactttgactttttttaatgtaagactttattttcattgaattatcattttgtgtggcaaataaattccttcctgcctgcaagagcaaaggacatcttcaaacaaggacaaaatgacaatgcccctccaaaaggtttgagattttttaaatttaaattttatctttatagattaagtaaaacaatcatatggtactctagatttattgtaatgaacaaaagtatatccaagctgtaagtctattgaaacatttatgaacagtctggagactgggttctaaactgagttctggcattaggaaataaaaacgcttgttcacttttacgcactgtgaaacgtttcttatctataaacaagatgattggatgagatcagctctaaggcatctctgagctcttgttcctaggagagtcctttacaaagcttttaaattcagcaactaatgcatgactatagaaacgggcactctctagtttttcacaattaaactaaaaactttaataatagcttgctattcattttaaaatttctgtattgtaaaacgtttttactgtataattacacaatattagttaaaacattatatt

SEQ ID NO: 723378 - DNA, 1333 bp, Homo sapiens
tccaagatcatcaaagattcattagttgaaacagcagtgtggaaaggaagaactggaataaggtcttaatttttccatgctttttatcttataaactaaactcgaagcccttgaaaatgagaacttagagtgcaagcagtatatgaagatatttgtggtaggtagtttctaagatggtttgttgttgttgttgttgaaacagagtctcactctgtcgcccagactggagcgcagtggcatgatctcggctcactgcaacctccacctcccgggttcaagtgattctcctgcctcagcctcccaattagctgggattacaggtgcgtgccaccacgcccagctaatttcggtatttttagtagagacaggatttcaccatcttggccaggctcgtctcaaactcctgaactcgtgatccacccgccttggcttcccaaagtgctgggattacaggcgtgagccactgtgcccggccctaagatgggttttaatgatccccatcccttggtgttcatgcccttgtgtaatttcctccacccaagctttggctaaatctgatgacttgcttccaagaaacagagtacagcaaaatgatggatgttacttctgagattagattacaaaaaagattggcatctgtcttgtttactctctcatgctccctgtctttctcccttggatgaaaccagctgccctgttgtgagctgccccaggctgaggtttctgtggtaaagaactgaggggaggtctggggccagcagcccacaaggaatgttgaatccttctcgcaaccctaggactgagtttggaaatggatcctcccccagttggctgactatagccttctgaggactcagctaagccatcccaagattactgattcacagaaactgtgagataataaatgtttgttgttttaagctgttaaattgtggggtcatttgttaggcagcaatagataattagcrccatattaaaagaggcatttagagagggccaatgttgtattatctaagtcaaatcttgcagacagccttcagaagcactgtggttaagtcaagctttagaatggcagaatagaaaagtgctgattttaattgggcataaacataggggatattgataaaaactagatgacaaaaatctttgagatttcagtgacactccagaggagatatcagaaatacaaggtgtagaaatggataattccatggccactgcaattgctgatgaaggtattgctattataggggttcttgttatacaaatctagaccaaactgagccatccctttttggtttaaatattatgctagctgaacataaaaatgtgg

SEQ ID NO: 723379 - DNA, 574 bp, Homo sapiens
tgacttttacagcaggaggagcatatgcatagcctcagtcctcctggcagcttttgaatggttgagtagctgggcctccaggatcaggttccttttttgagagagggtctcactctgtcgcccaggatgaagtgcggtggcgcaatcttggttcactgcaacctctgccwcccaggttcaactgattctcctgcttcagcttcccgaatagctgggattacagacgtgcaccaccatacctggctaatttttttttttttgtatttttttaaaagtagagacggggtttcaccatgttggccaggctagtcttgaactcctcacctcaggtgatccactcacctcggcctccaaaagtgctgggattacaggtgtgagccactgtgcccagccttcaggatcaggttctgatccaaaaacctcactggtgttccttagattctcgcagtatagacagtcaagttggtacatgttacaggttgaattctgaactcccagactccacagcacacatgttgaagttctaacctctagtatgtgtgaatgtgaccttatttgaaaatagggtctttgc

SEQ ID NO: 723380 - DNA, 574 bp, Homo sapiens
tgacttttacagcaggaggagcatatgcatagcctcagtcctcctggcagcttttgaatggttgagtagctgggcctccaggatcaggttccttttttgagagagggtctcactctgtcgcccaggatgaagtgcggtggcgcaatcttggttcactgcaacctctgcctcccaggttcaactgattctcctgcttcagcttcccgaatagctgggattacagacgtgcaccaccatamctggctaatttttttttttttgtatttttttaaaagtagagacggggtttcaccatgttggccaggctagtcttgaactcctcacctcaggtgatccactcacctcggcctccaaaagtgctgggattacaggtgtgagccactgtgcccagccttcaggatcaggttctgatccaaaaacctcactggtgttccttagattctcgcagtatagacagtcaagttggtacatgttacaggttgaattctgaactcccagactccacagcacacatgttgaagttctaacctctagtatgtgtgaatgtgaccttatttgaaaatagggtctttgc

SEQ ID NO: 723381 - DNA, 592 bp, Homo sapiens
cgttaggcaggaggtggaggactttattgctagagggcatttttcacccccagcattcagcttcctccatattgcatcacagagaattctcaaccaccctcagccttccctcatcccacaggggcacagcgttctcagctgccttcaactcagtgaagtttggctcttacttctgcgttgaaaatatttctttcatgtattacaacttttttccattttcatcacagcaagccatcattatacttcttgttatttggccttcttgggaaatcccctcctgcccattcttccccctccccttccactccccgccycctcccagatctttcaaaacaaaagtacttagaaacaaagatattttaagacatcagcttcaaatggaaagtactacttatgacgcttcccactgaggaagtggcaggcgccttattggttgtgctcctgcattttacttagaagttttctagaataatgcaacagaggagaagggtaaagaagttctagtttgcaacggtgacaattgagaaaactttggtgcacattttttcctatagacttgcaacttgagttttgtgtgtaaaaatgtatgcct

SEQ ID NO: 723382 - DNA, 1229 bp, Homo sapiens
ggaggatcacttgagcttgggaggctgatgccatggcgaggcctgatcttgccactgcactccagccttgacgacagagcaagaccctgtctcaaaacaaaaacaaaaccaaaaacaaaccagccacctcaacggcaggcctgggatttcaccaacacaaccctcaaggcatgtggcccagagcctgccgcgctgctgctgctgctggtgattacagatatttctgcaggagttgggaactcagacagacgtgggttgagttcctggctaacaccaggctatcatgaatgatccgaggatggtgcatcctggtgcccattactgcctgcagctcaaaccacccagccaaggagctggaggcacttctaaggcagaagccaggtctgagacttggtcataggagcccaggcacacagtggccatgccacagaactgcgtctcttgaccggctgcggtgagctctgggcagcagggctgtgggggtccaatcacaggctccaattgaggtgagggcccartgccaccatcctctagctgcaaatcactaaggcaatcacttcacctctctgggcttccgtcctccatctgagaaatggggataaccacaccagttagaactaccctgccagagtcattccgggaaaagacaggcatcttccaggacatcccccatgcactttaggaaggagctgttggccaggcacggtagctcacacctgtaatcccagcactttgggaggctaagacgggtggatcacttgaggtcaggagttcgagaccagcctggccaacatggcgaaaccccatctctacaaaaaatacaaaaatcagcagggtgtgctggcccacacctgtaatctcagctacttggcaagctgagacatgagaatcgcttcaacctgggaggtggaggttgcagtgagccaagactgtgccactgcactccagcctgggtgacagagcaaaactatgtctcagaaaaaaaaagaaaaaaaaaaaaagaaggtgctgtcctccctggcgtctgagataaaggcaaattaacttttgtcctgcaaggaactcacctgtgtggcggggaaagctctaagggagaagctgccttactcaacccaagccaggggcgggagcaagccctgaggtgagagttaagcccagtgcaagaactggctagagaggggagggcaggctccctaagggtcaagagaacctgaaattgttgttagttc

SEQ ID NO: 723383 - DNA, 1892 bp, Homo sapiens
tagcgaagatggcagagcttagcccagcctagatcagcccccacagctgtgaaaactgaatgaatggatgttattgtttcgtggccctgagggtttatggttgcttgttacatagtgatagctgactgctacagttctgggtttctattgagtaagaagtaaaaagggatgagcttagaatacagacaggacaagtaagctgttgagcacagatggctttttaggcatcagtgttccacgaaatggacatattgcaaaggggctttgtggcccttggtgagtatccaagatggcggtcacccaccctagaacaacaggttgtgacaaagtggttagcaaggtccatctagctgctagactagaaatatatctgcatattaatgtaattatgaagtttataattagctcatctgactgtatgattcatatactaagttttgttctgaatacttacagagacaattatatggtttttttctatgattmcttacaggagaaaaaaaaaaagtcctgaaacttcacacagaataagaactcagcaggtagcaaaaactcctaattagaaacactgagtaaagaattcctcacttccttttaaagaatggtgtaattacttctaagaattgaaaaattacttcattttatcaaatattttgattagcaaagaaattaattgtactgtatcttcatttgtatttacagtgaataaatgaatgctaaaaataacaacagcaggaaaactgcctgtcaaaaaaaaaaaaaagataaaacattaaaaaatccagatgaaaataaagtggaagctctgaggaagctgcctgctacagacctcgctgccggatcaagaaacggacgctggcctccgaagggctcagcacatgcctgaggggagcctctggtgcatcaggaggtcaggcccaggttattgcctgatgggagtagatactccagcacgctgtttgcacaagtgaggcagtttcaccagatttccaggcgcagttccaggctttctggtggcataactgctgcccaggcgtgggatctcttaccacacaaggattccttctgggcaatgaacaacagctaatccgaagattccagaacttcctttgcaaaggccatcagtcaagtcaagcttcaagtgaattcaaccagtgcttactgaaaactgaccccagagtaccagtggccttccttcctgcgtctcctttacccaggcactgagctggggaacagggaatcttctctggtcctcacatcaccctgagaggcagccgtggctctccctgctgtatagacaaagtaagtggggctcagttccaagctcctgccagcaggtgctggagatggagattgtctgactccaaagccatgctcctccgatttcacccaagtccaaccacctaccacatgtgcaagaacacagaagcctcctgaaaatcccaactcagcaacactgaccagggctcatgatgtgccaggcacactcccatgcaggagtgacagagcagtgagccaaaacccctacccctggaaaagctcatgttttgagacgcccacccagggaggcaagcaagggtggagtggaccaccttactagctcggcccctcggctctccagacagaaccctttgccatgggcctcccccactgccctgccctggccatgcccaaagtgtggtgccctcccaacccctgggctctggaagcactaactctcctcccaggaagccccgtctcctggtatccacctgggctggctcctcaactcaagcttccagactcagtgcaagctcatcagaaagccatttctgcccatccttcccccactcagagttaggtcatcctcctcctcatcatcctcctcgtcctcctcatcatcctcctcgtcc

SEQ ID NO: 723384 - DNA, 1892 bp, Homo sapiens
tagcgaagatggcagagcttagcccagcctagatcagcccccacagctgtgaaaactgaatgaatggatgttattgtttcgtggccctgagggtttatggttgcttgttacatagtgatagctgactgctacagttctgggtttctattgagtaagaagtaaaaagggatgagcttagaatacagacaggacaagtaagctgttgagcacagatggctttttaggcatcagtgttccacgaaatggacatattgcaaaggggctttgtggcccttggtgagtatccaagatggcggtcacccaccctagaacaacaggttgtgacaaagtggttagcaaggtccatctagctgctagactagaaatatatctgcatattaatgtaattatgaagtttataattagctcatctgactgtatgattcatatactaagttttgttctgaatacttacagagacaattatatggtttttttctatgattccttacaggagaaaaaaaaaaagtcctgaaacttcacacagaataagaactcagcaggtagcaaaaactcctaattagaaacactgagtaaagaattcctcacttccttttaaagaatggtgtaattacttctaagaattgaaaaattacttcattttatcaaatattttgattagcaaagaaattaattgtactgtatcttcatttgtatttacagtgaataaatgaatgctaaaaataacaacagcaggaaaactgcctgtcaaaaaaaaaaaaaagataaaacattaaaaaatccagatgaaaataaagtggaagctctgaggaagctgcctgctacagacctcgctgccggatcaagaaacggacgctggcctccgaagggctcagcacatgcctgaggggagcctctggtgcatcaggaggtcaggcccaggttattgcctgatgggagtagatactccagcacgctgtttgcacaagtgaggcagtttcaccagatttccaggcgcagttccaggctttctggtggcataactgctgcccaggcgtgggatctcttaccacacaaggattccttctgggcaatgaacaacagctaatccgaagattccagaacttcctttgcaaaggccatcagtcaagtcaagcttcaagtgaattcaaccagtgcttactgaaaactgaccccagagtaccagtggccttccttcctgcgtctcctttacccaggcactgagctggggaacagggaatcttctctggtcctcacatcaccctgagaggcagccgtggctctccctgctgtatagacaaagtaagtggggctcagttccaagctcctgccagcaggtgctggagatggagattgtctgactccaaagccatgctcctccgatttcacccaagtccaaccacctaccacatgtgcaagaacacagaagcctcctgaaaatcccaactcagcaacactgaccagggctcatgatgtgccaggcacactcccatgcaggagtgacagagcagtgagccaaaaccccyacccctggaaaagctcatgttttgagacgcccacccagggaggcaagcaagggtggagtggaccaccttactagctcggcccctcggctctccagacagaaccctttgccatgggcctcccccactgccctgccctggccatgcccaaagtgtggtgccctcccaacccctgggctctggaagcactaactctcctcccaggaagccccgtctcctggtatccacctgggctggctcctcaactcaagcttccagactcagtgcaagctcatcagaaagccatttctgcccatccttcccccactcagagttaggtcatcctcctcctcatcatcctcctcgtcctcctcatcatcctcctcgtcc

SEQ ID NO: 723385 - DNA, 602 bp, Homo sapiens
tgaacctgggaggcggagcttgcagtgagccgagattgcaccattgcattccagcctgggccacagaatgagactctgtctcaaggaaagaaagagagaaagaaagagagaaagaaagagagaaagagagagagagagcgggcgagagagagagagaaggaaggaaggaaggaaggaaggagagaaagaaagaaagaaaggttgaaaaggaggaactgttgttgataacagaaratgtaaactggtgagcctgacatcaaatcctggccgacttccagggtggaggaggacacagatggccggagaggaccagggtgggtacctaagtcaccaggagcccacatggttctctaagaagcagttgtggtggctgaacgtttgggtctctacagggccacctggctgggaaacacagggaaaagccaggaaccctggatgtaaatgttgctacggcatttgaacatcactcttggacattcttgtgctcagataaaaaatcggggctgaccggcagcctagcttgctggaggggaggtatagctgattgaatacacagaccaaaatgtggggttggcttgaaaactgtcaggatgggccacgtg

SEQ ID NO: 723386 - DNA, 1285 bp, Homo sapiens
aatttacatgaatctacaaaagattcatggtgccaagatgttgggagactctggatcactgggacagtaccttctcctgccacctgctaccagaggtcaggagctcccaggaagatagtgcagccatcagatgggacctgtgaggtcaaacacctccaagctgagggaagggatgacacacgcaggtcccactcacagtcgtgcctgttaacggcatcacatgtccccaggtgccggctgctgcagtgatgggaggagggctaaactgggaggggactgggaaaatactgcagtgcctgggaggcacatctggtaggcagctgactcaaaacccactcctcccagcgggctcacaggccatcagaagcctagtatgggccaggcacagtggctcacgcctgtaatcccaacactttaggaggccgaggcagctggatcaccagaggtcaggagttcaaggccagcctggccaacatggcgaaaccccatctctactaaaaatacaaaaattagccgggygtggtggcaggtgcctgtaatcccagctacttgggaggctaaggcaggacaatcatttgaacccagaaggcagagcttgcagtgagcagagatcgcaccactgtattccagcctgggcgacagagcgagactctgtctgggaaaaaaaaaaaaaaaaaaaaagaagcccagtacattctaccattctgcaaggcagggtcttctacgtccttggcaacctcatcacgagagaactacagctactaaagggacgcgggtgccaacagtcaggtcctgggtaagctaccggcctccctgggcctcagtttctttctcagcgaaacaatgaagagactgtaggagccagcctccgaggagggccccaaccacacccacctcctggaattcacacctatgcgccgtccattcccacacccagtgctgtgttgtgtgacttcccaggctagggcataaaagacactgtggcttcttccctgctctctctctcaggtcacccactctgggaagctggtggctgcactgtaaggacactcaagcaaccctctggagaggtccacatggtgaggaccagtccctgtcaacgtccagccctgactcgatggcacgtgagcagccccctcggaggcagatcccgcagccctggtcgagcctgcagatgactgcagcccagccaacaccttgactgcagcccagactagaaccactgaagaaccagctagcacaattccaaattcctgacccccagaagccatgtgaaataatcaat

SEQ ID NO: 723387 - DNA, 1285 bp, Homo sapiens
aatttacatgaatctacaaaagattcatggtgccaagatgttgggagactctggatcactgggacagtaccttctcctgccacctgctaccagaggtcaggagctcccaggaagatagtgcagccatcagatgggacctgtgaggtcaaacacctccaagctgagggaagggatgacacacgcaggtcccactcacagtcgtgcctgttaacggcatcacatgtccccaggtgccggctgctgcagtgatgggaggagggctaaactgggaggggactgggaaaatactgcagtgcctgggaggcacatctggtaggcagctgactcaaaacccactcctcccagcgggctcacaggccatcagaagcctagtatgggccaggcacagtggctcacgcctgtaatcccaacactttaggaggccgaggcagctggatcaccagaggtcaggagttcaaggccagcctggccaacatggcgaaaccccatctctactaaaaatacaaaaattagccgggtgtggtggcaggtgcctgtaatcccagctacttgggaggctaaggcaggacaatcatttgaacccagaaggcagagcttgcagtgagcagagatcgcaccactgtattccagcctgggcgacagagcgagactctgtctgggaaaaaaaaaaaaaaaaaaaaagaagcccagtacattctaccattctgcaaggcagggtcttctacgtccttggcaacctcatcacgagagaactacagctactaaagggacgcgggtgccaacagtcaggtcctgggtaagctaccggcctccctgggcctcagtttctttctcagcgaaacaatgaagagactgtaggagccagcctccgaggagggccccaaccacacccacctcctggaattcacacctatgcgccgtccattcccacacccagtgctgtgttgtgtgacttcccaggctagggcataaaagacactgtggcttcttccctgctctctctctcaggtcacccactctgggaagctggtggctgcactgtaaggacactcaagcaaccctctggagaggtccacatggtgaggaccagtccctgtcaacgtccagccctgactcgmtggcacgtgagcagccccctcggaggcagatcccgcagccctggtcgagcctgcagatgactgcagcccagccaacaccttgactgcagcccagactagaaccactgaagaaccagctagcacaattccaaattcctgacccccagaagccatgtgaaataatcaat

SEQ ID NO: 723388 - DNA, 2739 bp, Homo sapiens
aaaagaaaaaactgaaacacaattttattcttggatgggttttactcagctctggattttcctactgcccatgcaatcaagtgaccacacagtgcaaagagcaggtgtagagagactggaccttaactttatttctctcaagatagcagatgaaactgactatcctgcaaggctgcatgaagctttgaataaatggagaaacggaaaccacactttgtccttgaatcgatgaattgcagggcaagacttcatgacgaataactgagaatgttttagctttcactcttctatttggtttcttacagaagagataattcagtgtatttggaacttcccatatctatattttacagtgaccaatttgcagtgcatatgtgtgcgtgagagagaaagagtaagattaagagagaggaagaagttgtgcaataagatagaagggaaatcaatagaaaaatccagaaaaaatggggcctatggacaacattcatctaattaatttaaattgttaacgatatgtttttagggagaaaatgaccccatcaatttttccttttgttcaaagtcattgcacatgggaaagaaaaaagccatccttgtgtttcccactgtgcatagttttaggctgctctggatttaatagtggaatgaatttatttatacaaaatagaagaaaggcacattttcattcaccaaatctagaatacttgatgttttgtgcacaacacctgcaaaggaagattcagtatgtcctttgggtacatttgctcacatgataatatcaaaaatgcacattaagataaaaaaacagtaataacaatgattatggatttgcataaaatattgcaaaaaatgttaagcatactaatatgctttatttctggttttcaaattcaaacttcatagttgctacttctattttttttaaaaataaggtcctgatactattttgcctcttcctttcactaagaatggttgatgggctattttaactaaattgtaaaagatcagcattttgctgtatctgaaacttagaccttattataagcaacatgtaaaaaaaagaatacaaaagcaaagtagaattccattatcagactagtattagaatataatgacacttgtaagacaattttctgtcacacctttatgaaaagtcttagacgtatttactaatcgtttacatatatacacaggcatttagctccctttaaaaattagttgacaatataattattcccatttgcatgtgtcaaaagaagtgattttttgtccattataactgggtcagtgcaactcgctgtgaaatggttagtttttcacaaaaacgaagcaagaagactctcacttcaggcttcatttatcgttttatttgtattattggtaacctgaaaaggaaaaatcacagttttgtttgtttcaaaacctaacacactgtaaattttaaatgactacattagatttcagacacatttttttgtaaatgcaactatttgcttttaaaagttattttaataataaggtcaaaaatattaacttttagtgactacatgaattttctatagcgatgtttggtttccttagaaaatcatgacgtctttttttattccatttactgtaatttaagatgtaattgtcagaaatattttagagattctataggcctttactataagaagcactacggttcaatcttacaaaatattaaatttctctatacttcatttatattatcttttgaggtaatcaatcattaataattcttgctttgtatgggtctcatatttttaatttatacatttatgaaaaaataataagatacacattttttaaaatatttttacatataaaacaatttttggcattttagatttcctttaaatccctgaataattaggacttctgaaagcgtagaaaagaattgttctattattgtattcatatgtccattagaaataatatatgtatcatatattgagtaagaaaacttttcttggattctaagtcataagaaacgttttaaaagttataaatgcaaagaagcagtcaaaatttaacatattaattataatatatggttaaatgtctaacgtaaacattgtagaaatgaagaatggaayctttattgtataatgataaagattgaatgtttttacttgaataaaggtatgttcgcttttaattctgtatatttttctgttattgaattggatctcagaaaagacatcttgacaggtgaccttctaaatgtgaaaaattttcatgctttttaaatttgtttatcttaatatttggaaatgttttgagtatttacattatgaatatattttaaatccatgcatccaaaaggcaatacttgagatgagcattttcagaatatgtgatttttatcttgactccatttgatgactgcctaatactgacgtctaataaggtagaaaataattcgctcatcaaaaaaagcaaaatgaaaagcaatattatatatatgtgtgtatatatatctacacatatgtagatataaaaagatacgattatatttagggttatgataaagtatcataaaatggaaatattaaaatattttggtgcattttggaattatgttaatattaatctaagaactatctatctactaatatattgattgttctcttttaaattcatagataatattagtttctccattatagtctatggaagaaattcttccataattacttgaaacaattattttaaaat

SEQ ID NO: 723389 - DNA, 635 bp, Homo sapiens
gtctcaggtcactggttcttataattgtattcttgttatgtgagcatcaatactaacagaaacaattccagtttctattatagtggttaaattacagttttgcttaacaataaaaaatcagtatacaaacaagatgtttcctaaaaatgtatatgtattttggtcgttggttaacaggaaaaaaattttaatgatagaagtgagattccccctcaaaccatatttatgacataacgtagcagagctacactgttaatagcttgatcaccaccatacagaaagtakcagaaaagatgttttctcttcttccttggtatacctttggacttaggaaaaacttctgagtaagcaaagttggtccccctctctcctctctttctgcttctctctcaggtcctcctgatgccctgactgagtccaaacaggtgcacctgaactttccctcatcttgcacaatgcctcatgtccccaatgatttctctctcatctcagaagctaagcagggttgggcctggttagtacttggatgggagaccaaagacttatttcccaatcaaaatgtttacttcaaacagctgatcttctctagttctggggtggagagcaatctgatcaaactataataccatgcgtat

SEQ ID NO: 723390 - DNA, 1802 bp, Homo sapiens
tggatgcagctggaggccattatcctaagcaagttaaggcaggaacagaaaaccaaatactgcatattctcacttttaaatggaagctaaacatttggtacacatagatataaagatggtaacaacagacactagcggctactacagctgggaaacagggagggggaaagggctgaaaactaccttttgggtattatgcttatcacctgggtgacaggatcatttgtaccccaaacctcagcattactgaatatacccatgtaacaaacctgcacatgggcctcctgaatctaaaataacacttgaaattattgaaataaaaataaaagtgatacatttggaacatgcccagtacaaccacaggacagcgaagcagaggaaattcgaggtatcggctttcagtataaaatcaaagtgatgtgtttcagaacagattttgacgttgacatgactttctagttgacttttttagtattcctcttgctattcagaacattgtgattaagagtcagtttctttcacttttgttatatacttatatatttatatatttttggtatatattgtgtataaaacagattattaggaaaaaaatcttggtttcttcaaagaatccagtaaagagggtgatgtttttaagaccccttttcctagtggttgcacttcatgaattaataattctggaacttatgctgtttattttgttaccttttaatgtatgttcccctacaaagtaagcttctgaaaaatgaatgcaaaagtcccacgggccgggcatggtggctcacgcctgtaatcccagcactttgggaggcctagacgggtggatcacctgagctcgggtttcgagaccaacctgaccaacatggagaaaccccatctctactaaaaatacaaaattaggcaggcatggtggcgcatgcctgtaatcccagcctgtaatcccagctacacaggaggctctggcaggagaatcgcttaaacccaggagacagaggttgcagtgagctgagatcacaccatcgcattccagcctgggcaacaagagcaaaactccgtctcaaaaaaaaaaaaaaaagtcccttgtgtatattaaaaggagatggttttgccacaaactgtagttaaggcaaacagttaacttaaatttactatggaycaaaagtagagattattagattatttaatttaattattcaatgtatagaaagttttttagtgtagtgcttttcagacgtaactattgggagtgtattttgaaatacatatcacatatagcaaaaagaaaaggaaaacaatcctattttttaaattacattgcaatatatacagatataaatataaatacatatattcactatgatagcatccaaaatggcccccatgaagccccacctcctgatattctcaactctgtttgattctgtccacgttgtgccattgttggtccatgtgaccaacatcatgtggaagaagagatgtcacttctgtgattaggttttcaaagactgtggcttacatccaagttccctcgctctttctctcatgtgctttctctctcagtatcattgctctaggagaagccagatgacattttatgaaagtttttctagcatcctaaagaatggaggcctggcaaccgccgtgagtgagctgagaagcagattttctccagccccacccgagccttgagatgatggcagccctggggacaagttaactacaactttccaaaggccctgatccagaacaactccactaagccagtcccagatcctgaccctcagaaatgctataagata

SEQ ID NO: 723391 - DNA, 1802 bp, Homo sapiens
tggatgcagctggaggccattatcctaagcaagttaaggcaggaacagaaaaccaaatactgcatattctcacttttaaatggaagctaaacatttggtacacatagatataaagatggtaacaacagacactagcggctactacagctgggaaacagggagggggaaagggctgaaaactaccttttgggtattatgcttatcacctgggtgacaggatcatttgtaccccaaacctcagcattactgaatatacccatgtaacaaacctgcacatgggcctcctgaatctaaaataacacttgaaattattgaaataaaaataaaagtgatacatttggaacatgcccagtacaaccacaggacagcgaagcagaggaaattcgaggtatcggctttcagtataaaatcaaagtgatgtgtttcagaacagattttgacgttgacatgactttctagttgacttttttagtattcctcttgctattcagaacattgtgattaagagtcagtttctttcacttttgttatatacttatatatttatatatttttggtatatattgtgtataaaacagattattaggaaaaaaatcttggtttcttcaaagaatccagtaaagagggtgatgtttttaagaccccttttcctagtggttgcacttcatgaattaataattctggaacttatgctgtttattttgttaccttttaatgtatgttcccctacaaagtaagcttctgaaaaatgaatgcaaaagtcccacgggccgggcatggtggctcacgcctgtaatcccagcactttgggaggcctagacgggtggatcacctgagctcgggtttcgagaccaacctgaccaacatggagaaaccccatctctactaaaaatacaaaattaggcaggcatggtggcgcatgcctgtaatcccagcctgtaatcccagctacacaggaggctctggcaggagaatcgcttaaacccaggagacagaggttgcagtgagctgagatcacaccatcgcattccagcctgggcaacaagagcaaaactccgtctcaaaaaaaaaaaaaaaagtcccttgtgtatattaaaaggagatggttttgccacaaactgtagttaaggcaaacagttaacttaaatttactatggaccaaaagtagagattattagattatttaatttaattattcaatgtatagaaagttttttagtgtagtgcttttcagacgtaactattgggagtgtattttgaaatacatatcacatatagcaaaaagaaaaggaaaacaatcctattttttaaattacattgcaatatatacagatataaatataaatacatatattcactatgatagcatccaaaatggcccccatgaagccccacctcctgatattctcaactctgtttgattctgtccacgttgtgccattgttgrtccatgtgaccaacatcatgtggaagaagagatgtcacttctgtgattaggttttcaaagactgtggcttacatccaagttccctcgctctttctctcatgtgctttctctctcagtatcattgctctaggagaagccagatgacattttatgaaagtttttctagcatcctaaagaatggaggcctggcaaccgccgtgagtgagctgagaagcagattttctccagccccacccgagccttgagatgatggcagccctggggacaagttaactacaactttccaaaggccctgatccagaacaactccactaagccagtcccagatcctgaccctcagaaatgctataagata

SEQ ID NO: 723392 - DNA, 699 bp, Homo sapiens
aattgctgtattttaagaaatttttgctgtgtttctgggggttaatgcccagcttcctctggagagcttggagacgggggtctgagtcttcaccagctgtaaagttgtcttgagaacagtccttgaaggattgctgctatacacattcttggtattaaaaacactagtatttggcatatgaactacattagcaaaaagtgaaacaaaagaaaaaattcacagagatacctgtcactggagcaaatcactacatgattcatatttgtattctataataaaagaagacacacaatgatgtttactgagaccctgtgatgtgtcagcctttgcactaggtacactacatacactatacagccccctgtgataaggtgrtattatctgtatttttagaaaatgaagaaactgagtcttgggaaaggtaagaaactaccctagcctagctgcatattgatatgtgcaaacagcttcattttgtaaaatgtgtgttttatttttgtttgcaagctggatttatttggttgtatttttcatcacaaagactgaaatttgtggtactagtcttttgggggtcattactcactttgagaagttactacagtagctgaacttttacactgttaaatgaaaaccactatgcctgttgtaggggagggggaaaaatcttttttcctctatcttagatttttcagcagggcc

SEQ ID NO: 723393 - DNA, 641 bp, Homo sapiens
aggaatagccacacaggtgagtctaaagatgtcctcaagtttagttctcatcacattttcattgcaaaaattggcatatcatgaagattgataaatcacagtgcctaagagggtgcatcttttagatttatgaaaataaaaatccgtttgaagacgttatccaacacctttatgaatattttgtccttttaaaaattttgtaacccaaactctagctatataaccataataattcactctgtatattattgttacttcatcatttgattcaaaaacttggttatctttaacaattatggtattttgtttaaaaagttatatatttttaaaattaaaaattgaattacagattatttcagcatagtatgataattactggacaagttgtcttgggaacaggaagaaacaatatctaggatgtacattttatttaagacttaattccttaaccattgcaaatgttattgatgactgccctttaaatcactgattatatatgaaagaacataatatttagaaagtgacacagggctataagaaacactgtctttcataatatcctgttttttcatgatatttacaattgctgcacattctgacaytgaacatgtatgtgaaaaatcctgacgacaccatggaaa

SEQ ID NO: 723394 - DNA, 607 bp, Homo sapiens
agttgcaccccatttttacctctccttctaaattgtaaaattagacagtcactatatgctgtctcattctgtaccaattaaaaattccataattctatgagtattttaccaatgaataccaaatttttaaaaaaacttggatcattctgaaacttgagtaattgaaatgcctcccaaactgttttattttctgaatgtaaaaagcagacccttgagtcagtctcatgcctagaaggcttgccacttagggttagcctagaaaacagttttttggtgaagtttaccycttaaaatgcccatcgtttcagcattagcaactgaactggctagaagagcctgctgctgcaaggatctgtgtgcatagagggaataaaatggagtggacagcaagcaagggagcgggattattggagagatacagcaaatggaaagaggcaagtgtaactgaatggaaaaaaaaattctccagagagagtggagaaaattgttgaaaggaaaacataggaaactttatctcagggatttattccaagaattaaattccagagaagatgcatttccacaatgctttctcagtccatacttaggctgtgctgcagtgatgatg

SEQ ID NO: 723395 - DNA, 563 bp, Homo sapiens
tgtggcatggtagtaaaagcaagtataggaaaagagggcaccaagaagggagtgctctgttctaccttatgtagcattagaggtcaggaagggttcggctatggaagtgattcctgaggcagacacagcagggacaagtgttctagaaagggtctggaggcatgacatgctgtaatgctttctttctttgtttaataactttrtctttcaacagagccctttggagcttttctaagctttctcatttcttctgagttatctgtgtctattagggatcaggagcttgatatttggtatttacagaaaatgtcccagatggaaatattgccctcttggtggaatgagccccctcccaggagtcagatgggtcagtgtcctatgagttatcctccaaatggaacctgtaacagagtattcaatctggcttcaatttcattttgaaatagatgattccaaaaatgagtatacttgatagtggattaaaacaaaatgagccccttttggaatttaagcttgctatgcttctcttgtttacagtactattctaataaaagtatattaga

SEQ ID NO: 723396 - DNA, 559 bp, Homo sapiens
tgaaatctgcagagaagacagagcaggcaaccctgggaagaggcaggccaaggtgaagtatgcgacctcagcagcccagggaggagggcggtcagcactgccaaactgtgatgatgggcagatgtcaggaggatgcagggactcaagcagggccctgggcacatcagagaaagctacttggatagggtgtcgggagctgaatggatggggtgaggctgtgtgtggaggtggctccttgatgccttttggcagaacagggggagagagaggccaggcagtgastggagggaccccgattctgaaggggcctctataaaagacgagagggagcctcaaaggagggccagaggccagatgcagtggctcatgcctgtaatcccagtactttgggaagccgaggcaggcggatcacttgaggccacgagcttgagactagtcggggcaacatggtgaaaccatgttaggtctccaaatacaaaaattagctgggcctggtggtgtgcacctattgtcccagctgggcctggtggtggtgtgcacccattgtcccaagtacttg

SEQ ID NO: 723397 - DNA, 1847 bp, Homo sapiens
tgaggagttcacagccttgtttccccctccacgctcaggcactcccaaaggcgcgaggaaggaggaagaagaggaggaggaggcagctacggtgayaaagaagagcaatcaaaagggcaaagccaaaggaaaaggcaaaaaggttggggcccagaggggcagggggctgaggtcccttcagggagcagaggcaggggcctggacttgggagcctagagggtgggggcttggagccacttgaggttagaaccttggctccccctcttgtgacaggatataaggacaaaggaaaccagatttgtgcaaacagaggaggcgtttgtggggtcaccaggctaggactggccatgcaagggccttatgtcatctgggctctctgaggcctcccctctggagcataaccatcagacagccagagatgtccccacgcccccaccatgttttctgtgccagggaggaggagcacacaggcagagaggcagatgagtactgactgacagtcagctgcaccggttgttaaaatgtttccaccctacagccctgagctccccaggcgctttcactcaccttacccaggacctcccaacctcccagcaactaaacactccagcaacgaaagggttaatactgcccatcaggagcctccctgtttctcctccaagcttaccagtatgcatctccatggcgaacaggttgttaaatattttgaatattgcccctgctcccaaacaggactcagacaccaacacacaaaagctggagtaagcaggagagggaggtccaactgacagaaagtaacaaaagtcttcaaggaacaggtttctcccagtgggaagatcaccacgaggacagggcctggattttagctttgtaggtttattagtttgtgcaggagtggtcaggtctagggggactgattcacattaaccaagatcaccagatgctgatgtacaaactgaaaggccagtttactgtctcccagaggggaatgtaactgcagaacagccttcagtacagtaggctcttgaaatttgcagctgctgaagtgtttgaataagttctggctttctccacatcgtgttccaaacatagtcttttgtttcccaggtttcttctggaacaacctagagtagagaacaggtgatcacttgtccctgagctgagggttcactgctctacatcagcctccctcaaacacactgcaaacctgtgctcaacaaaaacagccatggccaggcaaagtggctcatgcctgtaatcccagcactttgggaggaggaggcagatgggtcacttgaagtcaggagttcaaaccagcctggcgaatagtagagatggtgaaaccccatctctactaaaaatacaaaaattatcggggcatggtgatgcgcacctgtagtcccagctacttaggaggatgaggcaggagaatcacttgaacccaggaggtggaggctgcagcgagctgagatcacgccactgcattccagcctgggcaacaagagcgaggctccatctcaaaaaaataaaaaataaattttaaaaaatggccaaccacagcacatctttgtggattcttcgtggctcccaaatagcattgaaccctcaaatgcacacacccaggctggcagtccatgcttgcctctgttggaaaagttgggcttagactcttggctcccttcctgtgagggatagaacatgaggacaaagggcaccaggtttgtgagaacagaaggggctgttgtggggtcaccaggccaccctagggctttatgtcaccaaattgttcttaggagtttctcaatgagcaaagtgagcttacatattcattcatgtgttaactatgc

SEQ ID NO: 723398 - DNA, 1847 bp, Homo sapiens
tgaggagttcacagccttgtttccccctccacgctcaggcactcccaaaggcgcgaggaaggaggaagaagaggaggaggaggcagctacggtgataaagaasagcaatcaaaagggcaaagccaaaggaaaaggcaaaaaggttggggcccagaggggcagggggctgaggtcccttcagggagcagaggcaggggcctggacttgggagcctagagggtgggggcttggagccacttgaggttagaaccttggctccccctcttgtgacaggatataaggacaaaggaaaccagatttgtgcaaacagaggaggcgtttgtggggtcaccaggctaggactggccatgcaagggccttatgtcatctgggctctctgaggcctcccctctggagcataaccatcagacagccagagatgtccccacgcccccaccatgttttctgtgccagggaggaggagcacacaggcagagaggcagatgagtactgactgacagtcagctgcaccggttgttaaaatgtttccaccctacagccctgagctccccaggcgctttcactcaccttacccaggacctcccaacctcccagcaactaaacactccagcaacgaaagggttaatactgcccatcaggagcctccctgtttctcctccaagcttaccagtatgcatctccatggcgaacaggttgttaaatattttgaatattgcccctgctcccaaacaggactcagacaccaacacacaaaagctggagtaagcaggagagggaggtccaactgacagaaagtaacaaaagtcttcaaggaacaggtttctcccagtgggaagatcaccacgaggacagggcctggattttagctttgtaggtttattagtttgtgcaggagtggtcaggtctagggggactgattcacattaaccaagatcaccagatgctgatgtacaaactgaaaggccagtttactgtctcccagaggggaatgtaactgcagaacagccttcagtacagtaggctcttgaaatttgcagctgctgaagtgtttgaataagttctggctttctccacatcgtgttccaaacatagtcttttgtttcccaggtttcttctggaacaacctagagtagagaacaggtgatcacttgtccctgagctgagggttcactgctctacatcagcctccctcaaacacactgcaaacctgtgctcaacaaaaacagccatggccaggcaaagtggctcatgcctgtaatcccagcactttgggaggaggaggcagatgggtcacttgaagtcaggagttcaaaccagcctggcgaatagtagagatggtgaaaccccatctctactaaaaatacaaaaattatcggggcatggtgatgcgcacctgtagtcccagctacttaggaggatgaggcaggagaatcacttgaacccaggaggtggaggctgcagcgagctgagatcacgccactgcattccagcctgggcaacaagagcgaggctccatctcaaaaaaataaaaaataaattttaaaaaatggccaaccacagcacatctttgtggattcttcgtggctcccaaatagcattgaaccctcaaatgcacacacccaggctggcagtccatgcttgcctctgttggaaaagttgggcttagactcttggctcccttcctgtgagggatagaacatgaggacaaagggcaccaggtttgtgagaacagaaggggctgttgtggggtcaccaggccaccctagggctttatgtcaccaaattgttcttaggagtttctcaatgagcaaagtgagcttacatattcattcatgtgttaactatgc

SEQ ID NO: 723399 - DNA, 1847 bp, Homo sapiens
tgaggagttcacagccttgtttccccctccacgctcaggcactcccaaaggcgcgaggaaggaggaagaagaggaggaggaggcagctacggtgataaagaagagcaatcaaaagggcaaagccaaaggaaaaggcaaaaaggttggggcccagaggggcagggggctgaggtcccttcagggagcagaggcaggggcctggacttgggagcctagagggtgggggcttggagccacttgaggttagaaccttggctccccctcttgtgacaggatataaggacaaaggaaaccagatttgtgcaaacagaggaggcgtttgtggggtcaccaggctaggactggccatgcaagggccttatgtcatctgggctctctgaggcctcccctctggagcataaccatcagacagccagagatgtccccacgcccccaccatgttttctgtgccagggaggaggagcacacaggcagagaggcagatgagtactgactgacagtcagctgcaccggttgttaaaatgtttccaccctacagccctgagctccccaggcgctttcactcaccttacccaggacctcccaacctcccagcaactaaacactccagcaacgaaagggttaatactgcccatcaggagcctccctgtttctcctccaagcttaccagtatgcatctccatggygaacaggttgttaaatattttgaatattgcccctgctcccaaacaggactcagacaccaacacacaaaagctggagtaagcaggagagggaggtccaactgacagaaagtaacaaaagtcttcaaggaacaggtttctcccagtgggaagatcaccacgaggacagggcctggattttagctttgtaggtttattagtttgtgcaggagtggtcaggtctagggggactgattcacattaaccaagatcaccagatgctgatgtacaaactgaaaggccagtttactgtctcccagaggggaatgtaactgcagaacagccttcagtacagtaggctcttgaaatttgcagctgctgaagtgtttgaataagttctggctttctccacatcgtgttccaaacatagtcttttgtttcccaggtttcttctggaacaacctagagtagagaacaggtgatcacttgtccctgagctgagggttcactgctctacatcagcctccctcaaacacactgcaaacctgtgctcaacaaaaacagccatggccaggcaaagtggctcatgcctgtaatcccagcactttgggaggaggaggcagatgggtcacttgaagtcaggagttcaaaccagcctggcgaatagtagagatggtgaaaccccatctctactaaaaatacaaaaattatcggggcatggtgatgcgcacctgtagtcccagctacttaggaggatgaggcaggagaatcacttgaacccaggaggtggaggctgcagcgagctgagatcacgccactgcattccagcctgggcaacaagagcgaggctccatctcaaaaaaataaaaaataaattttaaaaaatggccaaccacagcacatctttgtggattcttcgtggctcccaaatagcattgaaccctcaaatgcacacacccaggctggcagtccatgcttgcctctgttggaaaagttgggcttagactcttggctcccttcctgtgagggatagaacatgaggacaaagggcaccaggtttgtgagaacagaaggggctgttgtggggtcaccaggccaccctagggctttatgtcaccaaattgttcttaggagtttctcaatgagcaaagtgagcttacatattcattcatgtgttaactatgc

SEQ ID NO: 723400 - DNA, 1230 bp, Homo sapiens
ctcaaaaaaataaattaattggcagggcacagtggctcacccctgtaatcccagcactttgggaggccgaggtggatggatcatggggtcaagagatagagaccatactggccaacatggtgaaactccgtctctactaaaaatacaaaaattagctgggcgtggtgtcatacgcctgtagtcccagctactcgggaggctgaggcaggagaatcgcttgaacccaagaggcagaggttgcagtgaaccgagatcatgccactgcactccaccctggcgacagagactccgtctcaacaacaacaacaaaaattaattaattaaaaataaaaataaataaataaataaaaagctttcgctgtagtcaaatatttttaagtcccatcaatgcctttcttactttatgatggactcttattttctgaggtctcaccaggtcccagacaccctccaacacagcttcctcccagctctcagatacacgtattaaagcccagaagaatcactctcytgagatgaaaggttaaaacttctacatgttacctaccagccatctttctccctttttaacttccaatcctcaatttcctcttttctaaatcatctcaaaaaggagtgacttagatatatctaaggaaaaaaattctactgattctgaaagactatataaaagtaaattgaatataatcaactgaaatttcacacaaaggaaaatgctgcaggggtagggagagaactccaaatttagtagctagtttcatattcaggtaaaggatttttccatacttcacaacacctttagaattaaaacagcatagcacctgaattaagcattatggtggctggcagtcaatgctaattagtatgacatgcttagacttatcaggtggtccatagcctacaccaataatgaaatctaactcactcgaaatgctcttgaccaaagtaaaagcattcctttggcaggtggcagaagggatgatgagtcaggaagaaatactcaacactggccagatgcctcaaggaatcaccagtaagaacaggaaaattaaaagaaccaactgaagaaactaacaaagaacaatgtgcctattttattcaattgctgtaagcatgaaatttatacttacagtgcccatgaatcacaaaatctgtaaagcaccaataaggccattaatatagtgaggctcataaaagtgtctcaaaaactgaactacttaaactagaaaa

SEQ ID NO: 723401 - DNA, 1230 bp, Homo sapiens
ctcaaaaaaataaattaattggcagggcacagtggctcacccctgtaatcccagcactttgggaggccgaggtggatggatcatggggtcaagagatagagaccatactggccaacatggtgaaactccgtctctactaaaaatacaaaaattagctgggcgtggtgtcatacgcctgtagtcccagctactcgggaggctgaggcaggagaatcgcttgaacccaagaggcagaggttgcagtgaaccgagatcatgccactgcactccaccctggcgacagagactccgtctcaacaacaacaacaaaaattaattaattaaaaataaaaataaataaataaataaaaagctttcgctgtagtcaaatatttttaagtcccatcaatgcctttcttactttatgatggactcttattttctgaggtctcaccaggtcccagacaccctccaacacagcttcctcccagctctcagatacacgtattaaagcccagaagaatcactctcttgagatgaaaggttaaaacttctacatgttacctaccagccatctttctccctttttaacttccaatcctcaatttcctcttttctaaatcatctcaaaaaggagtgacttagatatatctaaggaaaaaaattctactgattctgaaagactrtataaaagtaaattgaatataatcaactgaaatttcacacaaaggaaaatgctgcaggggtagggagagaactccaaatttagtagctagtttcatattcaggtaaaggatttttccatacttcacaacacctttagaattaaaacagcatagcacctgaattaagcattatggtggctggcagtcaatgctaattagtatgacatgcttagacttatcaggtggtccatagcctacaccaataatgaaatctaactcactcgaaatgctcttgaccaaagtaaaagcattcctttggcaggtggcagaagggatgatgagtcaggaagaaatactcaacactggccagatgcctcaaggaatcaccagtaagaacaggaaaattaaaagaaccaactgaagaaactaacaaagaacaatgtgcctattttattcaattgctgtaagcatgaaatttatacttacagtgcccatgaatcacaaaatctgtaaagcaccaataaggccattaatatagtgaggctcataaaagtgtctcaaaaactgaactacttaaactagaaaa

SEQ ID NO: 723402 - DNA, 924 bp, Homo sapiens
agtatatgtgtattttaaaatctgcaatttaattaatgtttaattctatatgaacttagttttaaaatgtgggaaataatttaaaatacagctttttcatattcatgcagtgaagttactgagcacctgcaggtgcctggcactgtgctggaaacagtagcatcaattgtttcagtactctttttgaaaattttagaaaataataatttggatcagaatattgtatccacttgcctggagttgctacctagtttgaaatctttgcctaggtgatgtcaaawttttaattttatgctgcgtgtgtgtatttgtgtatacacacacgcagcataaaatatatacatatggcaaaattaaaagcaactaaacgaagtcattctaagtacagccttgtacttatttcaaacagaattgaaatatgttgtctgcttgttatagtctatgcctcccagccttctgattagtactcctgagaattctcataaaaatttccaaagaaaatggtggttatttcaaaagacaagatacaatgtccatttttaattttgtctttagaaatatatattcaaggaaattcgtatcttagattaaatgaaatgtttttaatgttttttttttaaactgaaattgtttagttgggcactacatgttaatcatatgtataactagaaaacttgctaagaataaattttagagaaataatatgtaatggttgtttacatgtttaattgtatatttcagtgatataaaatttaagaaaccttaagaaatttttacatggatggcacaaacatgtaaaatactctcatgcttaaaacaagctaagcaacctggttttctttacataaagtttgttattcactttttttttattgaaggtgatacttacattccagctcaaatgagggttgaattggtttagtc

SEQ ID NO: 723403 - DNA, 930 bp, Homo sapiens
ggttcattgtggacatgccctgaccagttccctgttgatagacgtgggctgtttccaatgttttattgattatacaaacaattcttcagtgaatgaccttttcacaatacatgtgtgggtatatttatagggcaattcttccaaagtggatttctgggtccaagggtagatgataatttggtagatgttgcaaatttccacagtttgcatttccatcagcaacatgtgtgaatacagttaagtctctattgatggaaagtgagattatttcaaatattttgccattgcaaaataagcagcaaaggatacacctgaatattcaaaaatttcttatgcatgagaatatatttgcagaatagagatcctgattgatttgtaggggttctttctattatcatgtgaaggaaattagcccttatatcagttagcttttactgtatgagacaagctccaaagtggacggctaaacagctgtttattcagctgctggttctttgggcctgcaatatgggttgggattagctgggtggttctgctctttggggccagggtaggctgatcttggctggccttgttgaggaacagctagggtgggagtgctcagctgggtggtttttttctttctgctccatgtggtcaatcagcctccatctagctggcctaggctttttcacaaggcaactcatggttcaagagcagtcaggccaaatgcccttgcacaagtgcttttcragcctctgcatcacatttgtactatcccattggctgaggtgagtcaagtccagtgtccatgtggtaagacactacccaagggcatggatacagggaagcatgaacaaatcggggtcattactgcgatcaatctatggtggcccacaaaggcctaatcttaattctctgtcataagtattttgggttatcactctaatt

SEQ ID NO: 723404 - DNA, 631 bp, Homo sapiens
tatatattaattcatccgctcttcatcagtatcccatagtaggtattattattggaaatatttccattttacagagtagaatatagagcatatcaaggttaaataacttgttcaargtcacatggcttggtggggggcggaacagtgagtttccataccctgtgtctttaatttactcactgtactcttaaatgcctggtaaattatcatttgaggaaagggttcgactttttctttttttagaaaatgattctaaaagccactgaactaggtgatccctaatgattctactttagactttgatgaccccaaaaataaagataaaccaacagaaacacagtattggtgggtgattaggcaagcaggttctggagtcagatggagactcaatcttggaggagggagagagagagagagatcacatggagaagcacagagaaggcaaacatgattgaagaagccatttgagtgtttatcccagtaaagtcttcagttgactttagacctagccaccatctggtccaactgcatgagagacacaagggagaatggcccagctgagcccagtcaacccacagaactgtccaagctaacaatacattgttgtttctcagcccctagggcttgagtg

SEQ ID NO: 723405 - DNA, 631 bp, Homo sapiens
tatatattaattcatccgctcttcatcagtatcccatagtaggtattattattggaaatatttccattttacagagtagaatatagagcatatcaaggttaaataacttgttcaaagtcacatggcttggtggggggcggaacagtgagtttccataccctgtgtytttaatttactcactgtactcttaaatgcctggtaaattatcatttgaggaaagggttcgactttttctttttttagaaaatgattctaaaagccactgaactaggtgatccctaatgattctactttagactttgatgaccccaaaaataaagataaaccaacagaaacacagtattggtgggtgattaggcaagcaggttctggagtcagatggagactcaatcttggaggagggagagagagagagagatcacatggagaagcacagagaaggcaaacatgattgaagaagccatttgagtgtttatcccagtaaagtcttcagttgactttagacctagccaccatctggtccaactgcatgagagacacaagggagaatggcccagctgagcccagtcaacccacagaactgtccaagctaacaatacattgttgtttctcagcccctagggcttgagtg

SEQ ID NO: 723406 - DNA, 1912 bp, Homo sapiens
catttttttttaatctcacagtttagagagaagtccaggcaggctcagttgggttttctgctcatgtgaatgccaaaatgaaggtgctggctaatctgagctcttatatggaggcttttgcggggactctgcttccaagcttgttcaggctgccagcagaatttagtttcttgccactgtgggatggaaacccccatttctttgctggctggcagtggggccaccctctgctcccagaggctgcctgcaattcttcctcatgtggtccccttatcttcaaagtcagcaaaggcatgtcaaatccttctcataccctgacctttctggcttcctcttaattcccctttcagccagagagagctctttgtttttaaggattcatgtgatacatcaggtctacattccctgtcgtaaggtcaactgtatcaaacaacaaaatcctaggaatgatatctcattatattcaaaggtcctggggattaggaaagggcatctttgtcaagctatcttccaattctgccacaacaatataaagaatttcagggccaggcacaatggatcgtgcctataatcccagcactttgggaggctgaggtgggaggataatttgagcccaggagttcaagaccagcttagccaaaatagcaagaccttgtctctaaagaaaaagaaaaatcatttttaaagaagtttttaaaaaacaaatttttgggccgcgtgcggtggctcatgcctgtaatcccagcactttgggaggccaaggtgggcagatcacctgaagtcaggtgttcgagatcagcctggccaacatggcgaaaccccatctctactaaaaaaaaaaatacaaaaattagctaggcatggtggctcatgcctgtagtcccagttacttgggaggctgaggtaggagaattgcttgaacccaggagatggaggttgcagtgagctgagatcctgccactgcactccagcctgggcaacagagtgagactccggctcaaaacaaaaatttcaagtgagtttagaatataatattttgatggcactttcctagtgggatatgttcttaggacaaaaagaatctcaaaaaaaaaacaaaactcaatctcactcagttctcttatgtcagtggtactctggtattgttgtctgaaacaattaagatacatagaaaaaggccgggcgtggtggctcatgcctgtaatcccagcactttgggaggccgaggcaggcggatcttgaggtcaggagatcgagaccatcctggctaacacagtgaaaccccgtctctactaaaaatacaaaaaaaaattagccgggtgtggtggcgggcacctgtagtctcagctactccggaggctgagccaggagaatggcgtgaacccaggcagcggagcttgcagtgagccgagatcgtgcaactgcactccagcctgggagaaagagcgagactccgtctcaaaaaaagaaaaaaatacacacacacatagaaaaaagcaaataagtaattacctttatgttgtgggacctgtgatttttcgcaaggaaaaaaatataaaagtgtataggtaagtaaaaacctacctgcaaagaataatttgcgtttgccaaccctaaccactcaaaaggcaagaagaaatgagaacacagaaggagtgagcactcctgtagcaatgaacactgctagcaagcagacgtagtcttaaaataccacttctcattaagaggaactaaggctccttgcagaaatggcttattccaggtctgaactttatatgcttttttttwaaaaaaaaaaacaaaacatataaaatgaatctggaatatctttgtgtaccagaaaagagatttcaaagaccaatggggtcattttgaaaagatacaagagctgatctgaagggacaatttgaac

SEQ ID NO: 723407 - DNA, 1912 bp, Homo sapiens
catttttttttaatctcacagtttagagagaagtccaggcaggctcagttgggttttctgctcatgtgaatgccaaaatgaaggtgctggctaatctgagctcttatatggaggcttttgcggggactctgcttccaagcttgttcaggctgccagcagaatttagtttcttgccactgtgggatggaaacccccatttctttgctggctggcagtggggccaccctctgctcccagaggctgcctgcaattcttcctcatgtggtccccttatcttcaaagtcagcaaaggcatgtcaaatccttctcataccctgacctttctggcttcctcttaattcccctttcagccagagagagctctttgtttttaaggattcatgtgatacatcaggtctacattccctgtcgtaaggtcaactgtatcaaacaacaaaatcctaggaatgatatctcattatattcaaaggtcctggggattaggaaagggcatctttgtcaagctatcttccaattctgccacaacaatataaagaatttcagggccaggcacaatggatcgtgcctataatcccagcactttgggaggctgaggtgggaggataatttgagcccaggagttcaagaccagcttagccaaaatagcaagaccttgtctctaaagaaaaagaaaaatcatttttaaagaagtttttaaaaaacaaatttttgggccgcgtgcggtggctcatgcctgtaatcccagcactttgggaggccaaggtgggcagatcacctgaagtcaggtgttcgagatcagcctggccaacatggcgaaaccccatctctactaaaaaaaaaaatacaaaaattagctaggcatggtggctcatgcctgtagtcccagttacttgggaggctgaggtaggagaattgcttgaacccaggagatggaggttgcagtgagctgagatcctgccactgcactccagcctgggcaacagagtgagactccggctcaaaacaaaaatttcaagtgagtttagaatataatattttgatggcactttcctagtgggatatgttcttaggacaaaaagaatctcaaaaaaaaaacaaaactcaatctcactcagttctcttatgtcagtggtactctggtattgttgtctgaaacaattaagatacatagaaaaaggccgggcgtggtggctcatgcctgtaatcccagcactttgggaggccgaggcaggcggatcttgaggtcaggagatcgagaccatcctggctaacacagtgaaaccccgtctctactaaaaatacaaaaaaaaattagccgggtgtggtggcgggcacctgtagtctcagctactccggaggctgagccaggagaatggcgtgaacccaggcagcggagcttgcagtgagccgagatcgtgcaactgcactccagcctgggagaaagagcgagactccgtctcaaaaaaagaaaaaaatacacacacacatagaaaaaagcaaataagtaattacctttatgttgtgggacctgtgatttttcgcaaggaaaaaaatataaaagtgtataggtaagtaaaaacctacctgcaaagaataatttgcgtttgccaaccctaaccactcaaaaggcaagaagaaatgagaacacagaaggagtgagcactcctgtagcaatgaacactgctagcaagcagacgtagtcttaaaataccacttctcattaagaggaactaaggctccttgcagaaatggcttattccaggtctgaactttatatgcttttttttawaaaaaaaaaacaaaacatataaaatgaatctggaatatctttgtgtaccagaaaagagatttcaaagaccaatggggtcattttgaaaagatacaagagctgatctgaagggacaatttgaac

SEQ ID NO: 723408 - DNA, 1912 bp, Homo sapiens
catttttttttaatctcacagtttagagagaagtccaggcaggctcagttgggttttctgctcatgtgaatgccaaaatgaaggtgctggctaatctgagctcttatatggaggcttttgcggggactctgcttccaagcttgttcaggctgccagcagaatttagtttcttgccactgtgggatggaaacccccatttctttgctggctggcagtggggccaccctctgctcccagaggctgcctgcaattcttcctcatgtggtccccttatcttcaaagtcagcaaaggcatgtcaaatccttctcataccctgacctttctggcttcctcttaattcccctttcagccagagagagctctttgtttttaaggattcatgtgatacatcaggtctacattccctgtcgtaaggtcaactgtatcaaacaacaaaatcctaggaatgatatctcattatattcaaaggtcctggggattaggaaagggcatctttgtcaagctatcttccaattctgccacaacaatataaagaatttcagggccaggcacaatggatcgtgcctataatcccagcactttgggaggctgaggtgggaggataatttgagcccaggagttcaagaccagcttagccaaaatagcaagaccttgtctctaaagaaaaagaaaaatcatttttaaagaagtttttaaaaaacaaatttttgggccgcgtgcggtggctcatgcctgtaatcccagcactttgggaggccaaggtgggcagatcacctgaagtcaggtgttcgagatcagcctggccaacatggcgaaaccccatctctactaaaaaaaaaaatacaaaaattagctaggcatggtggctcatgcctgtagtcccagttacttgggaggctgaggtaggagaattgcttgaacccaggagatggaggttgcagtgagctgagatcctgccactgcactccagcctgggcaacagagtgagactccggctcaaaacaaaaatttcaagtgagtttagaatataatattttgatggcactttcctagtgggatatgttcttaggacaaaaagaatctcaaaaaaaaaacaaaactcaatctcactcagttctcttatgtcagtggtactctggtattgttgtctgaaacaattaagatacatagaaaaaggccgggcgtggtggctcatgcctgtaatcccagcactttgggaggccgaggcaggcggatcttgaggtcaggagatcgagaccatcctggctaacacagtgaaaccccgtctctactaaaaatacaaaaaaaaattagccgggtgtggtggcgggcacctgtagtctcagctactccggaggctgagccaggagaatggcgtgaacccaggcagcggagcttgcagtgagccgagatcgtgcaactgcactccagcctgggagaaagagcgagactccgtctcaaaaaaagaaaaaaatacacacacacatagaaaaaagcaaataagtaattacctttatgttgtgggacctgtgatttttcgcaaggaaaaaaatataaaagtgtataggtaagtaaaaacctacctgcaaagaataatttgcgtttgccaaccctaaccactcaaaaggcaagaagaaatgagaacacagaaggagtgagcactcctgtagcaatgaacactgctagcaagcagacgtagtcttaaaataccacttctcattaagaggaactaaggctccttgcagaaatggcttattccaggtctgaactttatatgcttttttttaawaaaaaaaaacaaaacatataaaatgaatctggaatatctttgtgtaccagaaaagagatttcaaagaccaatggggtcattttgaaaagatacaagagctgatctgaagggacaatttgaac

SEQ ID NO: 723409 - DNA, 1912 bp, Homo sapiens
catttttttttaatctcacagtttagagagaagtccaggcaggctcagttgggttttctgctcatgtgaatgccaaaatgaaggtgctggctaatctgagctcttatatggaggcttttgcggggactctgcttccaagcttgttcaggctgccagcagaatttagtttcttgccactgtgggatggaaacccccatttctttgctggctggcagtggggccaccctctgctcccagaggctgcctgcaattcttcctcatgtggtccccttatcttcaaagtcagcaaaggcatgtcaaatccttctcataccctgacctttctggcttcctcttaattcccctttcagccagagagagctctttgtttttaaggattcatgtgatacatcaggtctacattccctgtcgtaaggtcaactgtatcaaacaacaaaatcctaggaatgatatctcattatattcaaaggtcctggggattaggaaagggcatctttgtcaagctatcttccaattctgccacaacaatataaagaatttcagggccaggcacaatggatcgtgcctataatcccagcactttgggaggctgaggtgggaggataatttgagcccaggagttcaagaccagcttagccaaaatagcaagaccttgtctctaaagaaaaagaaaaatcatttttaaagaagtttttaaaaaacaaatttttgggccgcgtgcggtggctcatgcctgtaatcccagcactttgggaggccaaggtgggcagatcacctgaagtcaggtgttcgagatcagcctggccaacatggcgaaaccccatctctactaaaaaaaaaaatacaaaaattagctaggcatggtggctcatgcctgtagtcccagttacttgggaggctgaggtaggagaattgcttgaacccaggagatggaggttgcagtgagctgagatcctgccactgcactccagcctgggcaacagagtgagactccggctcaaaacaaaaatttcaagtgagtttagaatataatattttgatggcactttcctagtgggatatgttcttaggacaaaaagaatctcaaaaaaaaaacaaaactcaatctcactcagttctcttatgtcagtggtactctggtattgttgtctgaaacaattaagatacatagaaaaaggccgggcgtggtggctcatgcctgtaatcccagcactttgggaggccgaggcaggcggatcttgaggtcaggagatcgagaccatcctggctaacacagtgaaaccccgtctctactaaaaatacaaaaaaaaattagccgggtgtggtggcgggcacctgtagtctcagctactccggaggctgagccaggagaatggcgtgaacccaggcagcggagcttgcagtgagccgagatcgtgcaactgcactccagcctgggagaaagagcgagactccgtctcaaaaaaagaaaaaaatacacacacacatagaaaaaagcaaataagtaattacctttatgttgtgggacctgtgatttttcgcaaggaaaaaaatataaaagtgtataggtaagtaaaaacctacctgcaaagaataatttgcgtttgccaaccctaaccactcaaaaggcaagaagaaatgagaacacagaaggagtgagcactcctgtagcaatgaacactgctagcaagcagacgtagtcttaaaataccacttctcattaagaggaactaaggctccttgcagaaatggcttattccaggtctgaactttatatgcttttttttaaaaaaaaaaaamaaaacatataaaatgaatctggaatatctttgtgtaccagaaaagagatttcaaagaccaatggggtcattttgaaaagatacaagagctgatctgaagggacaatttgaac

SEQ ID NO: 723410 - DNA, 1912 bp, Homo sapiens
catttttttttaatctcacagtttagagagaagtccaggcaggctcagttgggttttctgctcatgtgaatgccaaaatgaaggtgctggctaatctgagctcttatatggaggcttttgcggggactctgcttccaagcttgttcaggctgccagcagaatttagtttcttgccactgtgggatggaaacccccatttctttgctggctggcagtggggccaccctctgctcccagaggctgcctgcaattcttcctcatgtggtccccttatcttcaaagtcagcaaaggcatgtcaaatccttctcataccctgacctttctggcttcctcttaattcccctttcagccagagagagctctttgtttttaaggattcatgtgatacatcaggtctacattccctgtcgtaaggtcaactgtatcaaacaacaaaatcctaggaatgatatctcattatattcaaaggtcctggggattaggaaagggcatctttgtcaagctatcttccaattctgccacaacaatataaagaatttcagggccaggcacaatggatcgtgcctataatcccagcactttgggaggctgaggtgggaggataatttgagcccaggagttcaagaccagcttagccaaaatagcaagaccttgtctctaaagaaaaagaaaaatcatttttaaagaagtttttaaaaaacaaatttttgggccgcgtgcggtggctcatgcctgtaatcccagcactttgggaggccaaggtgggcagatcacctgaagtcaggtgttcgagatcagcctggccaacatggcgaaaccccatctctactaaaaaaaaaaatacaaaaattagctaggcatggtggctcatgcctgtagtcccagttacttgggaggctgaggtaggagaattgcttgaacccaggagatggaggttgcagtgagctgagatcctgccactgcactccagcctgggcaacagagtgagactccggctcaaaacaaaaatttcaagtgagtttagaatataatattttgatggcactttcctagtgggatatgttcttaggacaaaaagaatctcaaaaaaaaaacaaaactcaatctcactcagttctcttatgtcagtggtactctggtattgttgtctgaaacaattaagatacatagaaaaaggccgggcgtggtggctcatgcctgtaatcccagcactttgggaggccgaggcaggcggatcttgaggtcaggagatcgagaccatcctggctaacacagtgaaaccccgtctctactaaaaatacaaaaaaaaattagccgggtgtggtggcgggcacctgtagtctcagctactccggaggctgagccaggagaatggcgtgaacccaggcagcggagcttgcagtgagccgagatcgtgcaactgcactccagcctgggagaaagagcgagactccgtctcaaaaaaagaaaaaaatacacacacacatagaaaaaagcaaataagtaattacctttatgttgtgggacctgtgatttttcgcaaggaaaaaaatataaaagtgtataggtaagtaaaaacctacctgcaaagaataatttgcgtttgccaaccctaaccactcaaaaggcaagaagaaatgagaacacagaaggagtgagcactcctgtagcaatgaacactgctagcaagcagacgtagtcttaaaataccacttctcattaagaggaactaaggctccttgcagaaatggcttattccaggtctgaactttatatgcttttttttaaaaaaaaaaaacaaaacatataaaatgaatctggaatatctttgtgtaccagaaaagagayttcaaagaccaatggggtcattttgaaaagatacaagagctgatctgaagggacaatttgaac

SEQ ID NO: 723411 - DNA, 626 bp, Homo sapiens
aattccagctcttttaaattgtctctattattaaaaaacaaatgcaggaagagaaagagaaacatcctgtatatagttgctgagggaggcgaaaccgcagtggggtcacagctcatgggaccggggtgaggcgtctccccaccctgcgtctaggtagaggcgcgttttgggggcccagtgcccccctctgtcacctcttctccatcttttcttcctggaggaggctcagaacccctttggaattgtagaggcctaaagatgaggagagggccgggcgcggtggctcatgcctttaatctcagcactttgagaggccgaggtggatggatcatgaggtcatgagatcgagaccagcctggctaacatggtgaaaccccgtcactactaaaaatacaaaaaaattagccgggcgtggtggcgggcacctgtagtcccagctactcgggaggctgatgcaggagaatcgcttgaacccaggaggtggaggttgcagtgagccgagattgcgccactgcactccagcctgagtgacagagcaagactctgtctcaaaaaaaaaaaaaaaaaaaaaaaaaaaaaaaaaaaaagatgasagtgggcccctcaagcatttttgagtctttttg

SEQ ID NO: 723412 - DNA, 518 bp, Homo sapiens
ggcatgctgcccagtctggggtcagacgtgggctcagagccttcaggagggagcagcgagttccctgtgggggccacatgagctgggcgggcccgaatcttgcttctcctcagttcagcgagagcaaggtgtggggacatgctagatagggcaatgctgagatttttagtgtgggttgaaggggatgtttccagaaacgggctctctgaaggctgggattgggtagtgacctgctcactctccgtcctgcaccccctctcatacacgtgtggactcacggcctggccctgctccttgcccgcctgagatgggtggtccagagggggtctcagacatgggtcacacaggcacacaaagtcctctttggggctggagagcttggaagatttggcattcgggctcaaggatctcagctggggagctgaggtctgaagggtgaaggaaacatgggccagggagagagtgtcagacagygggagcaggtgccaaggctcagggcaggtggcagcaaggcttca

SEQ ID NO: 723413 - DNA, 2168 bp, Homo sapiens
gtgtggtggctcatgcctgtaatcccaacactttgggaggccaaggagggaggattgcttgagaccaggagttcaagagcagtctaatcaacacagatcccatctctctctctctttacacacacacacacgcacacacacacaattagccaggcatggtggcacacacctgtagtcctagctacttgggagactgagatgggaggatcgcttgaactagaagttggaggctgcagtgagctatgatctcatcattgcactccagcctcggtgacagtaagactttgcctcaaaaaaagaaagacattatttcacatttcattacacatgtacacatgtactttcaaggcagtgtgccaaatactgtaatcaaggtatgaaatgttaggaagatataggaaattcctggaaagtttcagaaacaagatgacttttgcactgagacgaatatgaattgatttggaggaagatgtgggaaaggcattccaagcaaatgtaacagcatgagcaaaggcaagagatacaaaaaaacctggtatgctgggggactgaaagtagttctatttgctcaggatagtgtggacatggggacgcggtggggaacacataacaaatatttctttaatgaataaatgaatgaattcacttggtagtagacaaagaacagtgggcaaatgggccactcatggatggttttgtaagctccgttacaggaacaacaggagtatcgctatatttcacaagataactttggtgatagagtgcaaaagagatcagaaatctgaaggccagtgagaagatcggagagaaagcaatttcactccgacagcacactcacatttttagagctggatgagcccctgtagatcacctggtcaatctttctcatttgcaaatgtggcccacaggaattaggcgacttgctcaaggtcacttggtagttagtagcagaaacaggttcgttgactccaagttcatgactttgataagggttttgcagcaatgctgtagtgtgtgcaataaagacccatttcagttatttatgtggcctcaggctggccctgggagagagtgcagaaataaccccgcaccgcacatctccaaagacatcgtatgtggtgctctggagcctggggccctgagtcacaaagcttctctctgtggcttctgcactgagggttggctgtccttcaggaaactgcacgtcttctcctgctcacaaggtggcgaactgtgtccagttgttcccagattcctcagtatacgttgaaaggaaagaaatgactgttttatgggtaatttgttttatttggtgactggaagccactgctgaggcagagtgcgtaggctgtgttcttttgctctgcgctcagctttctgggagagcctttgtttttcctgtaggagaagtggctgaagttgagcagtttaggtgttcaaatacaacgttgcttcatcatgtgtggagagagaaacctttctttccacgtggaaacttgaaagcatatagtcttttctttcaacatccagttctttttgatgaatgcttggctaaggggaaaaaaaccaacatattctttctctgtctctgtttctctcttcctttcccgttccctacctccccaaatttggataaaagtcacctatatatataaagctctgtgtgataaattttacttgtaagttacagtgagaaaaatagtaagttgatttttcttcccccactcccttccctaaaaggagaggtagaaaatatgcatttaatatgtagacagcttttggctttgaatcctggttctaccattttctgcttgtatgaatttagtcaattttgtccttctgagattcagcttcttcatacgttaaatgcaatataatatctattttaaagagctctgtgtaaagcaatcgaaattaaaaaaaggtaaattacttaatacagtaaccaggtaatagtaggcttggtaactggtagtcattatttcaagaggcacaggaggacttaggtttcccattttgcttggcccaaagaaactcagaacccayttttatgtctagataccacagtttgctggcagattaggcattcataaaagaaaaaaaaacacagttatattgttcctcatggttttcaaatttgctttctttatttaatttctatacatata

SEQ ID NO: 723414 - DNA, 1517 bp, Homo sapiens
tacaaagagcaatttagtccccgggaaccatggcttttcaagtgtctgtttacatctgcataattaargggcccacatacatgcatttttcagaaaaaaataaggagcttcaagacatattttatgcaaggcaggaaaatgcttgcctcctggaaatgcagattttcagattctgctatttgccccaagatactgaatgaaaaacaagcccacatttcataatttattctgaagtaaaatagagctgagcctctggtttcagttatttatcagcactctgtattaacaagcattgctgtgttagaatagaatatggtgataaatttatgttagaatgtggtgatgaattgatattcataatgacaaccttagatactgttctctacataatcaagggaatgttctgttgtgttacagccccatgtgtatctgattttcttatttgaaaattttttggccgggcatggtggctcaagcctgtaatctcagcactttgggaggctgaggtgggcggatcatgagatcaggagatcgagaccatcccggctaacacggtgaaaccccgtctctactaaaaatacaaaaagttagccaggcgtggtggcaggcgcctgtagtcccagctactggggaggctgaggcaggagaatggcgtgaacccaggaggcagagcttgcagtgagctgagatcatcacgccactgcccctccagcctgggcgacagagcgagactccgtctcaaaagaaaaaaaaaaaaaaattctttcctgcatgatgtgctaggctgaataacattcaccaaagatatttatgtcctagtctttggaacctgggaatattcccttatacggccagagagactttgcagatgtaattaatcaaggattttgagatggggagattattctgaattatgcgggtgggccctgaatgtaatcactggactctgcatgagagggaggcaggggagatttgactacagagacataaggcaatgtgaggatggaaacagggtgctacagaggtggcttcgaagatggaggaagggactacaaaccaaggaatgcaaagactgcagctttggaagctggaaaaggcaaaccataattctctcctagagcctccagaggtgaaaagtctggctgacactttgattttggcccagtgaactgtaagagaaatgtgtgctgttttaagccaaaaactttgtggtaatttgttaaagtagcaatagaaaactaatagtatgcttacgtgtatctgagtgctttcttcttctttgaaaaatctttcttgcatgggtaactcttcatcaagttggatatttgattagcctaagcattctgtttccaggctggaagagcattcactctagcaattattaggtatgatctacccatttgtgatctctatgtcaatgtctccttctgcaaagccataattcaggttcattgtgtctaggccccaattcaattcaattagtctattacagaaaatttgctttctccagtggccag

SEQ ID NO: 723415 - DNA, 601 bp, Homo sapiens
caatgagttcggcttgctgagaggtmgtggagaggggcagaaagtatatgagtcaggtgtgaggaagaaaatagattttggaagttatgagaactgtagagagtgagttgagcacagtttgtgattttgagggcctctaaaagtattaaggcagtgggagccgccgcatgcagacatgagggctaggctaaaacagtaatctcaagttttttggataaaaaggccacagggcgtggtcccagtccttgggtaagaatttcgaccacacagtattgactgcttctagcctactgagtcataaatttaaaagtttatgtaaatgtctaatgttcttcttaaaataataataagccttaaaaataatattatttttccatggcagttgttagattagtactacttataacttaaattttaacaggctattagggcagaatttctacataaaaatttgaattcaaacatcttaaaattaatgtaagtccttctttcccactctcctttccacagtcatgcctttgcaccttcttaacctccttcctttcttccttccttattaagcacctttgatgccacaggtgctgtagaacaaaaatagagt

SEQ ID NO: 723416 - DNA, 601 bp, Homo sapiens
caatgagttcggcttgctgagaggtagtggagaggggcagaaagtatatgagtcaggtgtgaggaagaaaatagattttggaagttatgagaactgtagagagtgagttgagcacagtttgtgattttgagggcctctaaaagtattaaggcagtgggagccgccgcatgcagacatgagggctaggctaaaacagtaatctcaagttttttggataaaaaggccacagggcgtggtcccagtccttgggtaagaatttcgaccacacagtattgactgcttctagcctactgagtcataaatttaaaagtttatgtaaatgtctaatgttcttcttaaaataataataagccttaaaaataatattmtttttccatggcagttgttagattagtactacttataacttaaattttaacaggctattagggcagaatttctacataaaaatttgaattcaaacatcttaaaattaatgtaagtccttctttcccactctcctttccacagtcatgcctttgcaccttcttaacctccttcctttcttccttccttattaagcacctttgatgccacaggtgctgtagaacaaaaatagagt

SEQ ID NO: 723417 - DNA, 2010 bp, Homo sapiens
atagttatcaactcctattgatatgtgagtgtgtatactcccgcaggagagaataaactttgaatgcaaccataacttattacccctttgttccagtgtcacttctgatagcaaacaatgccaaaacagtaacaaattgccattgtattttccattagtcatcagagtataaaagatttgataaatagcgagaaaacacattggctctttcgggtgggaaatccgtgttattgacagtagcaaattacatgtctttgaaaaagatggtgtcacggttcttagagattatttgcattgctactgagacataagaaaacctcaaggagcttttaaaggccgtgtctgtgagatgaatggtctggtgtcctcacccagccccccttgttccagcattcgtgtgacactgccgggcagctgccttggcatgagccttctctgtccaagaacagactgccaggcctgaacacggagaggaggaacagcctctggggtattccctgactttggggaggcacgatgaccaggctggggcctgtgctttgggggaaagcacacaaggagatcgagggtgttttttctgtgtcctctgctcctgtccttgccattgcctctgcgcagctgcctcctgttctttcactccggtgacagcccgggcagatgcctccctccagagccgctgccagccctactccatggacagctgtcgccacggccccaggagagcagcgtgaccaccggcaccagccatgaggagggcacatctgcagagaatcccctacccctggctgcgggcctgagggctcagcgccctactgtacaggacgttcccagctggcgccacttaacacgagcctcttcttcacttggtttttcacctctgagatgttccgctctgctgcaagcaatagggtgtttcacagatccatacttgtctttacaatttccaggcttaggaaatatttttaaattttattgatgacctttccaaagtttaaatgagttagcccttggatgttaagaggaaatagtattttaaagacaaagtaaaagaatgccaaatctatgaggacattatgctaagtgaaataagccagtcacaaaatgacaagtattgctgattccacctatataaggtcctagattagtcaaactcgtagagactgagagtagaaaggggatgccagggactgcagagtggggctagggaagtggggagttaggatttaacgtgtacagagttccagttcgggaggatgraaagacttccggaggttaggcacaggggctcatgcctataatctccacactttcagagaccaaggaaggagaactgcttgaggccaggagtttgaaaccagactgggcaacatagtgagatcccatctctacaaaaaatttaaaaaattaaacagtgtggggacgtgagcctgtagccccagctactcaggaggctgaggtgagaggattgtttgaacccaggaggttgaggccacagtgagctgtaatcacaccactccactccagtctgggtaacagagcgacaccctatctcaaataaataaataaatctttttaaaaataaaagaattggatatgatgttaaattttatgttatgtgtatattgccacaatttaaaattttttaaagaataccaaatcaagaagtgctaaagttcatggaattacctatatcagaggtggtgggagtcaggagtatggaaaagaacccttcaaatgaaaaggttcatgattatcgaaaacagcttgtcctgtttttaccaactggaaactttctctaggaaagcagctattcctaatggcatttctaaaattatgcaaacacaaaaccaaaaagaaggcaggcacccagtaaagttatctaagactttggtgggaaaataaataaataaacctgccgcctcacggttgtttctcctcacctacaaggctttgatttctgagatggggcctgaagcaggaattcctcacacaatggatgctcaatttgtc

SEQ ID NO: 723418 - DNA, 794 bp, Homo sapiens
aagtggaggctgccacgcatttgcagagcttttaagtcccttcccccaccccatgtgcattttaggaaccttttggaaagaaatgtgttgctaggagcttgggctttccctctcctttagaaagagagaactgtttttgctttgaattgccttgcaaacagattgaggtgtctccctacccattctttcttttgttaaaccaacccgatttgccacgggtagttaagtggagatcatgttgaaaaagagtgcttagcacagggtcactacgcagagtggctcccattcccatccttggcagagcatctcacccttaatttcattattaatctggagggagaggaatcgtgcaagtcarttgaaagcagatgccacctaggaattttaggtccatcacgtcatcaaacaaaatgagagtagtttgtaaattggaaagtttggcagtgggtggttgccctttggaagattcactgtttcagaccagctttctgagtctgggaggagtccctggtgctacagtgggaagaatacccacctgagggccaccgacatgtggtctggcttcagctttgataccaactagccatggcacttggggcaagctatttcctcagactgggcatcattttctccatctgtacaatgaaggaatggtgtaggggcatccaaagggctcctccagctctggcatttctgaattctccagtagcaagttaaactctaagttacttaaaatatttgaaaaggataagtaataatttgttctttttgaaattaccagagacttgaaagca

SEQ ID NO: 723419 - DNA, 594 bp, Homo sapiens
ggattttaattctctgccctgagagaggaaataaaaagatgaatgcacttggtccaaatttaaccagcttttccagccctgcagattccccacaccaagagtgaccttaaagccaaagacaagaaagatgaaactcatcagggtttcattcacttcttaacacatttctatccttcatttttgaggatgttcagagcttgagcccctgagacaggactaactctgaaggaaggagaaaaaaagtgatttgataattaaagctcatggtatatcacatcctgtgtctactcctcttggattatttacacaaatggaacattattaaaataatcaagtcaaactttgagagcaaatactgggtaggtatcataaaagcacatattaggccaagcacagtggctcatacatgtaaycccagcactttgggaggccaaggtgagagaatcacttatagcctatgaggtgtagagaggtgtggtggggtgtgtgtgtgtgtatgtgtatgtgtgtgtgtggtcataaagaagaagactgttactgcattattaacaagtatgtgggtctagtgtctcaattcctttgcccaacactcat

SEQ ID NO: 723420 - DNA, 643 bp, Homo sapiens
ctggggaaaatatgacaaattgaaatacatggcagagcctgaaataaaaatacaaagagaaagaaacatgtttgttaagctgaggcattagactgaataattctaattttatcaccaaaaattattctatatggaaaaaaaggataaggaaatacagttttttaatgaaaaataaaagtagaagaaaatggagtagaagtaaaataaatcaatagatagaatcaatayatagcaagtatagatttgacatggaacattcactggctctgggatcttagtgcctatgagtgtatggaatggatctttcacttgtattacactggggcttatgaattactgctgatgatatcaaagagattcataaatggattttatcactacactgagtaattaaaactataattatcagttaccggctgctgcttacaaaacacttaccacatatatgtctaatacctgtgaaaatcacattcactgaacacacactgtgagcctgaaaaacgctgaaagcacactgggcacttgacgtgtggtagaaagtattcacctaatcctcagaacaccatgtgataggtgctataatcagccacattttatagagaaaactgaaactcaaaagactgattttcccacgcttgtacca

SEQ ID NO: 723421 - DNA, 1594 bp, Homo sapiens
aacagctataatgtcaaaatatatccccattctaatctctgctccccacctcccctgctagcctggagatcccctattcttcttttgaatccttctagtttggtctctgccaacagctcatgtaaaatctatgaaaaaatgaagctccgggttgggtgtggtggctcatgtctgtaatctcagaacttgttgttgtcgttgctgttgttttgagactgagtcttgttctgtcgcccaggctggagtgcagtggtgaaatctcggctcactacaacctccacctcccaggttcaagcaattttcctgcctcagcctcgtgagtagctgagactacaggcgcgtgccaccacgcccagctaattttttcttttttttgtatgtttagtagaagcgaggttttaccatgttggccaggctggtcttgaactactgacctcaagtgatctgcctgcctcggcctcccaaagtgctgggattacaggcgtgagccaccacacccggccaatcccagtactttggaaggctgaggtgggaggattgcttgagcccaggagatggaggctgcagtgagccatgattgtgccactgcactccagcctgggcaacagagcaaaaccctgtttccagaaaacaaacaagcccaaaaactcagcatgaaaagatgctcagctcattagccattggggaaattcaattaaaaccaaaagaagggccgagcacggtggctcatacctgtaatcccagcactttgggaggctgatgtgggtgagtcacctgaggccaggagttcaagactagcctggccaacttgatgaaaccccatctctactaaaaataaaaaaattagccgagtgtggtgatgcacgcctgtaatcccagctgctcgggaggctgaggcaggagaattgcttgaacctggaagacagagattgcagtgagccgaaattccaccactgcactccagcctgggtgaaagagcgagactccatctcaaaaaaaaaataaagatatgttgagatacacaaataccattgtgttacaattgtccacatcattcaaggcaataacatgtacgtgtttgtagcctaggagcaataggccataccatatagcctaggtgtgtagactcactccataacrtacccataataacgaaatgccataatgtaccaacaggagaacagatgaacaaattatagtatgtttatacaatgaaatactactcagcagccgggcacggtggctcacgcctgtaatcccagcactttggggggccgaggtgggcggatcacgaggtcaggagatcgagaccatcctggctaacacagtgaaaccctgtctctactaaaaatacaaaaattagccgggcatggtggcggggcgcttgtagtcccagctactcgggaggctgaggcaggagaatggcgtgaacccaggaggcggagcttgcagtgagccgagatcacgccactgcactccagcctgggcgacagagcaagactctgtctcaaaaagaaaaaaaaaccaaaaaactactattcagcatacaagaaatgaattactgacgcaagcagcaacgtcaataaatcttata

SEQ ID NO: 723422 - DNA, 627 bp, Homo sapiens
ctttgcatatatctgtctctaaaaaggtagctaattaatgtgttatggtaatttacagtatgcaaaaggactgccagtgcagatgtgatctgatcaatattgtgattattatcattattatcactgggttttcttgtttgtttttttgtttgttttgttttttgagacggagtcttcctctgtcacccaggctggagtgcagtggcacratatcagctcattgcaacctctgcctcccaggttcaagtgattcttgtgcctcagcctcctgagtagctgggactacagggacggggtttcactgtgttgttcaggctggtcttaactcctgacctcatgatccgctcgcctcagcctcccaaagtgctgggattacaggggtgagccaccgcgcccagcctattatcattgttatctcggttatagacataggaaaactgaggttcctgttgatattattgccaaaacaatgctcttgatctcattctatctttctctgaggttttaagcagaacctggttgtatgtgagccatttatattctatagcagatttttgcattggctgtgagttcaaaatagataaaaattttaagattgcttcaaagtcaagagattctatataatca

SEQ ID NO: 723423 - DNA, 941 bp, Homo sapiens
cagttcaagatcagtgtgggcaagatggtgagaccctatctcttaaaaaaaaaaagaaaaagaaaagaaaagaaagtaggaaggaaggaaagaaaggaaagaaaggaggaagaaaggaagaaaagaaagaaagagaaggaaagaaagaaagaaagagaaaggaaagaaagaaagaaagagagagagaaagaaagaaaggaaggyaagccaggtgtcatggcgctcatctctagtcccagctactctggaggctgaggtgggaggattcctcgagcccaggagtttgaggctgcagtgagttgtgatgatgccactgcactccagcctgggtgacagaatgagacctcctgtgtctaaaaaacacataaatacataaaactaacttaagctattttctattgcctgagcaacattagctcactgtagaaaacttaaaaaatgcccaggcgcagtggctcacacctgtaatcccagcactttgggaggccgaggcgggtggatcacctgaggtcaggagttcgagaccaacctgaccaacatggcaaaaccccatctctattaaaaatacaaaaattagccaggtgtggtggcgcatgtctgtaatcccagctagctgggaggctgaggcaggagaatggcttgaacctgggaggcagaggttgcagtgagccgagatagcgccactgcattccagcctgggtgacaaaagcaaaactgtctcaaaaaaaaaaaaaaaaaaagagagagagaagaaaacgtaaaaaataaagacaagcataaaagaaaaaattattaagctcatcggtgatcccccacccccagggcaactgctagtatcatggaagtgtttattccatttttcctgtgcccacttttttaaaagacagaaatagttacatcattaatgctataatattttaatttactaatatgacatgaac

SEQ ID NO: 723424 - DNA, 941 bp, Homo sapiens
cagttcaagatcagtgtgggcaagatggtgagaccctatctcttaaaaaaaaaaagaaaaagaaaagaaaagaaagtaggaaggaaggaaagaaaggaaagaaaggaggaagaaaggaagaaaagaaagaaagagaaggaaagaaagaaagaaagagaaaggaaagaaagaaagaaagagagagagaaagaaagaaaggaaggcaagccaggtgtcatggcgctcatctctagtcccagctactctggaggctgaggtgggaggattcctcgagcccaggagtttgaggctgcagtgagttgtgatgatgccactgcactccagcctgggtgacagaatgagacctcctgtgtctaaaaaacacataaatacataaaactaacttaagctattttctattgcctgagcaacattagctcactgtagaaaacttaaaaaatgcccaggcrcagtggctcacacctgtaatcccagcactttgggaggccgaggcgggtggatcacctgaggtcaggagttcgagaccaacctgaccaacatggcaaaaccccatctctattaaaaatacaaaaattagccaggtgtggtggcgcatgtctgtaatcccagctagctgggaggctgaggcaggagaatggcttgaacctgggaggcagaggttgcagtgagccgagatagcgccactgcattccagcctgggtgacaaaagcaaaactgtctcaaaaaaaaaaaaaaaaaaagagagagagaagaaaacgtaaaaaataaagacaagcataaaagaaaaaattattaagctcatcggtgatcccccacccccagggcaactgctagtatcatggaagtgtttattccatttttcctgtgcccacttttttaaaagacagaaatagttacatcattaatgctataatattttaatttactaatatgacatgaac

SEQ ID NO: 723425 - DNA, 579 bp, Homo sapiens
ccattaaaaaaaaaagaagaagaagaaagaaagaactgtttatggagcttgcaaaatcctcatcttcctacaggacacatacactatactccccacactcaaaccctgactcttccatggctggggctatcctgagtgacactatttttctcaacaatagaaaatagtttgattatagtccctatttcctgactccggaggagctcatccaactgacccaggtggcagcctcaggtgttggcgtcaccttctggtagacatctgctggacaccggagggagtcgcaagctggcaatctgaaggccacagtctacracattttggttagaggtactcagtgattttttaaaaatggaatctgaatgcctttaggcagtttttcctcagtccccaacacttcctatacggttgaaacccagcttgtgttttccatgtgtggctccctgggcaaccaaggtgcaactcctgctttgggccaaggggtcatttttctgcaaaggacaagaaaaataaacattttttgcttttgtgggccaagaggcaaaattgaggctattgtgtaggtacttatataactaa

SEQ ID NO: 723426 - DNA, 922 bp, Homo sapiens
ttgcctgatcatcattaaaaagtggkacataacagcaactatgttttcaggattaaatgagctaatagggataaatgcccagcatggcatgagacctccctaaattatttatttatttatttatttatttttgagacagagtttcactctttcacccaagctggagtgaagtggcatgatctcggctcactgcaacctctacctcccaggtttaggtgattcttctgcctcagcctcctgagtggctgggattacaggcacccaccaccacgcccagctaaatttttttgtgtgtttttagtagagattgggttttaccatgttggccaggctggtctcgaactcctgacctcaggtgatccacccgccttggcctcccaaagtgctgggattacaggctacaagcgtgagccatagcacctggcccaattctttttttttattttttatttttgagacagagtcttgctctttcacccaggccggagtgcagtggcactatcttggctcactgcaagctccgcctcccaggttcacgccattctcctgcctcagcctcccgagtagctggaactacaggcgcccgccaccacgcccggctaattttttgcatttttagtagagacggggtttcaccgtgttagccaggatggtctcgatctcctgacctcgtgatccgcccgcctcggcctcccaaagtgttgggattacaggcatgagccactgcgcctggccaattattctttattatgatcaagatcattatttccatttctgtctatatactgcaacctcaactcatagtgatgagaatccactcactacgtttttatcagcatggatagcatggacatattggaaatattaattttattcaggaagacagaaagacagtgcacaagaggagtttatgaaaatcaga

SEQ ID NO: 723427 - DNA, 922 bp, Homo sapiens
ttgcctgatcatcattaaaaagtgggacataacagcaactatgttttcaggattaaatgagctaatagggataaatgcccagcatggcatgagacctccctaaattatttatttatttatttatttatttttgagacagagtttcactctttcacccaagctggagtgaagtggcatgatctcggctcactgcaacctctacctcccaggtttaggtgattcttctgcctcagcctcctgagtggctgggattacaggcacccaccaccacgcccagctaaatttttttgtgtgtttttagtagagattgggttttaccatgttggccaggctggtctcgaactcctgacctcaggtgatccacccgccttggcctcccaaagtgctgggattacaggctacaagcgtgagccatagcacctggcccaattctttttttttattttttatttttgagacagagtcttgctctttcacccaggccggagtgcagtggcactatcttggctcactgcaagctccgcctcccaggttcacgccattctcctgcctcagcctcccgagtagctggaactacaggcgcccgccaccacgcccggctaattttttgcatttttagtagagacggggtttcaccgtgttagccaggatggtctygatctcctgacctcgtgatccgcccgcctcggcctcccaaagtgttgggattacaggcatgagccactgcgcctggccaattattctttattatgatcaagatcattatttccatttctgtctatatactgcaacctcaactcatagtgatgagaatccactcactacgtttttatcagcatggatagcatggacatattggaaatattaattttattcaggaagacagaaagacagtgcacaagaggagtttatgaaaatcaga

SEQ ID NO: 723428 - DNA, 922 bp, Homo sapiens
ttgcctgatcatcattaaaaagtgggacataacagcaactatgttttcaggattaaatgagctaatagggataaatgcccagcatggcatgagacctccctaaattatttatttatttatttatttatttttgagacagagtttcactctttcacccaagctggagtgaagtggcatgatctcggctcactgcaacctctacctcccaggtttaggtgattcttctgcctcagcctcctgagtggctgggattacaggcacccaccaccacgcccagctaaatttttttgtgtgtttttagtagagattgggttttaccatgttggccaggctggtctcgaactcctgacctcaggtgatccacccgccttggcctcccaaagtgctgggattacaggctacaagcgtgagccatagcacctggcccaattctttttttttattttttatttttgagacagagtcttgctctttcacccaggccggagtgcagtggcactatcttggctcactgcaagctccgcctcccaggttcacgccattctcctgcctcagcctcccgagtagctggaactacaggcgcccgccaccacgcccggctaattttttgcatttttagtagagacggggtttcaccgtgttagccaggatggtctcsatctcctgacctcgtgatccgcccgcctcggcctcccaaagtgttgggattacaggcatgagccactgcgcctggccaattattctttattatgatcaagatcattatttccatttctgtctatatactgcaacctcaactcatagtgatgagaatccactcactacgtttttatcagcatggatagcatggacatattggaaatattaattttattcaggaagacagaaagacagtgcacaagaggagtttatgaaaatcaga

SEQ ID NO: 723429 - DNA, 963 bp, Homo sapiens
catcagtagcctggccagtcttggcactctgttaaccaaacccagctctggattttaaccacaacccaaattttgtcacacacaaaagaattagaattcagggtcacacagctatttgtggaatgaatattagtatattctttacaaatgcatgatgtatgaactgcatatatttctttgataaattgtttttaaatatttcctcctttttattaatcaaagaggaacctcgtgtatcactgccattttttcctgtttttcacataaattattttcttgcaatgttcgtttgtattattattgccgatattaagyaaagactttttttgccttgtaaacaagattttgcttacagctaaatgaaagaagtgaagttaatcacattgaaataataggtttaaaaaggtaattcagtggtgtgggaatgaagtttaatcttcagcaatagaagccgtgctaagagaaatggcagaaaagcttgttctgtaattaaatggtatttatcacaggcaggtcagctctgctgggtgagaggctccaggacttcacagagaagaggaaggcaactagggcaggaaaaaagggcccagagtagagcccgcagattccaagagcgggctgggaggaagagctaggtgcagtgacacctcctggggtccagctgtctaaccttgcacatgtgtatctcagcccacagaaatgagtctggcaaaaatgccaagtgcatcctccacatccttccagaagggacccgatgtacagcttccctagtcagcattaaaccgcacgagcttagaatttacacagacctgggaccaaatcatacagctggtagccccactttcttcatctgtaaaatggagacagtaatgcaccaatctcctggagttgttatgacaacttgcaacacaagacgtaatgtgccatgtaccatgcctggcactgtagcaataatcaatgcta

SEQ ID NO: 723430 - DNA, 635 bp, Homo sapiens
tgcctcagccccccaagtagctgagattacaggtgtgtgccaccatgccctgctaattttttgtatttttagtagaaacaaggtttcaccatgttgcccaggctggtcttgagctcctgagctcaggcaatctgcccgcttcagcctcccaaagtgctgggattacaggtgtgagccaccgcgcccggcctggttcctgttttcgtaaggagattggaatgagatgcaaataaacagagaagtgattatatctaagaaatacaaacaagtctgtctgctgccctcactacatggacatagacccaccaggcaattccacctgctgcttcaactcatattattcccagtcatttaccttctggctggcaaccttctcctccttacctacttttaatgctcctacccccattctgttctctctgccttcttcgcaggggcaaaagataaattcctcccattttctcatggaaarctcttaatcatctcttctgttactaggggcctggtgctcctgcctccagtttgtggttcctcaaacacagttccttcttgtatcagttaaggattgcaacatagcaagcccaccccaaaacttaactgtcttaaaacagtactacttattagctcttgaatct

SEQ ID NO: 723431 - DNA, 664 bp, Homo sapiens
tatatattttattactgagtcatcttatccaagaacatgacacgttttcctattgttcaaatctttcatgtcctttggtaatattttaaacttttcttcatataaatctcgcacctttattyccaggtattttgtaaagaagtgtttaaatttcttcacaaattgaatctctgcctcttttttgttgctattgcaaatgggatatcttcttcctttgtgtcttctgattgactattgtttgcatacatgaaagcagttgatgtttattaattctttaccatgttattccgtggaattcatttattgttgtcagcagtctcgcaattgattctcttggtgttttcagttacataatcttttcccccaaatactgatagatttatttcctcttttccacatcaatgcctataagatgacctaataagaagagacctcagttccctaccctaatagtctatctggaaaaaagatgtctcaacaaattaaccataataaagatacaaagggcagagtcaagacaagaagcaaaggtatctggaatcccagtctaagttcatttgcagtgttctatgcagcctacgaggtgagggcctgcctgcctcacccttcattactgttgcttctcaaatagccagcttagagctgcttctcaaaacccaaccat

SEQ ID NO: 723432 - DNA, 2864 bp, Homo sapiens
agtgtgtacacacacagacacacacctgctttcatgtgcatatggcttgatatatccatccatccatccttccttccttttcttaagacagagtcttactctgtcgcgcaggctggagtgcagtgcactcatggttcattgactgcagtgcactcacgattcaccatagcctcaaccttctgggctcaagtgatcctctcacctcagcttctcaagaggaagggactccaggagtgcgccactatgcccaactaatttttaaaatttttttgtagagactaggtctcactatgttgccaaggctgctcacaaactcctggactcaagccatcctcctgccttggcaccccaaagtgctgggattataggcgtgagccactgagccgagcacatatctactatattttgaatacttaaagcaggcaggcaaaataagtactctctgattttcccagtttttaacaggacattttgactatgagtctaatctggcataattctgataagacttaacaacagttcagtaatgaacttcaagatgaaaattagagaaatactagcaatcaattatttttaaatcaagtgttagtgcttttctcattttgatgttgaacatctgaaaacagaaaaatgcttaccagttcatcatcattacagttttgagtgccagggtaaagaggtttttgttgaattggaactgtcctgcctactgctacggtattctttaaaacaaaaacaaaaacaaaaacaaaaacaaaaaaaccttaagtttctgtatactccccaaactaaatacagtaatgatatgtgactcgaccaatgcatgcccccactccacccctgcctgcaacgtacctgggcaaaggtactcaaaaatgttaactgttacagactttaaggagggtacttttgaaaaaaatgaaaagcctgtatgtgtctaagggaactcaaaaattattttaatgacctaatacattaaattagaaattcatatcaactttcccaagttccttaaaacagaagtttgtctttaatgagaaaataaaatcagtaaaacctgggcagctgagaatatgtatggtttctaatgagatcagaaatgcttcccataatatggtaaaaatktatcaatttaataatccaaatctaacacaatttcgcaggatataaagtagttctaaaacccaaaacagcaaaaacaaaagacaaagcaccaggaattaaaatttaatatatgcaaatccagttttctaattaacaaaggctgttactctgtaataccaatatcatctgtaaatggcaagtcaactaatccaaatgtaataaaatgctgcctcatttattattctaatccaaaatcaacgttaactataaaaaaatggaaaataaaaggagaaagagtgaaatctaccaaaatcaaagagtaacccctagaaattttgaaactgggtacgttactctaacttagaagtctcaaaatattctatatgaagtaccaaagtctaattggggccgaaaatgaaaagtatttcaaaaaaaccttctaggccttatcatactcaagatagaattgctgctcactatgaagcaatgactatggtgtcccctgctctctctgctatgctaataatctgcatattgtgaagccaactacagacttagaagtcacttctgatataaattaagaccaaatcaattattttttgtccaaattttattgctaaattgttttaaaccatcttttgtggtggcttaaaaccagcaaattctttatcacttgcttaatttaaaacagttagtacacactgggcatggtgcctcacgcctgtaatcccaacactttaggaggccgaggagggcagatcacgaggtcaagagatcgagaccaacctggccaacatggtgaaaacccgactctactaaaaatacaaaaaattagctggacgtagtggcacgtgcctgtaatcccagctactcgggaggctgaggcaggagaatcgcttgaacccgggaggcagaggttgcagtgagccaagatcgcaccactgcactccagcatggcgagagcgagattccatctcaaaaacagacaaacaaaaaacacatacagttactacaaaccaggtcttttagagagaagcacatgttagaaaaatatttcagaaatacagaaaagtgtcacaggctaattctgaagaaaccaggtattaaaatggatgcccacagatacctaagactgggaagagacatcttgtttctctgttcatttcataaactctctatgggccaaaattcagttctttgggaacttcctgagttaactctgcttcacacttcataacagatgtgtccagaagccagccattaatggtttccctgcctcctggatgagtggctcaacaatctcagaaaaacaaagacataaagatttggaaatgcagccaccactggggtcattagtctatagaaaacataaaaaagaatcaagcggcagcttgggggaaagaaaaacccattcttctaagtgcctacccacagcttaaaaagtcggtttaagacattaagatgaagcatctcactgcctggtaggtatttttttctgaaaaagtgagtatgcccataagggaacttagttgtaagaaacttgtaatttataaaaagcggtatttcagccacagagttggtgttgggtttacttatctattttgaatttaaaaggcttataaataaagcagtgacactgcttactgggaaatgctgtaccaaaaaatgttatcttgctgtaggcttggcaactaggagaaatctgtattttttttttgagacagggttccagttttttttttttgtttttttttttgaga

SEQ ID NO: 723433 - DNA, 641 bp, Homo sapiens
tagcatagtatgagggcatttaccatgtcctctagccagcctcctgatggcagtaggtctttcctgttttggaggatccgtgcctcatccatagtcagggaatagccctgtcacctgcaaaggtctggttgacactgaaactctaataataggctcctaacagtaaccttctttctccccacagtgtaatccagtgatgattgatgccatcaaagtttctgctgctcacagggcccgatacttctggggcaacctacccgggatgaacaggtaacaaagggctcttagtgggtcaggtaacagccaagttaaatatgtgataacaagctctgacattcaagccttcctagaaagacctggctctgctgagaaatagttatacttggatttcagaccacctgtggtcgtgcgggttgatctctgttaagatgttcagcaagtacctgggaatctctgtaggagtcccactcttacctgttgtaagctgctgatggacctgatcctaaaagtcccacgtggctgggtgyggtggctcacgcctgtaatcccagcactttgggaggccgaggctggaggatcgcttgagcccaggagttctagactagcctgggcaacaaagtgagaccccgtctctacaaaaa

SEQ ID NO: 723434 - DNA, 517 bp, Homo sapiens
cagtctcagttcaaatactccctcctccaggaagccttccctaacttcctaggtgaaagtggttcccttcccctgagtcacgattatggtttcttcagtgtacttattaatggccaacactgtctcctttattgtttgcttatgaatttaaagtctgttagcagcacctgcagcttttaaaagcctccttgtctctctctmtttttttttttttttttttttttgaggcggagtttcgctcttgttggccaggctggaacgcagtgatgcgatctcggctcagtgcaacctccacctcttgggttcaagtgattctcctgcctcagcctccttagtagctgagactacaggcatgtgccaccatgctggctaatttttgtatttttagtagagacagggtttcgtcatattggccaagctggtctcgaacccctgacctcaggtgatccacccatcttggcctcccagatgctgggattacaggcgtgagccactgcgcctggcctaattgtcattt

SEQ ID NO: 723435 - DNA, 517 bp, Homo sapiens
cagtctcagttcaaatactccctcctccaggaagccttccctaacttcctaggtgaaagtggttcccttcccctgagtcacgattatggtttcttcagtgtacttattaatggccaacactgtctcctttattgtttgcttatgaatttaaagtctgttagcagcacctgcagcttttaaaagcctccttgtctctctctctttttttttttttttttttttttgaggcggagtttcgctcttgttggccaggctggaaygcagtgatgcgatctcggctcagtgcaacctccacctcttgggttcaagtgattctcctgcctcagcctccttagtagctgagactacaggcatgtgccaccatgctggctaatttttgtatttttagtagagacagggtttcgtcatattggccaagctggtctcgaacccctgacctcaggtgatccacccatcttggcctcccagatgctgggattacaggcgtgagccactgcgcctggcctaattgtcattt

SEQ ID NO: 723436 - DNA, 625 bp, Homo sapiens
ttatccttgcaatggcaaggatatctcactccttcctcccaagcctcttcttagcacggctcactacctccttctcccaaacaccatccacaggcagctcttatatggcttcttttttatttaatatttattttaacttgattttacctgaatatgagtgtgtgtgcctgtgaacgtatgtccaagcatgtgtgacagtggttctcaaamttcagtgtgcatcagaatcacctggagaacttaacaaacacagtttcctggacccaacccccagatttcataattcagcaggtctgggtggagcctaacaatttgcacttctaacaagctcccagtgacgctgatgctgctgtccagggactatactttgtgaactactggcatatgggatgggggtaaagagtaacacctgccatttctagaatgtttttcaatttgtaaagactttcaatgcaatgtattttaattgaaccttctggctatcatgtaagataggtaagacaactattactgatctatctattttactctgaccggaaaactcaggctcagagcgattaaatgattgaccaagtactcacagctaggatttgcggaagctgaaaccaaaaatcagagctcctga

SEQ ID NO: 723437 - DNA, 625 bp, Homo sapiens
ttatccttgcaatggcaaggatatctcactccttcctcccaagcctcttcttagcacggctcactacctccttctcccaaacaccatccacaggcagctcttatatggcttcttttttatttaatatttattttaacttgattttacctgaatatgagtgtgtgtgcctgtgaacgtatgtccaagcatgtgtgacagtggttctcaaaattcagtgtgcatcagaatcacctggagaacttaacaaacacagtttcctggacccaacccccagatttcataattcagcaggtctgggtggagcctaacaatttgcacttctaacaagctcccagtgacgctgatgctgctgtccagggactatactttgtgaactactggcatatgggatgggggtaaagagtaacacctgccatttctagaatgtttttcaawttgtaaagactttcaatgcaatgtattttaattgaaccttctggctatcatgtaagataggtaagacaactattactgatctatctattttactctgaccggaaaactcaggctcagagcgattaaatgattgaccaagtactcacagctaggatttgcggaagctgaaaccaaaaatcagagctcctga

SEQ ID NO: 723438 - DNA, 641 bp, Homo sapiens
gccactgcactccagcctgggtgacagagtgagactctgtctcagaaaaaacaaacaaacaaacaaaaaaccccctgcttttggagtaatctctaaacagaacatcagaatcatctatttcagaaaaattggattcatcaaatgaatcttcggccaacaagcattcaagaacgacgttaacatcatgcgtaggaatgctatgttttctaagatttgacattttcagcaattgagaattactatattttgtaaatggaaataccactactaaaaacagaatgctataaagagaatgatgtcttttgtttttaaagtcgatatactagagtgatgtgaaaataataataaaagtgagatatgtcatggtaaagttatctcggggtaaatgctacacctgtgagagccactgtccagtattctcacggaaaaaaggaagagtttaaggagagtcgaaatcacatcattctgacctgaawaccagatgaggtaagagaaaaggtctgaggaaatgaaagccagagggccaggtgcagtggctcacgcctgtaatcccaacactttgggaggccgacgtgggcagatcatgaggtcaggagttcaagaccagcctggccaatatggtgaaaccctgtctctactaa

SEQ ID NO: 723439 - DNA, 597 bp, Homo sapiens
ggccagctctagcaggccccatctgcagaggcctgggcagggctgttctgaggtttggtaccccctggactggacttcttcaagccaagatgaaaggttgaaaggcatctctgggggtttgtggtgacaggagacaggcctacttttggcctagttaatccagatcgtagatttccatgtgctcaggctggctcattttgttcttgctagggcccaagctctaagaawaaacatgggtttgattttccagccattgtcctttgcacaaagagtgcccttacagaacattgtgactgataagatattggttaaggcccgggcacggtggctcacacctgtaatccccacactttgggaggctgaggcaggtggatcacctgaagtcaggagttccagaacagcctggcccagcatggtgaaactccatctctactaaaaatacaaaaatattagccaagtgtggtggtgggcagctgtaatcccagctacttgggaggctgaggcaggggaattgcttgaacctgggatgcggaggttgcagtgagttgagattgtgccattgcactccagcctgggcaacaagaacaaaactccgtc

SEQ ID NO: 723440 - DNA, 637 bp, Homo sapiens
gaggtgcatctattgatattaaccgtattagacgttaaaactcagacacttaaacatatttattaactcatttaaaaaaacaataatcctattacatgttaacaccagtaacttttttgtttttgacactttatgtctactataagctttcagatgacaattatacgttctccattagatttgcttttatttcatttttattgtagtaaaatatatataacagaaagtttaccattttaaccttcttctttttttttttttttttttttgagacacagccttgctctgttgcccaagctggagtgggcaacaacccatccaccttggcctcccaaagtgctgggattacaggtatgcaccactgtgcctcaccccattttaaccatttttaaatgtacagttcaatggcrttgagtacactcccattgtgcaaccatcactgttatccatttccggaaacttttcatcatctcacactgaaactctgtacccattagcaactctccatccgccttcccccagcctcttatgaatactgttctactttctgtctctatgattttcactactctgggtatttcatataagtggaatgatgtcatgtttgttcttttgtgaatgacttatttcacttatc

SEQ ID NO: 723441 - DNA, 1694 bp, Homo sapiens
ttttcttccttttttggagtgtacccttatcagtattaagaatctgactcagaacaatggggagggctttagtcttcttgttcagctattaccatggctcagaatgctgtctatgtcaggagatgaatccctgatttttttcatggcccgtccatgtctttccctcatgccaccaaattgaagataatgatataactttgcatttagttttatagccataggaatatccagcaccatatatgtttaaatacaggataacccagaacataaaacacctccattccttttccagttgagaatattctccagaattttggccaatttaagtataaataacctttagaaccttattgaaattgatatttacttatacattttattggagtagtttcattatatatacaatttaaaattatatattataaaggtaatttaatttactgcttttttcctactcatataataataaagttgtaagaaacaattttactgaaactcctcactggcgtcttggacattagtgtctctgtcgtcagtagatccattttttttaaatcgtccagcacagttttccacagtacattgtgttcatttccatttgagtcattgtgacacgtttatgtttgtatctatatgtttgctcccacggaaacttttatcccaagccacaatagcccattatgtgcggacagatttttggttgtttaatttgtcctgatggtatatgtgcatgatttccacagacaaccrttttctgtattgattttcaagtgagctttagaaggattgtttacaaagacatttgacacttgcaattgtgaggtgatagacctttagcaataattactaaatctgtgtcaaatttctttgccttccttatttactgattctgtcaggtgacatctctaatcattgcaaaccagtgttgattgaggtcatttcaggctgatgtttctttgccaaacaagatttttgttcaaaataaagaatttgaggctgggcacggtggctcatgtctgtaatcccagcactttgggaggccgaggtgggtggatcacctgaggccaggagttagagaccagcctggcccacatagtgaaaccccatcgctactaaaaaatacaaaaattagctggacgtggtggtgggcacctgtaatcccagctacttgggaggctgaggcatgagaatcgcttgaacctgggaggcagagtttgcagcgagccgagattgcgccactgcactccagcccgggcaacagaacaagactccatatcaaaaaaaaaatttttttttgaaggtgcatttccataatagtgcctttccaaattggtcttcttgttcagccttattaccatggatcagaatgctgtctatgtagggagatgggtccttgatttttttcatggcctgtccatgtcttttccctcatgcctcttcttatagattacccagtctcaagtattctgttatagcaacactaaatggactaagacactttctcttcagacatccacaggactctctccataatatgagagatttttttaaggacgcaaatttagagtaattcttttctgagagttaatttttagaaattattgtatttggagtagatttcacactcggttggttttattgcttattgttggtccccttttatcatgatcttctcatttctgggtccaacactt

SEQ ID NO: 723442 - DNA, 668 bp, Homo sapiens
aggcaaaccagagtacagcattaaacacgtgttaggtacttgagagcaatstggtgattaagtcagctgggggcatcaaggatgtgcttcaggggtttggtaataagagtctgggagatatattcatcattggatacttaataaaatcctctgcataacaatgcccactgggaatgctaagtaactggcacatactgtgaataccagctgcgttcaaaggcgatcagcctcaccacaatggcagaatctagatttacattgtaagcattctgctttaagaaacatcaagaaaacaaatgtttgcaaagcaaagtttattcagttgatgtattcaccactcaacaacattgagtgcctactatgtgctaggtccgggaaatataaaaataaacgagacaaggcatctgctccaaactcgctcacagtttaggcggaggcagactagaaaaaagtaagtgcaagagacttccaggtaaatagagcaaatggaaacccctagtttgcaacttctgctagaaacctcagtaaaataatagtgataaaaaaggttttaaggctataagcccataaaaacaaaaagactgaaaaagatgacagtagatgaaagatatccacaaaattttggaagatggaaaacagatggataaatggtagctaatttagtagga

SEQ ID NO: 723443 - DNA, 1663 bp, Homo sapiens
gaatcttacagcacaaaagacactggcctcaatcacctgtttaagtcaggaatcttcaaatttttttacgaagagaaactatttaaaattttcccagagcctcgacattattcagagaaggagggaaagagagtagagaaaaagaaggaaaagagcctagtggtgccagtggtacctccaaggcagaaggaagtttcagtccaataccagccactatttcctgagcctgtactgtgccaggcaccatgcaaaatgcttcacatacatcaactcatttaatcctcacaagagccacacccttcattgctatcctagagattctagtcttaattctattttacatcttacataactttccccaggccacacagctcataaatggcagagctacaattcaaaccagggcctgtctaataccaaggctcaggtttttctgtctcctggctgccacagactccttctgagagaatctcaggaagccaaccatggctttaccaggcttaatagtggaagatggtttggaaagctatcaggtataccttcaagttctttcaaaactataattggagatatgagtttcagaaatctgggtttaccattacaaaacaactggcagttttctttctttggtaaaaatgttctggaaagccaaaattgctgtgctatggtcattccttagccaagtctgcattttaacatccaactaattgagatgagtggagacatctgtaagcttattttaaaaaagacaaatctctcgatgtgtaataacagcagtaccatttactgagggcttgctatgtgctaagcactacttgtcaatttacgtggcatcaaagattaacaagctgagagctaagcactaggaatacaaatgcatcaaatggggagcccgtagcatagcctctttggaggcttacaaccttaatggggagacagacaagcaagctgactgctgcaggggaatatgcgaagggtgcgcctcaccatctgggcacaaagcactgcaaggtgcagaaaagcactggtttgtatttgaaaaagcttcttaaaggaaggggtgtttcctcacaacaatcctatgaagttgggaggaacctgatggtcagaaaggttaagtaatgcaaaggtacacagctatgaaataagttgagcccaaggtcacctcactttgaagccacactttccatcagttcctgtggcatcacagaaaaataatctccttaaakctcttgccacatgattacttttaccttacaggggaaaaaacaaaacaaataccgacactaacttctaggtactccttagagtcatattaatacggctctagtcattaaagcgttttcacattcacactttcatttgagtctaatgatcttgtgagaagcaaatatattattattgttccccttttttacacatcacaaaactgaggcccaggaaagtaatataacttgttcagggtcatgcaaaaggtaagagctcacgttaggctgcttgaatgtctaactcctaggtcagccgtcttggcaccacaaaacattagatacaccacctacttgagtctctccttgttggtacctacaattgattgccttactccgagatcaatgaacggtgggggcagagttagaatctggggcgggtttctcctggtcagcgt

SEQ ID NO: 723444 - DNA, 1663 bp, Homo sapiens
gaatcttacagcacaaaagacactggcctcaatcacctgtttaagtcaggaatcttcaaatttttttacgaagagaaactatttaaaattttcccagagcctcgacattattcagagaaggagggaaagagagtagagaaaaagaaggaaaagagcctagtggtgccagtggtacctccaaggcagaaggaagtttcagtccaataccagccactatttcctgagcctgtactgtgccaggcaccatgcaaaatgcttcacatacatcaactcatttaatcctcacaagagccacacccttcattgctatcctagagattctagtcttaattctattttacatcttacataactttccccaggccacacagctcataaatggcagagctacaattcaaaccagggcctgtctaataccaaggctcaggtttttctgtctcctggctgccacagactccttctgagagaatctcaggaagccaaccatggctttaccaggcttaatagtggaagatggtttggaaagctatcaggtataccttcaagttctttcaaaactataattggagatatgagtttcagaaatctgggtttaccattacaaaacaactggcagttttctttctttggtaaaaatgttctggaaagccaaaattgctgtgctatggtcattccttagccaagtctgcattttaacatccaactaattgagatgagtggagacatctgtaagcttattttaaaaaagacaaatctctcgatgtgtaataacagcagtaccatttactgagggcttgctatgtgctaagcactacttgtcaatttacgtggcatcaaagattaacaagctgagagctaagcactaggaatacaaatgcatcaaatggggagcccgtagcatagcctctttggaggcttacaaccttaatggggagacagacaagcaagctgactgctgcaggggaatatgcgaagggtgcgcctcaccatctgggcacaaagcactgcaaggtgcagaaaagcactggtttgtatttgaaaaagcttcttaaaggaaggggtgtttcctcacaacaatcctatgaagttgggaggaacctgatggtcagaaaggttaagtaatgcaaaggtacacagctatgaaataagttgagcccaaggtcacctcactttgaagccacactttccatcagttcctgtggcatcacagaaaaataatctccttaaatctcttgccacatgattacttttaccttacaggggaaaaaacaaaacaaataccgacactaacttctaggtactccttagagtcatattaatacggctctagtcattaaagcgttttcacattcacactttcatttgagtctaatgatcttgtgagaagcaaatatattattattgttccccttttttacacatcacaaaactgaggcccaggaaagtaatataacttgttcagggtcatgcaaaaggtaagagctcacgttaggctgcttgaatrtctaactcctaggtcagccgtcttggcaccacaaaacattagatacaccacctacttgagtctctccttgttggtacctacaattgattgccttactccgagatcaatgaacggtgggggcagagttagaatctggggcgggtttctcctggtcagcgt

SEQ ID NO: 723445 - DNA, 1604 bp, Homo sapiens
aacagggtctcactatgttgcccaggctggtctcaaactcctgggctcaagtgatcctcctgccttggcctctcaaagtgccagtgctaggtacagacatgagctactgtgcctagcccaaatatatattttagcgcattttaccaaacactcaccccatgcctattattctaggcatagaatttatgggatgtacattctatgagggtgaggttcttataagtgcttgtcacacagtaggatcttaatatttggtgaatgaatgaatattagtaacacagttactaatattttgattaaagtatatttacagggtattaatcctataatgactttagggtttagagataatagaaaaatagatgtaagatgtatgaataggtataagaggttgtaactgtgaaacttcaatggtgtcatctcttgaagtctggattttagattaaagaatacggatggacctggaagatctttggtgaaccttgtttcatgcttggagattttagaaagtgcagtggaattttttcagcgtaatgggatataaacctttgcctagataaagcatttttgctaggcattcagattaagatgagtatgtgcacataatcttactttgttcatatttttgagaaatataataattccattttgaaaatactgcacaacaaaattgaaaggatagagatgggaaattatccattctttgcctaacatgatcttccttacccacaaggacccggtcttggtcactgctgtgaacccagcacccagcacacagtggactttcagtacttatttgttaaatgaaagaacggaaaagtcgttcattccccattccacaaatatttattgagtacttccgaggtgccagggcagataaaaataagaaacaggtcaggcgcagtggttcacgcstgtaatcccagcactctgggaggctgaggtgggtggatcatctgaggtcaggagttcaagaccagcctgaccaacatggcgaaaccccgtctctactaaaaatacaataattagccaggtatagtggcacgcacctgtaatcccagctagctgggaggctgagacatgagaatggctcgaacccgggaggtggaggttgcagtgagccgagattgcgccattacactcaagcctgggccacagagcaagactctgtctcaaaagaaaaaaagaaacagaaggggtacctgtgaaggtcacagacttcaagtatcaagaggtgtccctgtgagagaggaaccgattctccctaaagaagccaggaatggcttgcaggagatgacattaaggtggatcttgaagcttcataggggcaagttattctggaagagggggcaaggtatgcaaaagcctgaatgtgcgggtggagcgggtggtggagatggaaactggagtagcagatgcaggccttacggcagagttccttgtaccctgctaaggaacctagatggatgctcttcctttaggtacttctgaggatcatcagaggcttttagggaagggcctggaaagggaatatgatactggcaggtcagttacctttccggggaaaagtggatagtagcccagaggccccactgctccatatt

SEQ ID NO: 723446 - DNA, 982 bp, Homo sapiens
aaacaaattaggcatttctagctatgcaattgacggtgtttaagaatcatttgttaattctgcatcagaggccaagcgctcacgcctgtaatcccagcactttgggaggctgaggcaggtggatcacctgaagtcgggagttcgagaccagcctgaccaacatggagaaaccccatctctactaaaaatacaaaattagccaggtgtggtggtgcatgtctgtaatcctatctacttgggagactgaggtagcagaatcgcttgaacccagaaggtggaggttgcgatgagccgagatggtgccattgcactccagcctgggcaacaagaacaaaactcaatctaaaaaaaaaaaaaaaaaaaaaaaaagtctgcatcagaaaaagatgataatgaagtgttaatgttgtcggtactgaaagacacacattacatggaagttctattaggaaatataccaaccaggatctgtttatcctcctttggtgaaggattctcctttgttattttatgtaccgccctggcttgacactcttgaatgaagtgtaaactgagagttttgttttgtttcgcttttctggagacagggtctcactctattgcccaggctggagtgcagtggcagtttcacagctcactgcagcctcaacctcctgggctccagcgatccttctgcctcagccttcagagtagctgggacctcaggcacrtgccatcatgcctggctaatttttgtattgtttgtagagacaggggttttgccatgttgctcaggctggtctggaattcctgggttcaagggatcttcccgccttgacctcccaaagtgctgggattacaggcatgagccacggcaccaggcttaactgagttttgaagtataaaatatggattttaaagcgtggtttcttttactgatgcttactaatggctttagtaaagtttatggatgttccttacccagcctggacacttcaatcct

SEQ ID NO: 723447 - DNA, 647 bp, Homo sapiens
tagcatgtgtgtatatatagcatatgtgtatatatacacacacatttataaamcttaatgtgtgtatataaacatatatacatatattatatattatatatacacatataaacatattaaccttagtatgtttatatgtgtatatatgtgtctataatataaaccttaatatgcttatatgtgtatatatataataataattattattattttgagacagagtttcgctcttgttgcccaggctggagtgcaatggcgccgtctcgactcaccgcaacctccgcctggcgggttcaagcgattctcccgcctcagactcccaagtagctggaattacaggcatgcgccaccatgcctggctaattttgtatttttagtagaaacagggtttctccaagttggtcaggctggtcttgaactcccgacctcaggtgatctgcttgccttggcctcccaaaatgctgggattacaggtgtgagccactgcgcccagcaaaggatgctatatttacagaatgttttatttctgttaataaaaggaaggatattagtgctggcaaaagcacgtcattattaactttattatctcttccctactagagatcaactctctatctccttcttcttaattcctactcttggaaaaa

SEQ ID NO: 723448 - DNA, 647 bp, Homo sapiens
tagcatgtgtgtatatatagcatatgtgtatatatacacacacatttataaaccttaatgtgtgtatataaacatatatacatatattatatattatatatacacatataaacatattaaccttagtatgtttatatgtgtatatatgtgtctataatataaaccttaatatgcttatatgtgtatatatataataataattattattattttgagacagagtttcgctcttgttgcccaggctggagtgcaatggcgccrtctcgactcaccgcaacctccgcctggcgggttcaagcgattctcccgcctcagactcccaagtagctggaattacaggcatgcgccaccatgcctggctaattttgtatttttagtagaaacagggtttctccaagttggtcaggctggtcttgaactcccgacctcaggtgatctgcttgccttggcctcccaaaatgctgggattacaggtgtgagccactgcgcccagcaaaggatgctatatttacagaatgttttatttctgttaataaaaggaaggatattagtgctggcaaaagcacgtcattattaactttattatctcttccctactagagatcaactctctatctccttcttcttaattcctactcttggaaaaa

SEQ ID NO: 723449 - DNA, 603 bp, Homo sapiens
tcctaaggcttttcttggctatgacaatttctcagagttttcttgtttttgatgaccttgcaaggatgtgaaagaataaatactgtaaaagcaacattggtgtaaccgaaatcatttattcagaagacattggaaagcaagaaattgaattttcagactaagaatcagaggataagcgacatgttcatttggatgatagaacaaaatcattttcaatctgggacttaattttagtttggttcataagtaatttaccattgaatatgtcttaaaataactttgctaagttgtgttagcaaacttttaagatatttaatttttaattctggtaaaaacatattcagcaatattattgtttgataatttgaactattatagaatttgcattctaagaatattttgtaatatcttcaagattaagctaaaattcacrcatgtcaaaccatatcctaaaaagaaaattaattattaccagaattttcacaaggtgttctggaaaataatgtgatgttttcaagcttttagaggttatatacaatacttatatgctgaaataccttaatacgccactcaaaatgcatatttcttaactatagagtagct

SEQ ID NO: 723450 - DNA, 2290 bp, Homo sapiens
cattgttctattagaaaagtccatgaagaagctgtgaacaggatcagtccagaggagaaaaactcttattttctctgtccaaacatcagtcaatacattgggagagccagcagaatccctcgccctagccttgcctcttgagcacactgcacatgaacacttcagtggggtgagcgttcagctcctaaagggccatgttcctctttcctgtggtctgtccagaaagcccaaatatctcaaagagtttttcttcacttattgcattgttctgtctattttgttacccaatataaggattggcacattggatattatttcatcagtcattaaagcattaagctcaactttagattccatgaggccagaatgatctgcagaatccaccagaaaaacaatctcattaattgcttggagataattttttcaaacctgacatgcttgcttgtgtccaccaagatcaagagttgtaaaagtcattccagcaattaatagcttttctgatgtcggatgtagtgttggaacatgttgacccaatctgtcatctttgagcatgtgaagaagagtggttttgcctgcgttgtccaaaccgaaaaatacaagttttccaaatttcttgtagagtcctaggaactggagcacactgctgaagccattgtagatccactcaaagaggaaagacattattcatgcttattatggcctgaagggctcctccagcaaaggtgggtggcccaggccctccctcagagcacaccccaaatattttcaaatatgaaaacctacttactctttagaggtaaggaaggtactttaaaaaatttattttattttatttaagttctgggatacatgtgtgggatgtgcaggtttgttacataagtaaacgtgtgccatggtggtttgctgcatctatcaacccatcacgtatgtattaagcccagcatgcattagctatttttcctgatgttctccctcccctctccacccccagacaggccccactgtgtgttgttctcctccctgtatccatgttttctcattgctcagctcatcattccatgagtgaaaacatgcagggtttggttttctgcataatggttcctgcataatggcttccagctccatccatgtccctgcaaaggacacgatcttgttctaaaggtactttaaaaaaagtactttatagggttgccactcactctataaagctgtgaaactttgttctctgtacagataatagagttgaaatttcttggtaagggtcattatagcaattccttagtgggtatgcttccctctaacttccttgccataataaaatgaaatgataaattttggcacctgttatttataatggactcaggtctgagagaagccaaggaaactgaatctgccttaacaattttataaaaatttccttggatcacaaggaggaaattaagattattattttaggtgccaagatctaattttcttttatttatagtttttctcaagatattatttctttagatttctgctaccatagagccatcataatcctagttccacatacagacaaaagaagtcttcaataatttcttccacaataacccaacacagtatagactttttaccttccattgactacattaaagttcctcattttatttaaaccataaaaacattgtgtcaagaagatattaacatacattaatgttattaaaacatgattaaaaatcatggaatctggaattttgaaaatatgggtcctgaaaacttttggccatgggcttgtttttaaagtaattgcttttttcacccatggttcacaattagcagcagatctagcaatctggaatccttctagccaagttcacactgatcatctcaggcttgttctttgctcccacttttgttttcatcatttgctgcattctataactatattcagcttctggtcctttattttttaaaacaatatttaattgacaataaagattgtatatattcaaggtgtgcagtgtgatgatttgatatacgtataccctttgtttttatttcttttctgtctgaatccactcccacccaattcattattgacattaatgaatacatttgacttattctcggtaaccctcagctttatgtagggatacagtatatatatatatatwttttttccctattatagctttaattttaaaacatgatcctttctgatggtattagtttccttacatcatcctgctggtgtggaagtgaaaagtgaatgataaattcttactacacagttaatctagttaatgaa

SEQ ID NO: 723451 - DNA, 664 bp, Homo sapiens
cagacactgacctctgcccaggccttggcactttctgagcctcctctaccccaaaaacaaatctagacgcaacccagggcaagaggtagggaggccctgattaattatggctagatgtctttctaccagccaaatggggacttgaaatagaaattcaatctaattttgagagtggaagttgtgtttcttgcacctctaggatgtgactgaaggtccttctggtttccctgctgttcctcaaagggctttgcatgtcytgctctgctttcttgctcatttctacacaaaggaggaggttaccagggttctttaggagaaacagatgtggcagagtcatagagtggaggtcacaatattcctcctgccctttctgcatcctcttgtgagcagcccaccagtctctccttcctaccatccaaactgtcccaatcccctcctctgcagaaaagcctcccagtattgacacagcagagtggatggttctttgtacctacttcataacgaccataagccctcaaccaacagtgtacctgctcttaccctacctgtcattgtgtgtacttgggtggaagttcagtattacacaatgttgtctgggtagcagttgtctttgttgtgactctttgagatctttagattagagtgttgcagttttggcactatt

SEQ ID NO: 723452 - DNA, 664 bp, Homo sapiens
cagacactgacctctgcccaggccttggcactttctgagcctcctctaccccaaaaacaaatctagacgcaacccagggcaagaggtagggaggccctgattaattatggctagatgtctttctaccagccaaatggggacttgaaatagaaattcaatctaattttgagagtggaagttgtgtttcttgcacctctaggatgtgactgaaggtccttctggtttccctgctgttcctcaaagggctttgcatgtcttgctctgctttcttgctcatttctacacaaaggaggaggttaccagggttctttaggagaaacagatgtggcagagtcatagagtggaggtcacaatattcctcctgccctttctgcatcctcttgtgagcagcccaccagtctctccttcctaccatccaaactgtcccaatcycctcctctgcagaaaagcctcccagtattgacacagcagagtggatggttctttgtacctacttcataacgaccataagccctcaaccaacagtgtacctgctcttaccctacctgtcattgtgtgtacttgggtggaagttcagtattacacaatgttgtctgggtagcagttgtctttgttgtgactctttgagatctttagattagagtgttgcagttttggcactatt

SEQ ID NO: 723453 - DNA, 1613 bp, Homo sapiens
attttactgtgcatccctgtaacatcttcgtttctttatctttccctttatgtgcctgtttactgatcttcctcattagatggaaagttttaaatgcaggaccttgtttatcttatttaccattgtagggctttctcacaattgcctccccagcacctggcatatagtagatgctcagtaaatatttatggaatgaatatgtgaatcaatggctgattgaataaatcaaagagtctgtgagtactgacaagccacaatgtagaagaatattatgagctgcgtggagaagccagaaaggctagctagaagctgaagttctgtgcaggattaggaaggcagaaaatccagatttgcaggagtcagaggtgccagattagacagttgataccttttgagtgggatggggaaggatttgcactgctggagggaaatgtctattttgggtagtaactaagagttttctaagtattctagatgctgctgggagagcatgctccttcccagcccatgtcatagcttgttgcagtaaatgctggggcacaagaagcctgaccttttgtacccttctctgccaccatgcctgtgtcaacaccacagccttgggtggcagtgtcagtggcagtggttggagtgggatgcaggtgccctacaggaaggacccagccccactggctgaggggatctgtgatgtgaaggatccagccaacccttggccacgtgacaggaacaccatctgcaccctgggcgcctagattttgcagctgccacagcctactcaggcatatttgacacaagcttagcaaatagcttttccaggaggtttgcaaatttccaatctgctgtcccacgttttcctctacaactgccmccaaccaaatgttaaattggatccaagacctgcggggtaatcagcaaacgtacgggctcattgcagaattggaaaggagactgggctcaggtggccctctgaacggactcttcctagaaattatactgttattatggcaaaaattatgatgccatatataggagtaattgtcaaatctttactagcgtatctgtctttacaagtcgatgtatccttaagacattacatataaattgaacttttgttactttaatacaaaatcagtgcaatttttaatgttattttaaggaattctccagaaagcattccttttgccaaagcaaaaaaaaaaaaaaaaaaaaaaatgaccctcagtttgtttttgcaaattgtctctaaatgtggatgtatttatgtgtgtgtttgtatcttctgtgtgcctgtgttgaggatcatcagtctcttttgagaaatgcagaaaaagttggctttagcacttccatgattaatttaaagagagagggaaagattgttatatatacaaggtagttggcactaagatttcatcttcattgttacccacacaacatcatccacacaacaaagacataaatgcaaaattgcacagcatgctgggatgaatacattacagctcagatctgcatttcaaatttagctttttgatatcttaatatccatgggggttaaaagtactaactaattgaagaaccggggacttcattgctgttactgaacaaatctaatt

SEQ ID NO: 723454 - DNA, 1556 bp, Homo sapiens
cagactctgatactctggtgagatttgcaagakttttttgggaagtactcttggcaacaacacttgtctggggtgagggaggcaggattgtttggacacaggaaaagctgaacagaggccatcgccaatcccatgagcatctctggagctggcatgtctctactgagttgtcctattgaggcaaggactccaggtatttgtactcctatagttaccagtcattggataactaatcattggataccagcttctttctgtagaggtacaagactcagctgccttggcagctggagagactggccccctgaccctgaaggacaatctggccatgcacctcagtatccaccacagagagaaaatcaggcaacgcatcaagaagatacattactaagagggttaagatattaatagagggtttccaggtaggctagagtggaaatgctcttgacagaagatagagcacgtacaacacaccagtctatggaaaagcatgtaggtgacctgctgccattgaatgtttcaatcttgttgtctttaaggggttctttatgtattatggattttaattgtttaatttttttttaccatgaagggaaaaatatttttcccttgtggcttctgatttttgtgcattgcttgaaaggcaagtattataagaatattctccagtatattcttaagtgatatatttctactcacaacataggcccaacttcacggtgaaggccaagacagctattagagccccctgtctgttgttatctgatctaagacacccttcccttccccagagaacctaaatcaggaacgattcctccttcaggtactctactgtcctctgtctatagagggtacgccttccacctagcaggaccttcgcatgcagctgcctcctttggactgtgtggatcgactctccacctgtattccaggtccttcctctagctggaatggttagaaaactaaccatttcaagtcccagaatatcagagttctgcatgctgattgggttctgccatttagatgttcaggagatgtaaaagggcagcgagggggacgctagcaagtgggactgtggagatgtgaattttctggagaactgctttgtagggccccttcattcactggtggcaagggctgcttgcttggcttcctgatccctgggtggtcagagccacagcttcccagtgttcagaggcagcagaaatagtagtggtcactgcagcagtggtaaattcttaattctagcaggccctaattgtggcctcagaggttctagttccctcagttggacagtaagaatcatctggtggtcatttctggcagccttgagtagaacccagagctgcacccctttccaacagttttataagcatccaatttcctgtgttaaatcccctcttgtataaaatatttacatggtttctatttcccacactgaaactttgctgatatgatatccaaataagaagagtggccgggcgcggtggctcacgcctgtaatcccagaactttgggaggccaaggcaggcagatcacttgaggtcaggaattca

SEQ ID NO: 723455 - DNA, 633 bp, Homo sapiens
ttgagtactttgtgcatgcaaggcttactgaatacctagtactagcatctttatatagtctatctcgtttctttcttacaacaatactttgagggaggtattattattattcacaattcgtaagttaaaaaagcatgagattctgtgagattaagtagttgcttaaagtaacaaagccagtacgtacacattcacacattctatccattctactgcactagctgttacaaaaaatatatatatttagaacacatgtgtgtctaatgtctaatgcttagaacaatattttaattggtatatcagaacctcttccaataaatgtttaatgaaacgaattgggcataccaacttcttgacacccttatcttgagttagagacaagaatacagagacagagaatccaagttctgaaatgagttaaactcctagttaactgcaccaccaatgccttctactttggtgtttactggtgacttccagacaaattaacatgggaatgaacacatacatgttaatgtatgaaacaagtacaatacatatgacattaagatgtacaaatatatatttaaaaaccagttttcatggatgagscatttgaaaggtcaaagttacctcaaacgtttgtccttctaa

SEQ ID NO: 723456 - DNA, 1340 bp, Homo sapiens
tgccgggctaattttttattttttgtagagatggggtctcactatgttgcctaccctccaactaatgccttctgacacctcccacatccaggtgtcaaaggctgtgcacgtcataacactgaagctgtggagggaaaaaaaaaaatgacaacttgagggagctcctgtgtgttctcaagcacagaaaggaacacataatttgacagctaaaagggactgttaggtatcaagtctaactataatttaatacgtaaatcctctytgcaatatccccaacataagatattctctacttcctaaggtagctaaataattctatatttttagaattcttaaaactatgaaaaaaacaaaaaactagccacaacttaggaaaagttttgtcagatttacaggccaggcagtcatgccttacggtagcaaatcattttcaaagatctcacccaagtgataaaccttaatttaagtaaatttctgatactcattagaaaatatgacatatggacaatttcttaaactcaaagtgcttctgaaaattattagtaaatataaattaattatttaagattgctcttaacacctagctgagatcaacttgatgaaaaactacttatctttattgtgggatgaagacaaatagataacattggtaggtagcatggagcatttgtggagacaggacagatctggattaagatatgattagtagaagagtagggacttgggcactagaaaaattggggaaagaacacgaacaagaggagcaaagaagccaggcacagtggcacatgtatgtggtcctagctactcaggagactgaggcaaggggatcacctgaactcaggagttcaaagcctgggcagcataacgagaccttgtttcttaaaaaaaaaaaaagaagataaaaaaaggagcaaagaaaatattcaccagtttcaaaatagagcaaagggagagtcccatgcccaaaaaagggaaggaaaaaagcctttcttcatcaatcagtaccacccaagtccctactcccaagcctgagagaattcagtctgtaagcaaactttatcaatggtttaaaaaaaagctgaaaatacaactaataattccatgcttgttgtgtaggaaaacattccaagtttaaaatctcccttaatgtaaatagacagaggtctacatatctctatataaataaatacatatttacttatatatggacaaatatctctggaagaaaacacaaagaagacactggttaccccgggcgaagcgaactgaaggctaagatgagagtgagaagacttaataccctataactttaggaaccttttgaattttaaaccatg

SEQ ID NO: 723457 - DNA, 1340 bp, Homo sapiens
tgccgggctaattttttattttttgtagagatggggtctcactatgttgcctaccctccaactaatgccttctgacacctcccacatccaggtgtcaaaggctgtgcacgtcataacactgaagctgtggagggaaaaaaaaaaatgacaacttgagggagctcctgtgtgttctcaagcacagaaaggaacacataatttgacagctaaaagggactgttaggtatcaagtctaactataatttaatacgtaaatcctctctgcaatatccccaacataagatattctctacttcctaaggtagctaaataattctatatttttagaattcttaaaactatgaaaaaaacaaaaaactagccacaacttaggaaaagttktgtcagatttacaggccaggcagtcatgccttacggtagcaaatcattttcaaagatctcacccaagtgataaaccttaatttaagtaaatttctgatactcattagaaaatatgacatatggacaatttcttaaactcaaagtgcttctgaaaattattagtaaatataaattaattatttaagattgctcttaacacctagctgagatcaacttgatgaaaaactacttatctttattgtgggatgaagacaaatagataacattggtaggtagcatggagcatttgtggagacaggacagatctggattaagatatgattagtagaagagtagggacttgggcactagaaaaattggggaaagaacacgaacaagaggagcaaagaagccaggcacagtggcacatgtatgtggtcctagctactcaggagactgaggcaaggggatcacctgaactcaggagttcaaagcctgggcagcataacgagaccttgtttcttaaaaaaaaaaaaagaagataaaaaaaggagcaaagaaaatattcaccagtttcaaaatagagcaaagggagagtcccatgcccaaaaaagggaaggaaaaaagcctttcttcatcaatcagtaccacccaagtccctactcccaagcctgagagaattcagtctgtaagcaaactttatcaatggtttaaaaaaaagctgaaaatacaactaataattccatgcttgttgtgtaggaaaacattccaagtttaaaatctcccttaatgtaaatagacagaggtctacatatctctatataaataaatacatatttacttatatatggacaaatatctctggaagaaaacacaaagaagacactggttaccccgggcgaagcgaactgaaggctaagatgagagtgagaagacttaataccctataactttaggaaccttttgaattttaaaccatg

SEQ ID NO: 723458 - DNA, 636 bp, Homo sapiens
tctgttgcccaggttggagagcagtggcacaatcagagctcactgcaatctcaaactcctgggctcaaggaattctcctgccttggcttctcaaagcactgggattataggcaggagccaccttgcccacctaccacttttttaggtgtaaagaaactgaagttcacaaatttgagaagtggtagagcaaagacctgtacctaaatctagctggctccaaacctgtttctcaacaggccatttttcaatgtcaaaagaaagaggtttctatttttaaagtaaaaaaaaattctaaatttctaaaaaagaaaaatattatatctgtgatagttgagaactagcactaagtttaaaaaaaaaagaagaagmagcactctaggcaataaataacagcttaatgcacctgatatttttataaaatacttacaataaggccattctctgttctccaagatgaatcaagatagtgatctttttgtaaaactgatgctgtattttcaccacttctgtagtaattaagaaaatgagtatataagtgaaaatcatattagttaatgaatgtaacttacacagcacagaatccagcaggtagtaagggaactaagcaaatagttcccttctccccttaacaaacag

SEQ ID NO: 723459 - DNA, 636 bp, Homo sapiens
tctgttgcccaggttggagagcagtggcacaatcagagctcactgcaatctcaaactcctgggctcaaggaattctcctgccttggcttctcaaagcactgggattataggcaggagccaccttgcccacctaccacttttttaggtgtaaagaaactgaagttcacaaatttgagaagtggtagagcaaagacctgtacctaaatctagctggctccaaacctgtttctcaacaggccatttttcaatgtcaaaagaaagaggtttctatttttaaagtaaaaaaaaattctaaatttctaaaaaagaaaaatattatatctgtgatagttgagaactagcactaagtttaaaaaaaaaagaagaagcagcactctaggcaataaataacagcttaatgcacctgatatttttataaaatacttacaataaggccattctctgttctccaagatgaatcaagatagtgatctttttgtaaaactgatgctgtattttcaccacttctgtartaattaagaaaatgagtatataagtgaaaatcatattagttaatgaatgtaacttacacagcacagaatccagcaggtagtaagggaactaagcaaatagttcccttctccccttaacaaacag

SEQ ID NO: 723460 - DNA, 959 bp, Homo sapiens
tgggtagtttaaatttttaagtcatttacaatccaagtgaatatttaacattatattcattatgcaccttgtggttgccattttcctattactgcagtgacaatgaatgatggcaaaaatgcaaatgcctattccttgtgagtttaatctaggctccttgtgtcctgatatatcttatcattttgtytggtaattagacttctctgatgatgttgtaaaatacatatcagttgtgaagggaaaagtcattatttatcattataaggtggggaatatgctcatttttcattgcccttacctgggtagcaaggacaaagtgatgcaatttcaacttggaggcccatgcttgatgtgattctgggatggaacaaatagccatgaaattaatctgagaatgttcaatcattcctttgccagagcttggctggcgtcaccttagtgtatgaagtatagctttccaggctgttagcttcctcaggagcatacgcaacacaggggaagatttgtccctgttacacatcatcttataaagggtgagggctgggaccaaaagaaacgaattaatgaagggggaaatatcttttgaagccaagggactataaatagcatagttctgaaagtattatatttgtgaagcaaggctgttacctaatgtgagttggagaataacttgtgtaagtatagtcctgggaaaaggaaaaaacaagccttgtctcagagatttcatatcataaggaaaacgaagaaaaaaaacctaaatgttggagggaggtcacttgtttctaagagaaggcagtctcactttttgttgattcatttagctaatacatagtgagttccaactaaatgccagataatctcctgagaagtaaacattattctgaaatttgctaagtttggagaaaaacttcagtaattctaaaataactaaatcattaatgacattaaacatatcatat

SEQ ID NO: 723461 - DNA, 566 bp, Homo sapiens
cataaaaataggctgtttttgtcccattttgcttaaaactctcaactttaccttttccttcttttgcagcacaacttccagcaagagttttacagaattctaaataaaaaatgtctttttacatatttctaaaatatttctaaatgtatatttagctaattgtatatttagcaagagtatatctttttgtcttttcctcccagtctaatcttgaacccacttagtcaggctttttcccccagtcactttaccaaaaccatgcttgtcattgttcttgcctcatcttgttgacaattctcagtcttcattttatgtgaactgtcagctgcatttgacagacttgatcattcttccttcaaatactygcttcacttcttgctcacaaacaggacattttcctggtttttctactatgtccctggatgcttcttttcaatttcctatgccagttccttttctttttcctctctgacttaaaattgtccatctgggctcagtacttgatttttcttgtttacctagatcagcaattggcaaactaaggcccatggtcccaagtccaattt

SEQ ID NO: 723462 - DNA, 603 bp, Homo sapiens
tatttttatcattgtcattttataatgtagagaagagttaatgttgatacatacagctataaaaggatgcgttttattgaagtatttcagattgaagatagggaaaatgaagagttgttgactgatagaacctaaataaatatattaaagcacaactgtgaaatattaccatataaaatgaactcttgcctggttaaatgtgatgttttgtttcaggagtggactctaaagtgattgataatagtttaatgcttaaaatttttgtcaaggtctaggaaataaaggaatagttaacattccacaattcatcaactataatgaacttaatacattcctaccatttattatctattatctattagctgctccatctcatatttctacttattcttcccaacaaccttaggaaggaactgtacattttattgtagagaaaaattgaggctcagagagactaactttccmatgattccccatttgaagttgagatttaaaccaagatctgacctaatgtacacatttaatctccattcaatactgcttcttgggcattaatcatactttgaatatggggcactactttttccaaattctcttatttga

SEQ ID NO: 723463 - DNA, 1700 bp, Homo sapiens
gtcaagcccctgatcaaacccttgtctttatcccttaggataaagagcacatttcttaagagcagagcatgccgcttaggccacagggcctttgatgactcctgtgacctcacctctcccttccctgacccccacacactctgtccactatataaacgcagctgccccttctctgtacatctgctgcttcctctgcctgaactgctcttccacactcagcccctggctctcacccccaatgctgtcctatccttggcttttagcctagaggccaacacctccaactcccttcttttttgtttttaattttaattttttttttttttttggtagagatgggggtctcactgtgttggccaggctggtctcaaactcccgacctcaagtgatcctcctgcctcggcctcccaaagtgctgggattacaggcgtgagccattgtgcctggcctccaggtccttcctgactgtaatcttcttccgcctctgcagatcaggtgggtgtccctcttctgtgcttcatgtaatgaaatactagcagtgtcaccactgacagctttcaggcttgtgcaaacattgtgtgaaggccctgagtgggcagctctccctacacaccctcatgccatcctcacagcaaccatctagttaggtaacaatatttccatgacacaagcaaggaaactgaggctcagagcagtgaggtgacacgcccaggtcaagatgctcttgacccctgtgcagcatgtcctcactccytgatcatggcagcggccacacaatgttgtgttcactgctgctgtctccaccacgagactgtcaaagtctggaggacagaggttgtgtttgacgcatcccagccctcccactctcccgccccatctctgaccagctgtgtgacctaaagcaaattgcttaacttctctgggttttggatccctcatctataaaatagatggatggtaactgtccctgtttcacaaggttgttgtgaggattaaatgaggtagaaatatggcaagtgcttagaagcaagccaggtatatggtgggcactcaataaactgttgcaaaggtgatgatctctgtatcagcactgcccagcactaggtctgacctgcggtagcaatcagtgcaggtccctgtcgagggaacacaccccagcctctagtctggagaggcccgtggcccaccagacaacccctcgctgagcagtagctggagccactgcctcaaccccacagccctgccctggtcctgccaccaagacactactcacgggaaggtagatgcagcaaagcagagaatggagatcaagcccaggcccacgctggcctcgtcccagccgtcctgggcacattcacccaacacatcccatatccactggatggagccactggggcagctggagaagttgcgggagcccagtttcttccagaccatggctgtggaggaggggcccccggccaggcagggctgcaccggagggagggcgctggtgttctgaggccagcaagggttctacagggaggaagggaggaggctttcagcactgggaggtccaggtcctattcatggtcatcccaaactaagctcatcccagccttttcacggggctcctggccctgagccagagaagggcaaagacataatcttcacccaccaggacccaatcagctcccaggtgcacagatcacagcaaacac

SEQ ID NO: 723464 - DNA, 665 bp, Homo sapiens
aatgggacctcctgggctgccaggaataggtgttcagggaccaccaggaccaccagggattcctgggccaataggtcaacctggtaagattagagtaaatgtgcattttgtagcactcataatatatacatttgttagctcatcaataaagtgaaacctacaaaacagtcttccagaagcagacttaaaaggcaatctatctatgtgtatgattttataaaagtggawaagtacaagccacagcataaaagctactttaatccctgatatttcccttctgagttcatctaaaattgatgtatttccaataatacaattgcagtgtattattgatatgtaattgttgagttagacatggttttggaagcagaggcctagaaacttctagtgctgatcatttcagatctgagtagcggtacagcattcatagacctttgtggaacctcctaacatttcttagcacatgacaactagaattagggttcagcaaaactttctgtaaaagtgtattttaggcattcccattttctttttttttcagtgagttattttccctttttgcccctaaaatagcagtcattttgcaattcatcagcactccaaatctttacttttaatattttatattggatactcaaaaaggtcttttgtcaacacgtaaccta

SEQ ID NO: 723465 - DNA, 644 bp, Homo sapiens
tgtgccaccatgcctggctaatttttgtttgtttgtttgtttgtggagacagcgttttgccatgttggccaggctgctctcggactcctggcctcaagtgatctgcctgcctcagcctcccaaagtgctgggactgcaggcatgagctaccatgcccagcctatgagggctaatactttcatagctcttcctatgcatcagaagactcattttaattctcaccacaattctatgagattaccattatcacactcatcttccagatgaggaaactgaagcaaagagaagttaagtaactcaccaaggtcacacagctaacaagtggcagagctagaatttgaacctaggcagcttggtagagtctgtgctgtcactgcctctctgtgctgatatatctctaaattagttcagtttggacagagtgaacctgagagatccgtggggcagccgcgtggaggtgtctagcaggcatgcagatatatggttctgaagctcacatgggaggtggggactggaaataaagactgtggagtctgcatacaggtggccattgaagccacaggaaaggtcaggacccttaaggagagggtgggarataatcagaggaaagaaacaagggagccctggaaggcaaacacaagcat

SEQ ID NO: 723466 - DNA, 1041 bp, Homo sapiens
tgaggttaaattatgctgattctacattcgaaatggaatcatgtctggcatggattccatctacactggcaggactcaaggcagaactaagcgaatcaaagtcttgtcttatttactgttccaaagtcaaaaactcgtttttgtcctcaawtatcctcccgaagacagtgacagctatggttcaggccatcctgaattaattcaccctttggaatgtgaaggaaatacgggaatatatattttggcatttcctatgtgccaggcatgatgctcagtgcttcattgtcttgtttcattgtctcgaccatattctgagggcgattttaacacatccctaaaggaaaaaaggaaacagaagctcagggaggttacatggtgcacccaggttcatatggttaagaaccggcacagctgggatttgaacccagatctgcctactctaagtctcagttgcttaaatatcacatgtcttcctttagtaatatcagattctctcagggcctctacacttgattttcaataacagtcaaactattttaagttaaaagagattccttttcacctgaaaaacaaaaacaaaaagatccactagaactaagaaattaactgagcaaggtaaaagaattcaaagtcaatatacaaaaatagttgtatttctataaactagcagtgaacaattgaaaaaataaaatgttaaatgccgtttacaatagcacagaaaataaaatatctagggataaaattaacaaaagatgtgtaagacattgaattctctaaaacattgctgcgtgaaattaaagaaaacctaaacaaatagggatatataccatgttcacgggttggaagcctcactgctaataagatgtccattctctcaaactgatctatagatttaatacagtcttcatcaaaatcccagcaggcctttttcagaaatcaagaggctggttttcttttctttgtttgttttgttttgtttttgtttttgagacagggtctcactctgttgcccaggctgaagaagctggttttaaaatggaa

SEQ ID NO: 723467 - DNA, 1041 bp, Homo sapiens
tgaggttaaattatgctgattctacattcgaaatggaatcatgtctggcatggattccatctacactggcaggactcaaggcagaactaagcgaatcaaagtcttgtcttatttactgttccaaagtcaaaaactcgtttttgtcctcaaatatcctcccgaagacagtgacagctatggttcaggccatcctgaattaattcaccctttggaatgtgaaggaaatacgggaatatatattttggcatttcctatgtgccaggcatgatgctcagtgcttcattgtcttgtttcattgtctcgaccatattctgagggcgattttaacacatccctaaaggaaaaaaggaaacagaagctcagggaggttacatggtgcacccaggttcatatggttaagaaccggcacagctgggatttgaacccagatctgcctactctaagtctcagttgcttaaatatcacatgtcttcctttagtaatatcagattctctcagggcctctacacttgattttcaataacagtcaaactattttaagttaaaagagattccttttcacctgaaaaacaaaaacaaaaagatccactagaactaagaaattaactgagcaaggtaaaagaattcaaagtcaatatacaaaaatagttgtatttctataaactagcagtgaacaattgaaaaaataaaatgttaaatgccgtttacaatagcacagaaaataaaatatctagggataaaattaacaaaagatgtgtaagacattgaattctctaaaacattgctgcgtgaaattaaagaaaacctaaacaaatagggatatataccatgttcacgggttggaagcctcactgctaataagatgtccattctctcaaactgatctatagatttaatacagtcttcatcaaaatcccarcaggcctttttcagaaatcaagaggctggttttcttttctttgtttgttttgttttgtttttgtttttgagacagggtctcactctgttgcccaggctgaagaagctggttttaaaatggaa

SEQ ID NO: 723468 - DNA, 602 bp, Homo sapiens
cagatagatattttcaaaatctcaataatatttaatattagaaatgttaagggggatactaccgaaartgaattaatataaaagaccaaatgctttttccccttcctttttttaaaaaaaatatagtttagaacagttttaggttcacacaaaaactgagcagaaagtatgcacagagttctcttgtaactcctaccccacacatgcatcataaccccctccactgccaacatcctacactgagaggtacattggttaccattggtgaacctacattgacatgtcattgttagccagagtccgtagtctgcgttagtattcatttctagtgttgtacattctgtgagtttttacaaatgtataatgacatgtatccaccattataatatcagagtagtttcagttttactgtcctaaaactgctctatgctccttgtgttctttcctcccttaaattttatcaacaccgtatttatttatttatttatttattttgataacagagtcttgctccatcacacaggctggagtgcagtggagcgatcttcgctcactgtaaccttcgcctcctgggttcaaactgttctcctgcctcagccccc

SEQ ID NO: 723469 - DNA, 602 bp, Homo sapiens
cagatagatattttcaaaatctcaataatatttaatattagaaatgttaagggggatactaccgaaagtgaattaatataaaagaccaaatrctttttccccttcctttttttaaaaaaaatatagtttagaacagttttaggttcacacaaaaactgagcagaaagtatgcacagagttctcttgtaactcctaccccacacatgcatcataaccccctccactgccaacatcctacactgagaggtacattggttaccattggtgaacctacattgacatgtcattgttagccagagtccgtagtctgcgttagtattcatttctagtgttgtacattctgtgagtttttacaaatgtataatgacatgtatccaccattataatatcagagtagtttcagttttactgtcctaaaactgctctatgctccttgtgttctttcctcccttaaattttatcaacaccgtatttatttatttatttatttattttgataacagagtcttgctccatcacacaggctggagtgcagtggagcgatcttcgctcactgtaaccttcgcctcctgggttcaaactgttctcctgcctcagccccc

SEQ ID NO: 723470 - DNA, 602 bp, Homo sapiens
cagatagatattttcaaaatctcaataatatttaatattagaaatgttaagggggatactaccgaaagtgaattaatataaaagaccaaatgctttttccccttcctttttttaaaaaaaatatagtttagaacagttttaggttcacacaaaaactgagcagaaagtatgcacagagttctcttgtaactcctaccccacacatgcatcataaccccctccactgccaacatcctacactgagaggtacattggttaccattggtgaacctacattgacatgtcattgttagccagagtccgtagtctgcgttagtattcatttctagtgttgtacattctgtgagtttttacaaatgtataatgacatgtatccaccattataatatcagagtagtttcagttttactgtcctaaaactgctctatgctccttgtgttctttcctcccttaaattytatcaacaccgtatttatttatttatttatttattttgataacagagtcttgctccatcacacaggctggagtgcagtggagcgatcttcgctcactgtaaccttcgcctcctgggttcaaactgttctcctgcctcagccccc

SEQ ID NO: 723471 - DNA, 1256 bp, Homo sapiens
ttccagaacctccctgctgggtcagtgctgaggtgagactaaggtttccctcttgccacctgaatgcactgcacttccttccccattccccccaacccccaccactcttttcagagctgagagcatttgagagagggagaagcagagggggttcaagagagattcgctcatgtgctccgaaggtcatataggctgagatgccagtcataaggacaaaggacccctaatgaagaggaaggacttatgaggagacctctgggcagccgaagccaagcttagggccagactggcctccatgctgagacaggagcagagatttggacagtgcctccatagaaaattgggggaagaggaccgggcgcggtggctcacgcytgtaatcccagcactttgggaggccaaggtgggcagatcacaaggtcaggagatggagaccatcctggctaacacggtgaaaccccgtctctactaaaaataccaaaaaattagccgggcgtggtggcgggcgcctgtagtcccagctactcgggaggctgaggcaggagaatggcgtgaacccgggaggcggagcttgcagtgagccgagatcgcgccactgcactccagcttgggtaacaggagcgaaactccgtctcaaaaaaaaaaaaaaagaaaagaaaagaagattgggggaagagggggaccgcaggcatgaggcagcctgggaaccataataggtggagtggaggcggctagtgagtgaaccgcctgcaacttgaataataagctttctccacaaagtggagagttattgagggctggggactcaagccaacctgggatgtctggctatgtaactgggagcaagttctcacctcccagagcttcagttccctaatgtgtaaaatagagctgaccaatgagcctcctgtgattctgggaaggagaggatgctgtggagttagtaggatgtattcatgcagtgcccagcacagtgactgcctcagagtcatttcttaccctcctgccaccccacccttaccgatcatcttagagtaagtgcagctgagcctggacggcagcaagaaagttcaggccgggcgcagtggctcacacctgtaatcccagcactttgggaggccgaggtgggcggatcacttaaggtcgggactttgagaccagcctggccaacatggtgaaaccccgtctctactaaaaatgtgaaaaaaaaaaaaaaaatggcacctgtagtcccagctactcaggaggctgaggca

SEQ ID NO: 723472 - DNA, 1256 bp, Homo sapiens
ttccagaacctccctgctgggtcagtgctgaggtgagactaaggtttccctcttgccacctgaatgcactgcacttccttccccattccccccaacccccaccactcttttcagagctgagagcatttgagagagggagaagcagagggggttcaagagagattcgctcatgtgctccgaaggtcatataggctgagatgccagtcataaggacaaaggacccctaatgaagaggaaggacttatgaggagacctctgggcagccgaagccaagcttagggccagactggcctccatgctgagacaggagcagagatttggacagtgcctccatagaaaattgggggaagaggaccgggcgcggtggctcacgcttgtaatcccagcactttgggaggccaaggygggcagatcacaaggtcaggagatggagaccatcctggctaacacggtgaaaccccgtctctactaaaaataccaaaaaattagccgggcgtggtggcgggcgcctgtagtcccagctactcgggaggctgaggcaggagaatggcgtgaacccgggaggcggagcttgcagtgagccgagatcgcgccactgcactccagcttgggtaacaggagcgaaactccgtctcaaaaaaaaaaaaaaagaaaagaaaagaagattgggggaagagggggaccgcaggcatgaggcagcctgggaaccataataggtggagtggaggcggctagtgagtgaaccgcctgcaacttgaataataagctttctccacaaagtggagagttattgagggctggggactcaagccaacctgggatgtctggctatgtaactgggagcaagttctcacctcccagagcttcagttccctaatgtgtaaaatagagctgaccaatgagcctcctgtgattctgggaaggagaggatgctgtggagttagtaggatgtattcatgcagtgcccagcacagtgactgcctcagagtcatttcttaccctcctgccaccccacccttaccgatcatcttagagtaagtgcagctgagcctggacggcagcaagaaagttcaggccgggcgcagtggctcacacctgtaatcccagcactttgggaggccgaggtgggcggatcacttaaggtcgggactttgagaccagcctggccaacatggtgaaaccccgtctctactaaaaatgtgaaaaaaaaaaaaaaaatggcacctgtagtcccagctactcaggaggctgaggca

SEQ ID NO: 723473 - DNA, 1256 bp, Homo sapiens
ttccagaacctccctgctgggtcagtgctgaggtgagactaaggtttccctcttgccacctgaatgcactgcacttccttccccattccccccaacccccaccactcttttcagagctgagagcatttgagagagggagaagcagagggggttcaagagagattcgctcatgtgctccgaaggtcatataggctgagatgccagtcataaggacaaaggacccctaatgaagaggaaggacttatgaggagacctctgggcagccgaagccaagcttagggccagactggcctccatgctgagacaggagcagagatttggacagtgcctccatagaaaattgggggaagaggaccgggcgcggtggctcacgcttgtaatcccagcactttgggaggccaaggtgggcagatcacaaggtcaggagatggagaccatcctggcwaacacggtgaaaccccgtctctactaaaaataccaaaaaattagccgggcgtggtggcgggcgcctgtagtcccagctactcgggaggctgaggcaggagaatggcgtgaacccgggaggcggagcttgcagtgagccgagatcgcgccactgcactccagcttgggtaacaggagcgaaactccgtctcaaaaaaaaaaaaaaagaaaagaaaagaagattgggggaagagggggaccgcaggcatgaggcagcctgggaaccataataggtggagtggaggcggctagtgagtgaaccgcctgcaacttgaataataagctttctccacaaagtggagagttattgagggctggggactcaagccaacctgggatgtctggctatgtaactgggagcaagttctcacctcccagagcttcagttccctaatgtgtaaaatagagctgaccaatgagcctcctgtgattctgggaaggagaggatgctgtggagttagtaggatgtattcatgcagtgcccagcacagtgactgcctcagagtcatttcttaccctcctgccaccccacccttaccgatcatcttagagtaagtgcagctgagcctggacggcagcaagaaagttcaggccgggcgcagtggctcacacctgtaatcccagcactttgggaggccgaggtgggcggatcacttaaggtcgggactttgagaccagcctggccaacatggtgaaaccccgtctctactaaaaatgtgaaaaaaaaaaaaaaaatggcacctgtagtcccagctactcaggaggctgaggca

SEQ ID NO: 723474 - DNA, 1458 bp, Homo sapiens
aaatatgtattacatttcattttctactactgaagtgacaaaaatcaagaaggctgataatacaaagtggtaagatataatttaaatggggttggcatacgctgctggtgggtatgtaaattggtaatagtttggtattatcttgtaaagctgaatatttacaatctttgttttatcaaaatgggatggataaaactcagggaccacagtttgccaactcctaaaataaagagtatttgagaaatggtgaaaggattttaatgataagagtatatgaatgaaagtgtctcagaagatgaggttgaaaatgttgattggcacctgcttgtgaaaggccgtatgtgtcataacttttgccttttcctcttgaatgtaaagcagtgaagtcatttcttcgcatttaccttttagaaaactcatccaactagyaatatgtaggataaatctgaggtagccaacatgggaagcaggaggactagtgaaaaaacaagattgggtcttgaaggcagtcgaaggtggggtggagaattcagaaccaatttcagagagaactaagcagatagaatcaactgtgtttaagaagtaagacagtgcactaacgctctattttacctaattgaatgaatttagtgggaagcttgatgaaaaattaatatgcacattaaaacatttcttcttcattactatgaaacaaaataatattttactttttttaccattatatacattcctaaaatatacttattttattgctttcttaaaaagtatttctgtcacttcagaattttgtacagcattttgaactgtgtttttaaaaccaaaacaaatttagagactctaagactagaaggagatgccttaagcagtgtaaaattaattttcaatatctgcagtattaatctgtaattttatttcttagttgtttaaagtcttcatagacttttgcactattttccacatcagaaatctttggatcacgtccatatcattattaaaggagaataaattattttccaactactgttaaagcacgtggcatttagctgctctcttttctcaccagtaaaatctctggtagaccctgttttagtcagtgatctaatactgggcaagtttcataagatcacatgcaatgaggaagccaaattacttcaaaagatcattgagttaaataatacatacttcaagacacccataaggtttaggtgtccagtgtggcagcctgtgtaataaataacatgtgctttacaaaacctgtcattgtatatttatataataggcagctaagattttttaaaagctgtttttcagtaatttcatttttcctattcatagtttttcatttctatgtaatggacccaaagaactgacatctagattatctctacctagagcagcagcgtctactactatttctactatcccatgtgttttagtttacaaaaacctttcacacca

SEQ ID NO: 723475 - DNA, 929 bp, Homo sapiens
aggaaacaattttacataacaatgtgccccaaaataagagcagaaatgactattgagcccacaaattgcaggaaccactacactctttcttggagtrggtgtattggggtgtatgcatctggtggcgggggaatgctgaccacccttgagatttaacctgtctaaacgtcaaaaaaatgccaaatatttgacttacattgtcttatcaagactggcattatatagattaaataaagaagaaattgaacttcagctatgtcaaatgagttattcaaggttatacaaatcataattggtaaactgggcattcaaatccaagcttttctaatttaaataaaatctgtagtttcttcagtgaccacattgcttttttcatgtaaatgtctgggaatacctggagttgatccattcagctgctttaattaaaatatagggtaggtgttcatgtgttcattttatgtggagatttatttatttatttggacaatatttataagtgcaatctaattggaaagattgaattgttattatcctgcctgattcttgcaacttcttagcatgtccatgatcaagaaagaaccttgaagatattaaagttctcttcaactgtgggcccatgttttactggttctgtaatatagactgtattttccatatttatttggacccgctaaaatttgcatcacagctcattttttttttttttcctagagttgtaggggagcaactcagagcaacccacagagctagcatttctttccaactttgctttcaggaatatcacagtagtagcttgaaatcaccagtggtaggagtatttacaccatagatattgacaaacactgcaaataagagctctctccttcttcccttgcccacttcttaccttctgccctgaaagagctaattgttaaacttttttgagttca

SEQ ID NO: 723476 - DNA, 929 bp, Homo sapiens
aggaaacaattttacataacaatgtgccccaaaataagagcagaaatgactattgagcccacaaattgcaggaaccactacactctttcttggagtaggtgtattggggtgtatgcatctggtggcgggggaatgctgaccacccttgagatttaacctgtctaaacgtcaaaaaaatgccaaatatttgacttacattgtcttatcaagactggcattatatagattaaataaagaagaaattgaacttcagctatgtcaaatgagttattcaaggttatacaaatcataattggtaaactgggcattcaaatccaagcttttctaatttaaataaaatctgtagtttcttcagtgaccacattgcttttttcatgtaaatgtctgggaatacctggagttgatccattcagctgctttaattaaaatatagggtaggtgttcatgtgttcattttatgtggagatttatttatttatttggacaatatttataagtgcaatctaattggaaagattgaattgttattatcctgcctgattcttgcaacttcttagcatgtccatgatcaagaaagaaccttgaagatattaaagttctcttcaactgtgggcccatgttttactggttctgtaatatagactgtattttccatatttatttggacccgctaaaatttgcrtcacagctcattttttttttttttcctagagttgtaggggagcaactcagagcaacccacagagctagcatttctttccaactttgctttcaggaatatcacagtagtagcttgaaatcaccagtggtaggagtatttacaccatagatattgacaaacactgcaaataagagctctctccttcttcccttgcccacttcttaccttctgccctgaaagagctaattgttaaacttttttgagttca

SEQ ID NO: 723477 - DNA, 788 bp, Homo sapiens
tgatgagatgtggaaaacaataaaattatcataagttttttaaaaaaactagacttcatcaaacttttgatattcttttaaaggttatagaggcagtaaaaagtctgatttcctttgcaaataaataatgtggtaatagaaaagaaactaactcctgcacaccaactagggaacattgaggtgttgacctgtgagagagtggtgcagagagagccccgtaagacaggaaaccttgccttggcagggcgaaatgaccaggaggaaagtaggatttagacacactgacaagtttccttatattatgcagcactatgcaattttctaagtgctttcagatgtttactcttgactcccataaaatcgctgtgagctgagcagggcttaatatgatttctacattctagaagagcctgagatcacacggctggggaaccgtgsggcaggatggagtgtgggtccttcgtctcttggcttcctgggtgtcggagctgggtgtaaatccaagcacccaccctgcagcctgtgctcagcccaccgtgctccaggctgctcaggctttgtgcacggagtagagtcagaggcaacggaagaggaggtggcagccagcactcttgggcccgggacccttgcttgagacttgacatgaaatggaagagagtgcgagaactggaaggagatcacagtagctctggctttcagacacaagtgtctatttcctcagtcaaggagaagccttcctcacaccatgagaggtgtggaccttgtatctcttacaacaaccaaggctg

SEQ ID NO: 723478 - DNA, 406 bp, Homo sapiens
tgagtgtgtatgtgcatgtgcatgcatgcacatgcacataccaagatgaccctgggtgttttaataagaacatcttccaagttgaatgcttcctgaggaaatttacctgtaatacaggtatcttttcacatattattccccttcatttgcactaacaaatgtctcctcttgctcttttgtgctagttcagtstccaggtacatccacttggagttttgctgtttaagggtttaattaccactttggtatgaattctactttataaagattttctttcttttgttccttagagctaccctgtgaggcactcagagcagctaccattactattttaatttacaaataaggaaagtgagattcagaaaaaatgtaatgcattgtgatgtcagtggtagttaagaactca

SEQ ID NO: 723479 - DNA, 1688 bp, Homo sapiens
ggcccaggcaggtcaggggatggggaggctggaatgggaggggccgctcttgaaggatttttggtgaggggatcagaccatggggaccctggtcagggaattgtaagaagagcgggtactacacaggctcttacccagtgctttgcatgttgtaactgatatttttggtaccaacttgtgtgccctcaccattcacccagtggtgaccagcagcaaacacctgtcacttcctgggcttggagactttctcagaccactgyagctgctcttcccatgcaccggcaggctgttcacacagtccctggctagaagcatcctgcaatcaatctctgccaagatgggtggataaatactttggctccctcacctcccggctggaataaacttgatctcagggttattaattgtgcactcttcactggctcccaaagttcccaagaaaagttgagcccacagggataacttaccggctaaggtgccctgtgttgctgtctgccttccccttccctggctcactttccctcctcctctgctagggcttcctgggatcgctcatgttcttgtctcctggtctgctcctgggacaacccagtctgagacacagaattagctcatttagtcctcacagtgatcccagagaggaggcactatcattgctcccattgcagagaagaaaatcaaaccgaggtacagagacgttaagtcatttgctccaggacacacaggaaatgacagagctgggacttgagctccatggtggctccgagtctgtgtgttgacccccctgcctgcagcaccgtttatatttggtcctgactatgatttgaagtaggcaggggtttcatgcagaccagcggttcttcagctgtggttcttccccagcgacagcagcagcacctgggaatttgtctgaaagagtgatttgggtggcccacccccagagctcgattctgtgggtcttgaggtgggcccgggaggttctagtgcatgctccagttcgagaaccactggcataggcgagtggtgtagacacgacgtgcgggagaggaatgggaggcagcagaggggtctccatcccagggaagagaggcttcaggggagagaagggggcgcggggggtggaaaggggtcagattcaggccacatttggggttgagccgacagacttggagatggatggggtgttgggggtgaggggaagaaaaaccaaagatgacccctagatgtttggcttctgccagcaagtggatctcagcaccatcctgagtggggaacaccagggaagctggctgggcagggccgaggggtccatgtgaaaatgagggggtggcatgcattcaaggggggctgcccccttgacaattctgctttgcccccctccccaaccctgcattttcccgaggcaagtctctttctgggaacctgactccctctgagaacaggcctggctgagcagcctggggaggagtggttggggcagtagccagggccactgggtggtgtgggggaggggtggtgcacacgctgcaaagtccagtcctgtggcctgtgaagcgagcaacaactgtggtactcggggaacctctgttcctggaaggaatgatcaggcagaggctagctcaccccacaccctggctgtgatgtcctgactccgaaacatctaaagctcagcggggcaaaaaaagata

SEQ ID NO: 723480 - DNA, 1688 bp, Homo sapiens
ggcccaggcaggtcaggggatggggaggctggaatgggaggggccgctcttgaaggatttttggtgaggggatcagaccatggggaccctggtcagggaattgtaagaagagcgggtactacacaggctcttacccagtgctttgcatgttgtaactgatatttttggtaccaacttgtgtgccctcaccattcacccagtggtgaccagcagcaaacacctgtcacttcctgggcttggagactttctcagaccactgtagctgctcttcccatgcaccggcaggctgttcacacagtccctggctagaagcatcytgcaatcaatctctgccaagatgggtggataaatactttggctccctcacctcccggctggaataaacttgatctcagggttattaattgtgcactcttcactggctcccaaagttcccaagaaaagttgagcccacagggataacttaccggctaaggtgccctgtgttgctgtctgccttccccttccctggctcactttccctcctcctctgctagggcttcctgggatcgctcatgttcttgtctcctggtctgctcctgggacaacccagtctgagacacagaattagctcatttagtcctcacagtgatcccagagaggaggcactatcattgctcccattgcagagaagaaaatcaaaccgaggtacagagacgttaagtcatttgctccaggacacacaggaaatgacagagctgggacttgagctccatggtggctccgagtctgtgtgttgacccccctgcctgcagcaccgtttatatttggtcctgactatgatttgaagtaggcaggggtttcatgcagaccagcggttcttcagctgtggttcttccccagcgacagcagcagcacctgggaatttgtctgaaagagtgatttgggtggcccacccccagagctcgattctgtgggtcttgaggtgggcccgggaggttctagtgcatgctccagttcgagaaccactggcataggcgagtggtgtagacacgacgtgcgggagaggaatgggaggcagcagaggggtctccatcccagggaagagaggcttcaggggagagaagggggcgcggggggtggaaaggggtcagattcaggccacatttggggttgagccgacagacttggagatggatggggtgttgggggtgaggggaagaaaaaccaaagatgacccctagatgtttggcttctgccagcaagtggatctcagcaccatcctgagtggggaacaccagggaagctggctgggcagggccgaggggtccatgtgaaaatgagggggtggcatgcattcaaggggggctgcccccttgacaattctgctttgcccccctccccaaccctgcattttcccgaggcaagtctctttctgggaacctgactccctctgagaacaggcctggctgagcagcctggggaggagtggttggggcagtagccagggccactgggtggtgtgggggaggggtggtgcacacgctgcaaagtccagtcctgtggcctgtgaagcgagcaacaactgtggtactcggggaacctctgttcctggaaggaatgatcaggcagaggctagctcaccccacaccctggctgtgatgtcctgactccgaaacatctaaagctcagcggggcaaaaaaagata

SEQ ID NO: 723481 - DNA, 1000 bp, Homo sapiens
gaaaccaggcacggggtgggtgggcacctgcccagagccaagcagcctgggagagggctcagctacccagacagctctgccgcagaacaaggaggaccaggaggcctcgatttacccttcagccccgggtcccacaaagggccaaggtcaggaactgccccttctctgttcttaatctcaccccaggacctgggccaagtaagaggtgagtccccaaggctgccagccacagcctgtgtcagagcctcctggggaggggctgctgaacccctggtcacacccaacttccccgcacagcgcctgggggcggggccttggagctgtgatttgcatccagctccttggcagatgtcagccaccactcacactagggtcttagtgcaggcctggcccccggaatggtgctgctcgtttgagaagacacgagtgtctcaagcagaacacgaggggcccatgagatgtggggtagagtttacaggacrcagagagaaactccgactcagggaaaggcccgggagggctacagggaggaggaggagggcaatgggccaagttaagaggcaggacatccaggcagaaggcactgactgaacggaggccgggaggctggagaggggtgttcctagctgcagtaattagatccttggagcaaacgaggaagaaggtgtaagaaaaggaagatgcgtgggtcgggccagatcttgaaaggccccaagggacaggttaatcggccaggtttccacacccactgggcatcagagtcacctgtgggagttcattccttcactcattcaagaggtgcatattgagtgctactgtgggccagacatagttctcagccctggggagcccgtggggaactgactgatgagacccctaccctggtggagacaggagtgtcatcagaggacagagactgtaattaaagaaataggaaataaaataatggcagatccctctgagtgctcacaagcagatagaccaggacacagtagagagc

SEQ ID NO: 723482 - DNA, 962 bp, Homo sapiens
ggaaaacttgcataattttccttgcatagctctcacaatcttaagccaacatcagaaagtgctgttacattttaaaatattaagtatttttttggcatcatgtacagtcatcaggttacccatatatatattttatatgcaactttaagacatgattaaaataactttttgcatagccttaattaaaaagaaaaatcagtggtaaacctttcactatayaggatcattttgtcagctggccacttcacattattgagtatctactaggcatgtggtacataagcacacagcaagtttacatttgctttcactaaaactgatgtttgaccaaggattctgtaatataagtttgaaacctgctagagttttgcattttaatttttttcatttaatctcattgcattgtgtaagttcttttttgttcttacagttttaaaaaatattttaatcttacagatctaaagcacaacaaataactaaaagcgagaattgttcttgtaaaatgtaaactcccaaaggtttatcatagatatgacttagctgtgttcttatctgtgaatgggaaagcttctgcaatgtctacagaacaattattatcacaaaaattcagaacttgatttacagtaggtgagagacaaggcagtttaaattaataaaatgtttatatagcagaaaattatcctgccatctccatctctacccctaaatctcctcaggtgctaagaaattataattactttgaaaatgtatataaaatactcatagttttaaactgatagtgttaagataatccatgtgattaaattgtctaaatatagaaatattttatttgcattaaaatatgtcatttttaataacttgtgggttaattcataaaagctgatgttttcagaatagattaaaacaaaacaacaaaacacataggtattttccaaagaataagacctagtttaaggaaaagc

SEQ ID NO: 723483 - DNA, 962 bp, Homo sapiens
ggaaaacttgcataattttccttgcatagctctcacaatcttaagccaacatcagaaagtgctgttacattttaaaatattaagtatttttttggcatcatgtacagtcatcaggttacccatatatatattttatatgcaactttaagacatgattaaaataactttttgcatagccttaattaaaaagaaaaatcagtggtaaacctttcactatacaggatcattttgtcagctggccacttcacattattgagtatctactaggcatgtggtacataagcacacagcaagtttacatttgctttcactaaaactgatgtttgaccaaggattctgtaatataagtttgaaacctgctagagttttgcattttaatttttttcatttaatctcattgcattgtgtaagttcttttttgttcttacagttttaaaaaayattttaatcttacagatctaaagcacaacaaataactaaaagcgagaattgttcttgtaaaatgtaaactcccaaaggtttatcatagatatgacttagctgtgttcttatctgtgaatgggaaagcttctgcaatgtctacagaacaattattatcacaaaaattcagaacttgatttacagtaggtgagagacaaggcagtttaaattaataaaatgtttatatagcagaaaattatcctgccatctccatctctacccctaaatctcctcaggtgctaagaaattataattactttgaaaatgtatataaaatactcatagttttaaactgatagtgttaagataatccatgtgattaaattgtctaaatatagaaatattttatttgcattaaaatatgtcatttttaataacttgtgggttaattcataaaagctgatgttttcagaatagattaaaacaaaacaacaaaacacataggtattttccaaagaataagacctagtttaaggaaaagc

SEQ ID NO: 723484 - DNA, 962 bp, Homo sapiens
ggaaaacttgcataattttccttgcatagctctcacaatcttaagccaacatcagaaagtgctgttacattttaaaatattaagtatttttttggcatcatgtacagtcatcaggttacccatatatatattttatatgcaactttaagacatgattaaaataactttttgcatagccttaattaaaaagaaaaatcagtggtaaacctttcactatacaggatcattttgtcagctggccacttcacattattgagtatctactaggcatgtggtacataagcacacagcaagtttacatttgctttcactaaaactgatgtttgaccaaggattctgtaatataagtttgaaacctgctagagttttgcattttaatttttttcatttaatctcattgcattgtgtaagttcttttttgttcttacagttttaaaaaatattttaatcttacagatctaaagcacaacaaataactaaaagcgagaattgttcttgtaaaatgtaaactcccaaaggtttatcatagatatgacttagctgtgttcttatctgtgaatgggaaagcttctgcaatgtstacagaacaattattatcacaaaaattcagaacttgatttacagtaggtgagagacaaggcagtttaaattaataaaatgtttatatagcagaaaattatcctgccatctccatctctacccctaaatctcctcaggtgctaagaaattataattactttgaaaatgtatataaaatactcatagttttaaactgatagtgttaagataatccatgtgattaaattgtctaaatatagaaatattttatttgcattaaaatatgtcatttttaataacttgtgggttaattcataaaagctgatgttttcagaatagattaaaacaaaacaacaaaacacataggtattttccaaagaataagacctagtttaaggaaaagc

SEQ ID NO: 723485 - DNA, 962 bp, Homo sapiens
ggaaaacttgcataattttccttgcatagctctcacaatcttaagccaacatcagaaagtgctgttacattttaaaatattaagtatttttttggcatcatgtacagtcatcaggttacccatatatatattttatatgcaactttaagacatgattaaaataactttttgcatagccttaattaaaaagaaaaatcagtggtaaacctttcactatacaggatcattttgtcagctggccacttcacattattgagtatctactaggcatgtggtacataagcacacagcaagtttacatttgctttcactaaaactgatgtttgaccaaggattctgtaatataagtttgaaacctgctagagttttgcattttaatttttttcatttaatctcattgcattgtgtaagttcttttttgttcttacagttttaaaaaatattttaatcttacagatctaaagcacaacaaataactaaaagcgagaattgttcttgtaaaatgtaaactcccaaaggtttatcatagatatgacttagctgtgttcttatctgtgaatgggaaagcttctgcaatgtctacagaacaattattatcacaaaaattcagaacttgatttacagtaggtgagagacaaggcagtttaaattaataaaatgtttatawagcagaaaattatcctgccatctccatctctacccctaaatctcctcaggtgctaagaaattataattactttgaaaatgtatataaaatactcatagttttaaactgatagtgttaagataatccatgtgattaaattgtctaaatatagaaatattttatttgcattaaaatatgtcatttttaataacttgtgggttaattcataaaagctgatgttttcagaatagattaaaacaaaacaacaaaacacataggtattttccaaagaataagacctagtttaaggaaaagc

SEQ ID NO: 723486 - DNA, 939 bp, Homo sapiens
ccgtggagtatgactgctcaagttacacatgagattaaatagcaaaccactacaaagtgatattcaggttaaagggaactgaagtttcagttcaatttgtcttcctatgaaaccctatatgcaatcaaactagtcaggccaaatctgtcctagggctgtggaatgaaaggaccagaacagggtcattaagagttggcctggtctatcttcctatcttggcactagattataatcaaaagaccaggtgaaaattgggcctcgagtaagttcactaaagaaactgcttcttataaataagtgcttacaatcacaaagacaaagaaaaatgttgtactgtgagatcttggacttgattttctatttctgcttatctttctttttttaatatatattttttattatactttaagttctagggtacatgtgcacaacgtacaggtttgttacatatgtgtacatgtgcacaacgtacaggtttgttacatatgtatacatgtgccatgttggtgtgctgcacccattaactcatcatttacattaggtatatctcctaatgctatccctcccccctacccccaccccacaacaggccccggtgtgtgatgttccccttcctgtgtmcatgtattctcattgttcaattcccacctatgagtgagaatatacggtgtttggtttttttgtccttgcaatagtttgctgagaatgatggtttccagcttcatccgtgtccctacaaaagacatgaactcatcattttttatggctgcatagtattccatggtgtatatgtgccacattttcttaatccagtctatcattgttggacatttgggttggttccaagtctttgctattgtgaatagtgctgcaataaacatatgtgtgcatgtgtctttatagcagcatgatttatattcctttggttatatacccttc

SEQ ID NO: 723487 - DNA, 939 bp, Homo sapiens
ccgtggagtatgactgctcaagttacacatgagattaaatagcaaaccactacaaagtgatattcaggttaaagggaactgaagtttcagttcaatttgtcttcctatgaaaccctatatgcaatcaaactagtcaggccaaatctgtcctagggctgtggaatgaaaggaccagaacagggtcattaagagttggcctggtctatcttcctatcttggcactagattataatcaaaagaccaggtgaaaattgggcctcgagtaagttcactaaagaaactgcttcttataaataagtgcttacaatcacaaagacaaagaaaaatgttgtactgtgagatcttggacttgattttctatttctgcttatctttctttttttaatatatattttttattatactttaagttctagggtacatgtgcacaacgtacaggtttgttacatatgtgtacatgtgcacaacgtacaggtttgttacatatgtatacatgtgccatgttggtgtgctgcacccattaactcatcatttacattaggtatatctcctaatgctatccctcccccctacccccaccccacaacaggccccggtgtgtgatgttccccttcctgtgtccatgtattctcattgttcaattcccacctatgagtgagaatatacggtgtttggtttttttgtccttgcaatagtttgctgagaatgatggtttcyagcttcatccgtgtccctacaaaagacatgaactcatcattttttatggctgcatagtattccatggtgtatatgtgccacattttcttaatccagtctatcattgttggacatttgggttggttccaagtctttgctattgtgaatagtgctgcaataaacatatgtgtgcatgtgtctttatagcagcatgatttatattcctttggttatatacccttc

SEQ ID NO: 723488 - DNA, 595 bp, Homo sapiens
aattccttcatacgttgaccagtgacctgtctatgcacagggaagtttccaggaaagcaaacaaaaagcagcagctggaaggccaaagagccaagcacaaattccagcagctgccagtgctggggagatggattggacttcaagttcccatagttagaggggtatgacaaacacttttgatttcttttaaatatctcagaagggccaaactctagaaataagcattacactctgtgaataatagcaaatctttaaacccaaactctgtacaagaacaagacgaaatctttctgtcaatcaaatgagaattttacctattttggaggaaaataatatcatacagagcctccacagggtttcatccacacagttttacatctgattaaaatttatgagtcatgtttaacaacgaraaaaaggactacctggctaaacactaacaagagttatcaaatagagagagactttaaaatatctgtgattaatatgttaaagaaatcaaaggaggatggattatttaacagagacctggaatccattttaaaaaattaaattataatttaaaaattaaaaaaaagtaatagtgggtttaatg

SEQ ID NO: 723489 - DNA, 595 bp, Homo sapiens
aattccttcatacgttgaccagtgacctgtctatgcacagggaagtttccaggaaagcaaacaaaaagcagcagctggaaggccaaagagccaagcacaaattccagcagctgccagtgctggggagatggattggacttcaagttcccatagttagaggggtatgacaaacacttttgatttcttttaaatatctcagaagggccaaactctagaaataagcattacactctgtgaataatagcaaatctttaaacccaaactctgtacaagaacaagacgaaatctttctgtcaatcaaatgagaattttacctattttggaggaaaataatatcatacagagcctccacagggtttcatccacacagttttacatctgattaaaatttatgagtcatgtttaacaacgagaaaaaggactacctgrctaaacactaacaagagttatcaaatagagagagactttaaaatatctgtgattaatatgttaaagaaatcaaaggaggatggattatttaacagagacctggaatccattttaaaaaattaaattataatttaaaaattaaaaaaaagtaatagtgggtttaatg

SEQ ID NO: 723490 - DNA, 641 bp, Homo sapiens
tccctctaccttcaccaagaatcagttatccccttctggggacagtatcactcccaatgggaatgcatgttcaaatgagtcatcaaggcctactcattttacttctcaaagagaactcatgatcacagatttaaagttacagagaacagatgtgtttactcacctcaattttataagaagactaaaaagactaaaaactccatctaacatgaaactaggatttaaccacatctgtaaataataagctatagaaagcaattttcaaattcagtgaaatctgaaccaaaatgagaggaaatgccaaaaatagwtgcttacttgttcagctattgaacagaatgtgaagctctctaaaataaatgtcacagccttaaaaagtccaatgaaaaattcccttctagaatatgtaagagctaggggaagttttagccctggagcaccttgaaacagtattttatacctcatagtagcagactacatggactcagaagaggaccatctcaggtctgccattctgtggcagaagcagggtattgggggactgtatataggaatcaatgtggcaaaagctattcagtataatttacaaataaactggtatagcatgattttaacgtatgtcttcattatgaaatcctatg

SEQ ID NO: 723491 - DNA, 783 bp, Homo sapiens
tcaaacgtctctcattttgcctgccctcatcccctaagatataaaagattcccccccgtccccccactttggagctcattcttcgcaatatttaaaattgtagctctttgcatgtaatttagaacattctgacccatactcaactgctgggagactctgttatttatwtttaaaatgttgacagtgagttaggaatttggagcagaaaccatatctaagtctaagtgaaaagacttcctaagtattggtagaactaactgtagtggggctgagtcattattacagtactgtacaggctgcgtagctatctgtagaattgataatggtaataccaggttaaagtgttagcgattcttctgctgtttcagaggtcttgaagtttttgcctgtctgctatggagatagggagttctcccccatttgacccccttagcaaagcacaatacttggctccatcagtctttagtctaagaagtgatatataggatcatggtttgacatcatcttgtgctgattctggttggcttaatggaatcaaattggatgaaggtaattaaatatgaattgtttctgatgctaatagatagttgtacttctgtctgttgggtatgggttgggatgggcggtagcatagctgattgcggtgggggaatttcagatagctgatgatgtggctatctgaaaattgccactacatttttaaaactgaaaagtgatggtaccgccaaatgaaatctgcagcatcctcagactcaatcaggaaatacttaagcattatgctcc

SEQ ID NO: 723492 - DNA, 613 bp, Homo sapiens
ttttagaaaaagttcataaaatttccagtaaaaattagatgtaagaagcatttatttagaataagaaaatcacatttaaagactgacatataccacaaacatcacaaaatgtatgaaacataatttttaaattaattgcatgacatgtctttataatacattttcctttatatttttgtaggaaaattttggaagacctttatgaagtytcctttgtatgtcagttattaaaaaatgtagtataggggccggacatggtggctcacactgtaatcccagcgctttgggaggccgaggcgggcagtgggccgatcacatgaggccagagttcgagaccagcctagccaacatctctacttaaaatagaaaaaaattagtcaggcctggtggcacacgcctgttatcccagctactcgggaggctgtggcacaagaatcatttgaacccgggaagtggaggttacagtgagctgagatagtgctactgtgccccagcctgggtgacagagcaagactgttaaaaaatatatatattttttatatatattggcatcaaagatttctctatcagagctgcaccagaggactgcaggtgggtcacactatgtgtatat

SEQ ID NO: 723493 - DNA, 613 bp, Homo sapiens
ttttagaaaaagttcataaaatttccagtaaaaattagatgtaagaagcatttatttagaataagaaaatcacatttaaagactgacatataccacaaacatcacaaaatgtatgaaacataatttttaaattaattgcatgacatgtctttataatacattttcctttatatttttgtaggaaaattttggaagacctttatgaagtttsctttgtatgtcagttattaaaaaatgtagtataggggccggacatggtggctcacactgtaatcccagcgctttgggaggccgaggcgggcagtgggccgatcacatgaggccagagttcgagaccagcctagccaacatctctacttaaaatagaaaaaaattagtcaggcctggtggcacacgcctgttatcccagctactcgggaggctgtggcacaagaatcatttgaacccgggaagtggaggttacagtgagctgagatagtgctactgtgccccagcctgggtgacagagcaagactgttaaaaaatatatatattttttatatatattggcatcaaagatttctctatcagagctgcaccagaggactgcaggtgggtcacactatgtgtatat

SEQ ID NO: 723494 - DNA, 830 bp, Homo sapiens
tttcagaaaaaaaattttagccaagcaccaaactggtcttggtccaaatatatatatggaaagtgctctatgaccatcatgaacaaaggctcagctgctgagaagaaacctttgtgcacagggcccagtatgaacagaggggaagtaggtcaggggaggaccaaggccctgccagcaggggaatggggcccgggctgcaccagtcagccttaagacactcttccggactgcgactcgcaatgggagaaagaaagcgcacccttgaattttctttaacatgccatgcagaaggtgcgctgctgcctctgatttctgtcgatcccatttccatgcccaccccaccccggccatgatgcgctctggccagtaactgatggctcagctaatcccacacacaccttcgtatcctggccatggttgtttctgccaccaggacaaagtcttctgcaggagacagctggactccattcgggaaccgcagctggtccaataaaacttttacttccctggtcacagtatcatactccagcaggctgtggaacaccaaaagcagagggttatgggggagaatccctggctcccactctgggccttcagggtatgggcctgmagaaggtgactccgcctcaccccggagcaacaggccctgggtgccctgctcaaacttgattcgaggctggcccctgggggcccttccccatccacagcagatccagtgtcccctccagggaaccccaaggtcagttatcttgctcacctgggagctggacaggaatacccctcagagaggcaacccaaagcccaggcctggctccggggtctctctcgac

SEQ ID NO: 723495 - DNA, 1350 bp, Homo sapiens
agaatgaatgagtcttagcttggaagtcagaagatttggggttgtcttaagtccaagatagggaaacggaatgattgcctggtaaggtaacgatctctacatcactggaggtatgtaaaccaaagtgtgaagttgccagagagaggcatcttggctgtgggagaaaagtaggtcaattctggtacgatcgtcccctcctgggacagtgagacaagcttcccaggaccagctggggagccctagagaagcccggcactggcaatgtcctgagagtccattcctggagccaagggacccaggcttcctaccgtgtatgtccatttcctgggcaaggcactggatggcaggactttaagcagaggcaggaaagggcaacttccagcctcttgcagaaggcctgattgcgggggcagtcagttgggattgctcagccctgaagcagagactgagaaccccgcctgcctgtgtgaccaccatccatgtccactccctctctgagcttcagtttctccaccggtaaaatgggaagagaatggaccagagagtatttttctcccattcccaaattacagagtttttttttttttttttaagacaggtcttgctgtatcacccaggctggagtgcagtggtgtgatcatagctcactgcagccttgacctcctggactcaggtgatcctcctgccttagcctccctagtaactgggactataggcacaggccaccatgcctggctaattttgtatttttattttttggtagtaacagagtctccctgtgttgtgcaggctggtctcaaactcctggcctcaagcgatcctcctgcctgccctcaagcgatcctcctgccttgggattacaggtgtgagctgccatgtccagtccacagacaacatgtattgagtgctcactacatgccaagcactgggctaagcctgttgcatgtagcatcttgtttacatttcacaataatcaagggggcaggcatctgcctgctttacagatgaggaaaccaaggccctcagcagtaaagtaaattttccaagttcactcagcatgggaatgatagacacaggtttgtaatccaggtcttgttgacatcgaaacctgggatgctagtaaccctaccctgctgcctgtcagtcctgccaggctttccaggacggcccccaccctgagccacatccccaggaacactctgccactccctatccccctcctgggctcataccatgaaagccccatgcagagcctgctactctagagggatatatattatctaaatttgataagacaactcaatttcactccktgtctgttaccggcgataaaaccaggagacttttatg

SEQ ID NO: 723496 - DNA, 1364 bp, Homo sapiens
cagtttggaagctgtcctcatgttcacaaggatattttggtagaaaacctccttttccaggatctccatttgcccgtcgccacttctgtgtactcagtacttttctgtcaacgagagttccaaggagtgagaaagcctgtttttgttttcattttttatgtctattaaaaataaacatgctgagaagctgcctcttagtctctttatcaagccccaaatgacgtgtagcccttgtcaactcmgcgttgacgaatgcaatcagcatttacaaaatcagatttgtaaggcatcgggaataaacttaactaagggcaggtttcccctccattgatcaaaacgggtttttgccgaatgatgggcagtcggtcggtccctcaaagtaagtaagcgtacaggcaggcaggatgctgtccccagcccacccacctgggcccagctcacaggacacctggcaggttcttctgctaagaaagccgagaagcccacctctttatgggtcggcacaaatggggtacatttcatgctgagtcaatttaatcaatacttttcttgctttggaaaccccgagcatttagagagagcaaagccacactacgcagtaaagcagctttaaattctaatgagcttctctgtgctaattaatgactttgctaactggaagctttctttgttagaaaacacactcttgcctttcaagatgacagcttttcctttcccgaatgtcttttattatcaaaccagaaagggaagtactttattcctctcattctgttagaactaatagatttttattacttaaaaaataattttcttttagtaaccagctttgcattttgccctataaaagctagaaagtgcaagagatcaatttctcctaaatcctacctgtcacccgcccggcaggaaacggagttctagagggtaaacacagcctcttctggaatagacacaacagtatgccccctcccgccccctcccattgcacagtgagatttggtaatttgcaaattgagcagccatcattattttttaaggagcaaacagggtctccactcctcactaggagaatgtggcccaatcatttgtctcggcaacgcacgaattctagagcacttgagaattcttagccataaagctgattactaagagagggatggttataaagaaaaaaatctttttaatctggggaggaggggaagggaagatgaagggcaaggaggaaaagatacatagagctcattgctggagttatcagcccgaatcagagcttgaactctaattttttgtgaatcagaattcacacgtgaatgtatgagtggaatttctctctctttctcttttctgccttgttgttgttgctgtct

SEQ ID NO: 723497 - DNA, 1364 bp, Homo sapiens
cagtttggaagctgtcctcatgttcacaaggatattttggtagaaaacctccttttccaggatctccatttgcccgtcgccacttctgtgtactcagtacttttctgtcaacgagagttccaaggagtgagaaagcctgtttttgttttcattttttatgtctattaaaaataaacatgctgagaagctgcctcttagtctctttatcaagccccaaatgacgtgtagcccttgtcaactccgcgttgacgaatgcaatcagcatttacaaaatcagatttgtaaggcatcgggaataaacttaactaagggcaggtttcccctccattgatcaaaacgggtttttgccgaatgatgggcagtcggtcggtccctcaaagtaagtaagcgtacaggcaggcaggatgctgtccccagcccacccacctgggcccagctcacaggacacytggcaggttcttctgctaagaaagccgagaagcccacctctttatgggtcggcacaaatggggtacatttcatgctgagtcaatttaatcaatacttttcttgctttggaaaccccgagcatttagagagagcaaagccacactacgcagtaaagcagctttaaattctaatgagcttctctgtgctaattaatgactttgctaactggaagctttctttgttagaaaacacactcttgcctttcaagatgacagcttttcctttcccgaatgtcttttattatcaaaccagaaagggaagtactttattcctctcattctgttagaactaatagatttttattacttaaaaaataattttcttttagtaaccagctttgcattttgccctataaaagctagaaagtgcaagagatcaatttctcctaaatcctacctgtcacccgcccggcaggaaacggagttctagagggtaaacacagcctcttctggaatagacacaacagtatgccccctcccgccccctcccattgcacagtgagatttggtaatttgcaaattgagcagccatcattattttttaaggagcaaacagggtctccactcctcactaggagaatgtggcccaatcatttgtctcggcaacgcacgaattctagagcacttgagaattcttagccataaagctgattactaagagagggatggttataaagaaaaaaatctttttaatctggggaggaggggaagggaagatgaagggcaaggaggaaaagatacatagagctcattgctggagttatcagcccgaatcagagcttgaactctaattttttgtgaatcagaattcacacgtgaatgtatgagtggaatttctctctctttctcttttctgccttgttgttgttgctgtct

SEQ ID NO: 723498 - DNA, 1364 bp, Homo sapiens
cagtttggaagctgtcctcatgttcacaaggatattttggtagaaaacctccttttccaggatctccatttgcccgtcgccacttctgtgtactcagtacttttctgtcaacgagagttccaaggagtgagaaagcctgtttttgttttcattttttatgtctattaaaaataaacatgctgagaagctgcctcttagtctctttatcaagccccaaatgacgtgtagcccttgtcaactccgcgttgacgaatgcaatcagcatttacaaaatcagatttgtaaggcatcgggaataaacttaactaagggcaggtttcccctccattgatcaaaacgggtttttgccgaatgatgggcagtcggtcggtccctcaaagtaagtaagcgtacaggcaggcaggatgctgtccccagcccacccacctgggcccagctcacaggacacctggcaggttcttctgctaagaaagccgagaagcccacctctttatgggtcggcacaaatggggtacatttcatgctgagtcaatttaatcaatacttttcttgctttggaaaccccgagcatttagagagagcaaagccacactacgcagtaaagcagctttaaattctaatgagcttctctgtgctaattaatgactttgctaactggaagctttctttgttagaaaacacactcttgcctttcaagatgacagcttttcctttcccgaatgtcttttattatcaaaccagaaagggaagtactttattcctctcatyctgttagaactaatagatttttattacttaaaaaataattttcttttagtaaccagctttgcattttgccctataaaagctagaaagtgcaagagatcaatttctcctaaatcctacctgtcacccgcccggcaggaaacggagttctagagggtaaacacagcctcttctggaatagacacaacagtatgccccctcccgccccctcccattgcacagtgagatttggtaatttgcaaattgagcagccatcattattttttaaggagcaaacagggtctccactcctcactaggagaatgtggcccaatcatttgtctcggcaacgcacgaattctagagcacttgagaattcttagccataaagctgattactaagagagggatggttataaagaaaaaaatctttttaatctggggaggaggggaagggaagatgaagggcaaggaggaaaagatacatagagctcattgctggagttatcagcccgaatcagagcttgaactctaattttttgtgaatcagaattcacacgtgaatgtatgagtggaatttctctctctttctcttttctgccttgttgttgttgctgtct

SEQ ID NO: 723499 - DNA, 2882 bp, Homo sapiens
aaataatgtatttctagtataaatttagttcagaaagtcaactttttttggtcatgtgcttcacttcatgggaagagagagcttttctgtttgctcatcctgagggcccctcctccttcctgtcgttctgttttggtgggtcgctattctggagaagctcatgtctcagaggcatccttcttacttaggatgcctgtttataagagacattctggcaccacatgaaatttctctttgtctagcctcaatgtctagaagtcgtcttgccatggggccatgaagtttgttacagtaagttccagcgggaggcaaccggcatgtcaccatgtatgccttctgactgtagctggtgttaatcctggtctacacattcagctgtacaggaatgttaactgtcagtttttcaggtcagtttaatgtctgactctgaaaccccattctgtcagattggcaggaaaagaaagcaagaatcttggtttcagtctccaccttttagaattcagaccattatctgcggttttggataatgtgaccaccttggagactagataacatctggacttggtcagctgaccctcctgtgaaccaccgaggcatcatttttctctgagcatcaaggtacaccgggaccagtaatttgttgctgtttcattatcacctattgggtaacttgtgtcaaaatgcttggtgcatcacactgccaatatccttcctctagagttttgtttttcttcactggaaggaacacaggacccacttttttttttttttttaagtttctttagacactgtgactcatctaatcyttcttttctctccttccttctttattttctttctctctttgtacctttatctcctcccccactagctatctttctttctcttatttttttattttttattttatttttttttgagacacagtctcactctgttgcccacgctgtagtccagtggcatgatcgcagctcactgcaacctctgcctcccgggctcaagcaattctcctgcctcagcctccccactacgtgggattacagacgtgtgccaccacgcccggctaatttttgtatttttaatagagatggggtttcaccatgttggtcaggctggtctcaaactcctgacctcaggtaatccacctgcctcagcctcccaaagtgctgggattacaggtgtgagccactgcgcccagccccttctcttcatcttgtgtccagcaagcatatttacattttgaaactaaacatgcacatgatatgacttcttgctagtgatttgtttccaggatctcctcctagtatatccaaggcaatgtactatttcatgggaggggaatggctttataaagcttttgtatctactctctcacagtaatttctggggagtctggggatttggatgacaactttcttcatttccaaatctgaatcagcattctggtttcttggctatctcatggagatctggaagaataataagtgctgcctttcattaggatacaactgcatctaaaggcctctaatcactttttaggatatatttaaaaaaatctaaacaagggcccccaaataaactacaagctttgtatttttttagaaaaactattatatggaataattaaactgacagagtcaaggggatcttttcaatactaatgaatgaagattgtattattattattattattattattattattattttgagacagagtctcgctctgtcacccaggctggagtgcagtggtgcgatcttggctcactacaagccccacctcccaggttcatgtcattctcctgcctcagcctcccgagtagctgggactacaggcgcctgccaccacgccctgctaattttctttttgtatttttagtagacacagggtttcactgtgttagccaggatggtctcgatctcctgacctcgtgatctgcccaccacgacctcccaaagtgctgggattacaggcgtgagccaccgcacccagccagattggattattaaaaagaaaaacactgatagcaaacagggattccaaatttattctttggcttaaaaaatttcaatattgctgtcatcaggatttctcattttgagctcagttcataatgattctaggtttgatcatattttaaacttgtatcactctaaaatgttaggttaaaacataaaattacagtttatgacagtcaaataatgttgaataacagcaacttcatgtgtttaagtaataggtaaggtttttgctttatgcaccttttagtgagtgtattatacatctatctatggtagacacatttaagaagaggcacgggaggctgaggcatgagaatcacttgaacccgggaggcagaggctgcagtgagctaaaatcacatcactgcactccagcctgggcaacagagtgagactgtctccaaaacaagaaaaaaaaaaaaagaacaagagggaatctttgccattcattttttctgaaatgctattcaaggcagatggtataccactcagatggccagctaggtgacttcttttcccaggaatgtcttgggaacctgcatctattcctcctaacatgtcttccttcctcttcaccagaaaagataacaggcaacctgggagaagtctcttaacaggatgcattttctcatgtttttaaagtgagagctaaaatgttgtattcctaacaaattatgttttgatatttaaaatttccactgaccacatagcaggtccagagcagacatttttccctacatttttcatctcttgaaggtagataactccaaggaactggacgtgtaattcagaaaatttgcaacctttaataaatcatatgggttccttcctagaagaaatgggcttggtttcagttttga

SEQ ID NO: 723500 - DNA, 2882 bp, Homo sapiens
aaataatgtatttctagtataaatttagttcagaaagtcaactttttttggtcatgtgcttcacttcatgggaagagagagcttttctgtttgctcatcctgagggcccctcctccttcctgtcgttctgttttggtgggtcgctattctggagaagctcatgtctcagaggcatccttcttacttaggatgcctgtttataagagacattctggcaccacatgaaatttctctttgtctagcctcaatgtctagaagtcgtcttgccatggggccatgaagtttgttacagtaagttccagcgggaggcaaccggcatgtcaccatgtatgccttctgactgtagctggtgttaatcctggtctacacattcagctgtacaggaatgttaactgtcagtttttcaggtcagtttaatgtctgactctgaaaccccattctgtcagattggcaggaaaagaaagcaagaatcttggtttcagtctccaccttttagaattcagaccattatctgcggttttggataatgtgaccaccttggagactagataacatctggacttggtcagctgaccctcctgtgaaccaccgaggcatcatttttctctgagcatcaaggtacaccgggaccagtaatttgttgctgtttcattatcacctattgggtaacttgtgtcaaaatgcttggtgcatcacactgccaatatccttcctctagagttttgtttttcttcactggaaggaacacaggacccacttttttttttttttttaagtttctttagacactgtgactcatctaatccttcttttctctccttccttctttattttctttctctctttgtacctttatctcctcccccactagctatctttctttctcttatttttttattttttattttatttttttttgagacacagtctcactctgttgcccacgctgtagtccagtggcatgatcgcagctcactgcaacctctgcctcccgggctcaagcaattctcctgcctcagcctccccactacgtgggattacagacgtgtgccaccacgcccggctaatttttgtatttttaatagagatggggtttcaccatgttggtcaggctggtctcaaactcctgacctcaggtaatccacctgcctcagcctcccaaagtgctgggattacaggtgtgagccactgcgcccagccccttctcttcatcttgtgtccagcaagcatatttacattttgaaactaaacatgcacatgatatgacttcttgctagtgatttgtttccaggatctcctcctagtatatccaaggcaatgtactatttcatgggaggggaatggctttataaagcttttgtatctactctctcacagtaatttctggggagtctggggatttggatgacaactttcttcatttccaaatctgaatcagcattctggtttcttggctatctcatggagatctggaagaataataagtgctgcctttcattaggatacaactgcatctaaaggcctctaatcactttttaggatatatttaaaaaaatctaaacaagggcccccaaataaactacaagctttgtatttttttagaaaaactattatatggaataattaaactgacagagtcaaggggatcttttcaatactaatgaatgaagattgtattattattattattattattattattattattttgagacagagtctcgctctgtcacccaggctggagtgcagtggtgcgatcttggctcactacaagccccacctcccaggttcatgtcattctcctgcctcagcctcccgagtagctgggactacaggcgcctgccaccacgccctgctaattttctttttgtatttttagtagacacagggtttcactgtgttagccaggatggtctcgatctcctgacctcgtgatctgcccaccacgacctcccaaagtgctgggattacaggcgtgagccaccgcacccagccagattggattattaaaaagaaaaacactgatagcaaacagggattccaaatttattctttggcttaaaaaatttcaatattgctgtcatcaggatttctcattttgagctcagttcataatgattctaggtttgatcatattttaaacttgtatcactctaaaatgttaggttaaaacataaaattacagtttatgacagtcaaataatgttgaataacagcaacttcatgtgtttaagtaataggtaaggtttttgctttatgcaccttttagkgagtgtattatacatctatctatggtagacacatttaagaagaggcacgggaggctgaggcatgagaatcacttgaacccgggaggcagaggctgcagtgagctaaaatcacatcactgcactccagcctgggcaacagagtgagactgtctccaaaacaagaaaaaaaaaaaaagaacaagagggaatctttgccattcattttttctgaaatgctattcaaggcagatggtataccactcagatggccagctaggtgacttcttttcccaggaatgtcttgggaacctgcatctattcctcctaacatgtcttccttcctcttcaccagaaaagataacaggcaacctgggagaagtctcttaacaggatgcattttctcatgtttttaaagtgagagctaaaatgttgtattcctaacaaattatgttttgatatttaaaatttccactgaccacatagcaggtccagagcagacatttttccctacatttttcatctcttgaaggtagataactccaaggaactggacgtgtaattcagaaaatttgcaacctttaataaatcatatgggttccttcctagaagaaatgggcttggtttcagttttga

SEQ ID NO: 723501 - DNA, 1212 bp, Homo sapiens
acttttttttattttaactaagaaaattagttattcttatatttcaaccaggggccaagttcaaatgcgtatggtggctgggtaggaaatggtccacgtgtgaggttgggcctacctggagggcagtggggtccatggagactggggagcagagcccctgtcgaatgggcaaattcactcaaatccggccaaatgaggctatatgggartgtggggtcccaaagtttctaaatcttcagtttttgtttttgtgtttttgattaattagaagctagaacttctagtgtgtgcaatgtcccagtttttaagaattgaaactaatgaaaaagaatcttgtgttggttaataccttgtaggtcagagaatagaagaaaatgtcagtgagccaaaatcagcagtaggccttccatttaaaccctccaagttaaattgggttgctatggagattgttaattgtatattagccattaataatattattttataagtggagagagacaaagtgatgcttgtgtaacatggtggcacctactgaccatatgattcccagggtagggtaaggcgatctttcttccattaattctgcttttctaatcagttaatatttttactccttttttttttccctgagactttaaagctctgaccccttaattcatcttctttagcaccaacagtgtggggagtttcataatagcctgacagtccagtaaatacctttgtccagatgttactaatagactgatagatgtgaaacttgatcacagttatctggaaagactgaaaatgccgtgaccttagtctttgcatgaaggtcccttaaaatagtttttggtttttggttatgaatcaaccttcttatagaaaaccaaactgatggaattattgcttttgtgctgtaacattatttgatatgtaacatctaacatctgtcaaaacaggaaagttatctcttcaagtggcagcagcagattggatgcaacatttaagcaatgacaaatggttgttgaagtcaagtgacttagagaaagaacttaaagggaaatagaaaatagagactttcctcatgggaggttgtgtccctgaaggttaaaactatgtgtcatggaattcagattcagacctaagtctgaatctcaccttctgccacttatcagctgcataagtttagataagtaactttaactgttgtttgtttcctcatctctcaga

SEQ ID NO: 723502 - DNA, 1841 bp, Homo sapiens
atcaataacatcctggctaacacggtgaaatcccgtctctactaaaaatacaaaaattagtcccagctactcgggaggctgaggtaggagaatggcatgaacccaggaggcggagcttgcagtgagccgagattgcgccactgcactccagcctgggtgacaggacagggcgagactccatctcaaaaaaamaaaaaaaaaaaaaaaaaaaaaacaaacaaaaaaaaaaaaacaaactcagcaagcataggtaaggaaaggaatagttgtgggagttaattccaatatattctgggatgtatcatttggctctttctgtagaaactcaagatgtaaaatcccttcctgtgacatgatatctcatctgaattggaaagtgggagaaggaggcagaaaatctggtcacgcagcacattggcccggctacgcacaggcaatcaagggtacaaacattggcatttccagagcaaggacctggctggccccagacagatgcgtcaaatgaccccagcatacttctttcacggcagtttcagacatgtaccagtatcaagggggctgctggaatcaagggaatttgggaaagtggttaaggtttgtgtttcataaaataatctgaattttacaaaataacaacaaagcaataagtaacaatgagtaacagatttgtcaggaattgtcaaatgcagatgaacacaaaaaacatggtgattttaagttggctgtaaaagacaggcatcgtcttttataatatgactctcaagatttggttttacactaatcaacattttatgcaacatgagacattgcaatgctattttgatcctattttctacattggcattcatatcacaggctctgcaattagcatagtgaagaattttatgcttcaagtgatgtactgaccacattctgggtgaaaaacgatagtcccaaaggacaaccagcagtgcttttacaactcagctggaaattttgcaggaaataatgtatacgattaatagttttttaatatttttttcttattcaaactaacaatcagcttaatttagatccttgagattctccaatgtgttcgctaaaaccagctttaaaatcctcatggttgtcaatgttaggaaaatatccttacaaaaacaaagaggtgtcataatttggagactccttatttcagctctttctgtgttagcaaacagagttcaattgtggaagaaagaaaaagagaagatgtgcttaaaaagaaagatttgtttttttcatttgacgcacaaagatgttgcagcaaagatagcagatttgtaaaaaatcctggtttaccaaagagtatgagagagtggaatattgtattttctcttgacttcacactatcaggatcttctggtgcagaaagaagcagaggagattccctgataatttcttattgatagagccaatccagttcctgttgttccagtctatcccatcacagaggagtagtacagttgcaacaaggatgttgtaaataaataaatcttctcctattcaatgggcacaaattaatggtaaatttacttaaacgctaagttgcctaacaaagttaatatttgggccagctttgattaaattgttaccacctactgagtgtttttacatgccagacactgttctaaatatttataaaaattttaatcctcacaataactgtaaaaggtaagtactactattaatccaattttatgaagaaggaaacttaagaacttatataactttctcagggtcacacaggcagagctgggatttgagcagtctggggccagcggtttcctcttagctaaaaccaatagtttcttctgtttttgttt

SEQ ID NO: 723503 - DNA, 1841 bp, Homo sapiens
atcaataacatcctggctaacacggtgaaatcccgtctctactaaaaatacaaaaattagtcccagctactcgggaggctgaggtaggagaatggcatgaacccaggaggcggagcttgcagtgagccgagattgcgccactgcactccagcctgggtgacaggacagggcgagactccatctcaaaaaaaaaaamaaaaaaaaaaaaaaaaaacaaacaaaaaaaaaaaaacaaactcagcaagcataggtaaggaaaggaatagttgtgggagttaattccaatatattctgggatgtatcatttggctctttctgtagaaactcaagatgtaaaatcccttcctgtgacatgatatctcatctgaattggaaagtgggagaaggaggcagaaaatctggtcacgcagcacattggcccggctacgcacaggcaatcaagggtacaaacattggcatttccagagcaaggacctggctggccccagacagatgcgtcaaatgaccccagcatacttctttcacggcagtttcagacatgtaccagtatcaagggggctgctggaatcaagggaatttgggaaagtggttaaggtttgtgtttcataaaataatctgaattttacaaaataacaacaaagcaataagtaacaatgagtaacagatttgtcaggaattgtcaaatgcagatgaacacaaaaaacatggtgattttaagttggctgtaaaagacaggcatcgtcttttataatatgactctcaagatttggttttacactaatcaacattttatgcaacatgagacattgcaatgctattttgatcctattttctacattggcattcatatcacaggctctgcaattagcatagtgaagaattttatgcttcaagtgatgtactgaccacattctgggtgaaaaacgatagtcccaaaggacaaccagcagtgcttttacaactcagctggaaattttgcaggaaataatgtatacgattaatagttttttaatatttttttcttattcaaactaacaatcagcttaatttagatccttgagattctccaatgtgttcgctaaaaccagctttaaaatcctcatggttgtcaatgttaggaaaatatccttacaaaaacaaagaggtgtcataatttggagactccttatttcagctctttctgtgttagcaaacagagttcaattgtggaagaaagaaaaagagaagatgtgcttaaaaagaaagatttgtttttttcatttgacgcacaaagatgttgcagcaaagatagcagatttgtaaaaaatcctggtttaccaaagagtatgagagagtggaatattgtattttctcttgacttcacactatcaggatcttctggtgcagaaagaagcagaggagattccctgataatttcttattgatagagccaatccagttcctgttgttccagtctatcccatcacagaggagtagtacagttgcaacaaggatgttgtaaataaataaatcttctcctattcaatgggcacaaattaatggtaaatttacttaaacgctaagttgcctaacaaagttaatatttgggccagctttgattaaattgttaccacctactgagtgtttttacatgccagacactgttctaaatatttataaaaattttaatcctcacaataactgtaaaaggtaagtactactattaatccaattttatgaagaaggaaacttaagaacttatataactttctcagggtcacacaggcagagctgggatttgagcagtctggggccagcggtttcctcttagctaaaaccaatagtttcttctgtttttgttt

SEQ ID NO: 723504 - DNA, 1841 bp, Homo sapiens
atcaataacatcctggctaacacggtgaaatcccgtctctactaaaaatacaaaaattagtcccagctactcgggaggctgaggtaggagaatggcatgaacccaggaggcggagcttgcagtgagccgagattgcgccactgcactccagcctgggtgacaggacagggcgagactccatctcaaaaaaaaaaaaaaamaaaaaaaaaaaaaacaaacaaaaaaaaaaaaacaaactcagcaagcataggtaaggaaaggaatagttgtgggagttaattccaatatattctgggatgtatcatttggctctttctgtagaaactcaagatgtaaaatcccttcctgtgacatgatatctcatctgaattggaaagtgggagaaggaggcagaaaatctggtcacgcagcacattggcccggctacgcacaggcaatcaagggtacaaacattggcatttccagagcaaggacctggctggccccagacagatgcgtcaaatgaccccagcatacttctttcacggcagtttcagacatgtaccagtatcaagggggctgctggaatcaagggaatttgggaaagtggttaaggtttgtgtttcataaaataatctgaattttacaaaataacaacaaagcaataagtaacaatgagtaacagatttgtcaggaattgtcaaatgcagatgaacacaaaaaacatggtgattttaagttggctgtaaaagacaggcatcgtcttttataatatgactctcaagatttggttttacactaatcaacattttatgcaacatgagacattgcaatgctattttgatcctattttctacattggcattcatatcacaggctctgcaattagcatagtgaagaattttatgcttcaagtgatgtactgaccacattctgggtgaaaaacgatagtcccaaaggacaaccagcagtgcttttacaactcagctggaaattttgcaggaaataatgtatacgattaatagttttttaatatttttttcttattcaaactaacaatcagcttaatttagatccttgagattctccaatgtgttcgctaaaaccagctttaaaatcctcatggttgtcaatgttaggaaaatatccttacaaaaacaaagaggtgtcataatttggagactccttatttcagctctttctgtgttagcaaacagagttcaattgtggaagaaagaaaaagagaagatgtgcttaaaaagaaagatttgtttttttcatttgacgcacaaagatgttgcagcaaagatagcagatttgtaaaaaatcctggtttaccaaagagtatgagagagtggaatattgtattttctcttgacttcacactatcaggatcttctggtgcagaaagaagcagaggagattccctgataatttcttattgatagagccaatccagttcctgttgttccagtctatcccatcacagaggagtagtacagttgcaacaaggatgttgtaaataaataaatcttctcctattcaatgggcacaaattaatggtaaatttacttaaacgctaagttgcctaacaaagttaatatttgggccagctttgattaaattgttaccacctactgagtgtttttacatgccagacactgttctaaatatttataaaaattttaatcctcacaataactgtaaaaggtaagtactactattaatccaattttatgaagaaggaaacttaagaacttatataactttctcagggtcacacaggcagagctgggatttgagcagtctggggccagcggtttcctcttagctaaaaccaatagtttcttctgtttttgttt

SEQ ID NO: 723505 - DNA, 1841 bp, Homo sapiens
atcaataacatcctggctaacacggtgaaatcccgtctctactaaaaatacaaaaattagtcccagctactcgggaggctgaggtaggagaatggcatgaacccaggaggcggagcttgcagtgagccgagattgcgccactgcactccagcctgggtgacaggacagggcgagactccatctcaaaaaaaaaaaaaaaaaaamaaaaaaaaaacaaacaaaaaaaaaaaaacaaactcagcaagcataggtaaggaaaggaatagttgtgggagttaattccaatatattctgggatgtatcatttggctctttctgtagaaactcaagatgtaaaatcccttcctgtgacatgatatctcatctgaattggaaagtgggagaaggaggcagaaaatctggtcacgcagcacattggcccggctacgcacaggcaatcaagggtacaaacattggcatttccagagcaaggacctggctggccccagacagatgcgtcaaatgaccccagcatacttctttcacggcagtttcagacatgtaccagtatcaagggggctgctggaatcaagggaatttgggaaagtggttaaggtttgtgtttcataaaataatctgaattttacaaaataacaacaaagcaataagtaacaatgagtaacagatttgtcaggaattgtcaaatgcagatgaacacaaaaaacatggtgattttaagttggctgtaaaagacaggcatcgtcttttataatatgactctcaagatttggttttacactaatcaacattttatgcaacatgagacattgcaatgctattttgatcctattttctacattggcattcatatcacaggctctgcaattagcatagtgaagaattttatgcttcaagtgatgtactgaccacattctgggtgaaaaacgatagtcccaaaggacaaccagcagtgcttttacaactcagctggaaattttgcaggaaataatgtatacgattaatagttttttaatatttttttcttattcaaactaacaatcagcttaatttagatccttgagattctccaatgtgttcgctaaaaccagctttaaaatcctcatggttgtcaatgttaggaaaatatccttacaaaaacaaagaggtgtcataatttggagactccttatttcagctctttctgtgttagcaaacagagttcaattgtggaagaaagaaaaagagaagatgtgcttaaaaagaaagatttgtttttttcatttgacgcacaaagatgttgcagcaaagatagcagatttgtaaaaaatcctggtttaccaaagagtatgagagagtggaatattgtattttctcttgacttcacactatcaggatcttctggtgcagaaagaagcagaggagattccctgataatttcttattgatagagccaatccagttcctgttgttccagtctatcccatcacagaggagtagtacagttgcaacaaggatgttgtaaataaataaatcttctcctattcaatgggcacaaattaatggtaaatttacttaaacgctaagttgcctaacaaagttaatatttgggccagctttgattaaattgttaccacctactgagtgtttttacatgccagacactgttctaaatatttataaaaattttaatcctcacaataactgtaaaaggtaagtactactattaatccaattttatgaagaaggaaacttaagaacttatataactttctcagggtcacacaggcagagctgggatttgagcagtctggggccagcggtttcctcttagctaaaaccaatagtttcttctgtttttgttt

SEQ ID NO: 723506 - DNA, 1841 bp, Homo sapiens
atcaataacatcctggctaacacggtgaaatcccgtctctactaaaaatacaaaaattagtcccagctactcgggaggctgaggtaggagaatggcatgaacccaggaggcggagcttgcagtgagccgagattgcgccactgcactccagcctgggtgacaggacagggcgagactccatctcaaaaaaaaaaaaaaaaaaaaaaamaaaaaacaaacaaaaaaaaaaaaacaaactcagcaagcataggtaaggaaaggaatagttgtgggagttaattccaatatattctgggatgtatcatttggctctttctgtagaaactcaagatgtaaaatcccttcctgtgacatgatatctcatctgaattggaaagtgggagaaggaggcagaaaatctggtcacgcagcacattggcccggctacgcacaggcaatcaagggtacaaacattggcatttccagagcaaggacctggctggccccagacagatgcgtcaaatgaccccagcatacttctttcacggcagtttcagacatgtaccagtatcaagggggctgctggaatcaagggaatttgggaaagtggttaaggtttgtgtttcataaaataatctgaattttacaaaataacaacaaagcaataagtaacaatgagtaacagatttgtcaggaattgtcaaatgcagatgaacacaaaaaacatggtgattttaagttggctgtaaaagacaggcatcgtcttttataatatgactctcaagatttggttttacactaatcaacattttatgcaacatgagacattgcaatgctattttgatcctattttctacattggcattcatatcacaggctctgcaattagcatagtgaagaattttatgcttcaagtgatgtactgaccacattctgggtgaaaaacgatagtcccaaaggacaaccagcagtgcttttacaactcagctggaaattttgcaggaaataatgtatacgattaatagttttttaatatttttttcttattcaaactaacaatcagcttaatttagatccttgagattctccaatgtgttcgctaaaaccagctttaaaatcctcatggttgtcaatgttaggaaaatatccttacaaaaacaaagaggtgtcataatttggagactccttatttcagctctttctgtgttagcaaacagagttcaattgtggaagaaagaaaaagagaagatgtgcttaaaaagaaagatttgtttttttcatttgacgcacaaagatgttgcagcaaagatagcagatttgtaaaaaatcctggtttaccaaagagtatgagagagtggaatattgtattttctcttgacttcacactatcaggatcttctggtgcagaaagaagcagaggagattccctgataatttcttattgatagagccaatccagttcctgttgttccagtctatcccatcacagaggagtagtacagttgcaacaaggatgttgtaaataaataaatcttctcctattcaatgggcacaaattaatggtaaatttacttaaacgctaagttgcctaacaaagttaatatttgggccagctttgattaaattgttaccacctactgagtgtttttacatgccagacactgttctaaatatttataaaaattttaatcctcacaataactgtaaaaggtaagtactactattaatccaattttatgaagaaggaaacttaagaacttatataactttctcagggtcacacaggcagagctgggatttgagcagtctggggccagcggtttcctcttagctaaaaccaatagtttcttctgtttttgttt

SEQ ID NO: 723507 - DNA, 623 bp, Homo sapiens
cctattaacatagacaacacttcactgaagctgaagtataagaaattttctacttgatgtgttttatatcctattattttccttgcacatcacatgcctctctgaggggcacaggagaatgtgtctggggwaaggttttggggagggttcccaccatttaaaagggagagagagactgactcataaaggaatccgtcggaaccctctgctctccccggaggtcctgactcccaagagcgagctctctcttgctccagaaacttcttttgcagccacgaactccttgccagcctctctaggatagccatgtgtctggctatctgcagtgctgctgtgtgtcaccatggcttggggcttcctcaccatggctgggggcaggattgataggtttccccgtccagtctttctgctgttcattatttgtgggggaggctgcaggcagggcaaaccttaattagctccaagtgtgagtgggtcaaatcaattactactgcactctcccaaacaacatcactacaaccatgatttcgctcatttccactagatgggagaagtcagaattgcccattgtgcacacagactattcacagcaataaagaaaagtgagtgaagtatatacaagc

SEQ ID NO: 723508 - DNA, 2187 bp, Homo sapiens
aaatataaggctcaaagaaggggtaggtaattggagtttatatagaatccctgggctacagaaaggaatagaggtttggggtctctggctgggaggtggtgacaggttatggaaaggtgaggggaggaaatgtatgatgaacaaaggctatcttgttataccgatagaaagcctcaggagtagtaaaagttgtttcagtgcatctctcagaagaatctgtgatcacctgtgacagagtctgtctgggtaaggtatcacctccaatcttacctcctgtgataagatcttctctgtttcatgagattcctatgacaattattttcctttatagatatagatttcttttacaaaagaacagctattcagaggcacttctgtgtctgcaacttctcagaataaccagctcaaaatatgccaaagaagtacattctggggtggcatgttctggtctcctaccatcatattttggggtgaagtgtcttgagccccaacggcatcaagtatgaacttggagccagggctttggtgtacatttctgtaatttgtgcttcacacaaacaattccacctataaggccagaagggctgggaaacagggcatttccctccctgaaccttacaacctgctggatgctatgcccacatgagggaggggtgccttctaattcacagcaagatgccttctgctaccaagtgctgtggcctctctctgcctgaggggtggagtgaggaacatctgcccatgggtagtagcaccttgtaaaatctaaaaggtggggaggcaaagaggacacgcactgcatcttcttcccttgcacttccttttactactagaatgagagtttcctctttccgtgatgctctaatattcctagtcaggccaagctattgctaatcagaacattctccggctctccagtcttctttattagactggcctctacagggctggagtctcttttctgacagtgccactgaatcagctgtctgaagaacccttgcgggagactgatggaccttcacagacaccgtttctctaggtcagctcagtttaccccaaggccacaggcattactgcctcctttaacacagcactgcttttaaacatttctttccccccacttagtccccagagacttagagttaacttgaataaattcccctaatctgagattgaaaagacagaaaagatagaaatcttttcttccttcaaaatacttaacatatatttgtgggacagaagaatttccatagatataatatatgcataaaatgtcactgttaaagtaatcctcaggggaaagatttttcatttgtgactttacttagccatgtcatattgagacaggattttattctgattggtagtttttggttttctctttctgtttagtaatgaatactggtaaacctcccagctacaaatatctcctgatatgttaaagaaacagagtcttccatagctgtagtgggtgcacagctgtgggaacgcaatgtggcctctcatacactccaggagctgttcctccaccccttccatgaaggaaaggtgatgccttmacccttttggagaggtgagcagtcttgaagccctcaataatatccaccagcaccccagtgaaaatgggaaataagacaggaacttggagaactcccattgagaaaagatcctagaaatcacagcagagtggcagggtctttctcaactgtgtccaagtggaaatggggttgtgtacaaatagggccccctcatataacacgcaactgactccagggcacacccatacttttaacgtctgattgctttcaagaatgctgtgaaaagttgttgcgagatacatgggattgagacttctgcagtaaagggttgaggttagacactgagtaacttcttgtcagtaaaaggaattaaacactgcctcaggagatggtataattatctcctggggaggtgactttttgtcttgaatgattaggtgaagtccaatgagaatctaagaggctggatgaaaattcttggaaattaagccacaactgaaaaaaggagccaaataaataaggccttctctggggcctcataccgtgtaccaagggtcgaagaagtaaagtttgcctgactcatgattctagcttagaaggcaggaatcctgctttgttttatttgaattattgcattgatattcacaac

SEQ ID NO: 723509 - DNA, 2187 bp, Homo sapiens
aaatataaggctcaaagaaggggtaggtaattggagtttatatagaatccctgggctacagaaaggaatagaggtttggggtctctggctgggaggtggtgacaggttatggaaaggtgaggggaggaaatgtatgatgaacaaaggctatcttgttataccgatagaaagcctcaggagtagtaaaagttgtttcagtgcatctctcagaagaatctgtgatcacctgtgacagagtctgtctgggtaaggtatcacctccaatcttacctcctgtgataagatcttctctgtttcatgagattcctatgacaattattttcctttatagatatagatttcttttacaaaagaacagctattcagaggcacttctgtgtctgcaacttctcagaataaccagctcaaaatatgccaaagaagtacattctggggtggcatgttctggtctcctaccatcatattttggggtgaagtgtcttgagccccaacggcatcaagtatgaacttggagccagggctttggtgtacatttctgtaatttgtgcttcacacaaacaattccacctataaggccagaagggctgggaaacagggcatttccctccctgaaccttacaacctgctggatgctatgcccacatgagggaggggtgccttctaattcacagcaagatgccttctgctaccaagtgctgtggcctctctctgcctgaggggtggagtgaggaacatctgcccatgggtagtagcaccttgtaaaatctaaaaggtggggaggcaaagaggacacgcactgcatcttcttcccttgcacttccttttactactagaatgagagtttcctctttccgtgatgctctaatattcctagtcaggccaagctattgctaatcagaacattctccggctctccagtcttctttattagactggcctctacagggctggagtctcttttctgacagtgccactgaatcagctgtctgaagaacccttgcgggagactgatggaccttcacagacaccgtttctctaggtcagctcagtttaccccaaggccacaggcattactgcctcctttaacacagcactgcttttaaacatttctttccccccacttagtccccagagacttagagttaacttgaataaattcccctaatctgagattgaaaagacagaaaagatagaaatcttttcttccttcaaaatacttaacatatatttgtgggacagaagaatttccatagatataatatatgcataaaatgtcactgttaaagtaatcctcaggggaaagatttttcatttgtgactttacttagccatgtcatattgagacaggattttattctgattggtagtttttggttttctctttctgtttagtaatgaatactggtaaacctcccagctacaaatatctcctgatatgttaaagaaacagagtcttccatagctgtagtgggtgcacagctgtgggaacgcaatgtggcctctcatacactccaggagctgttcctccaccccttccatgaaggaaaggtgatgccttaacccttttggagaggtgagcagtcttgaagccctcaataatatccaccagcaccccagygaaaatgggaaataagacaggaacttggagaactcccattgagaaaagatcctagaaatcacagcagagtggcagggtctttctcaactgtgtccaagtggaaatggggttgtgtacaaatagggccccctcatataacacgcaactgactccagggcacacccatacttttaacgtctgattgctttcaagaatgctgtgaaaagttgttgcgagatacatgggattgagacttctgcagtaaagggttgaggttagacactgagtaacttcttgtcagtaaaaggaattaaacactgcctcaggagatggtataattatctcctggggaggtgactttttgtcttgaatgattaggtgaagtccaatgagaatctaagaggctggatgaaaattcttggaaattaagccacaactgaaaaaaggagccaaataaataaggccttctctggggcctcataccgtgtaccaagggtcgaagaagtaaagtttgcctgactcatgattctagcttagaaggcaggaatcctgctttgttttatttgaattattgcattgatattcacaac

SEQ ID NO: 723510 - DNA, 880 bp, Homo sapiens
ttttttkttttttttttttagacggagtctcgttgttacgcggctggagtacagtggcgcaatctcggctcactgcaaccttcatctcttgggttcaagcgattctcctgcctcagcctcccgagtagctgggactacaggtgtgtaccaccacacccagctagcttttgtatttttagtagagacggggtttcaccatgttggccaggatgatctcgatctcctgacctcgtgatctgcctgcctcagcctcccaaagttgtaatcactctcttgtttttctttatcactcaaggttcatttctaaacactacagttcattttgtctgttttgaagatgtgttgtttagtccatcaccctccattgtctttttttccttgcaatttatctgttgaagaaagcaggacatgtgacctacagagtttcccagtcttcattttgctgattgtatccaatgttgcagtttataatgcacctggataatttttttcctataaattgataattggtctataggcttcatttaattcagcttctttccttccttctttcctctctccctaccccctctcttttcctccttttttccttcctccttcattctcatcccttcctccttttttggtccctccctctatctctctgtcctcctttctcctcttccttctttctgtctctctgtaatactacttcatagatggtgttttgtacttctatcaggaagatcataatgtctttctctcttcttgaaagcttagcagtcattaatattcagtaactagattaatttattgggattgaaaaatgatattttaattcaaacattccttcatttattagttagaatacttctattttttggttatccagtggtattgt

SEQ ID NO: 723511 - DNA, 880 bp, Homo sapiens
ttttttgttttttttttttagacggagtctcgttgttacgcggctggagtacagtggcgcaatctcggctcactgcaacctycatctcttgggttcaagcgattctcctgcctcagcctcccgagtagctgggactacaggtgtgtaccaccacacccagctagcttttgtatttttagtagagacggggtttcaccatgttggccaggatgatctcgatctcctgacctcgtgatctgcctgcctcagcctcccaaagttgtaatcactctcttgtttttctttatcactcaaggttcatttctaaacactacagttcattttgtctgttttgaagatgtgttgtttagtccatcaccctccattgtctttttttccttgcaatttatctgttgaagaaagcaggacatgtgacctacagagtttcccagtcttcattttgctgattgtatccaatgttgcagtttataatgcacctggataatttttttcctataaattgataattggtctataggcttcatttaattcagcttctttccttccttctttcctctctccctaccccctctcttttcctccttttttccttcctccttcattctcatcccttcctccttttttggtccctccctctatctctctgtcctcctttctcctcttccttctttctgtctctctgtaatactacttcatagatggtgttttgtacttctatcaggaagatcataatgtctttctctcttcttgaaagcttagcagtcattaatattcagtaactagattaatttattgggattgaaaaatgatattttaattcaaacattccttcatttattagttagaatacttctattttttggttatccagtggtattgt

SEQ ID NO: 723512 - DNA, 880 bp, Homo sapiens
ttttttgttttttttttttagacggagtctcgttgttacgcggctggagtacagtggcgcaatctcggctcactgcaaccttcatctcttgggttcaagcrattctcctgcctcagcctcccgagtagctgggactacaggtgtgtaccaccacacccagctagcttttgtatttttagtagagacggggtttcaccatgttggccaggatgatctcgatctcctgacctcgtgatctgcctgcctcagcctcccaaagttgtaatcactctcttgtttttctttatcactcaaggttcatttctaaacactacagttcattttgtctgttttgaagatgtgttgtttagtccatcaccctccattgtctttttttccttgcaatttatctgttgaagaaagcaggacatgtgacctacagagtttcccagtcttcattttgctgattgtatccaatgttgcagtttataatgcacctggataatttttttcctataaattgataattggtctataggcttcatttaattcagcttctttccttccttctttcctctctccctaccccctctcttttcctccttttttccttcctccttcattctcatcccttcctccttttttggtccctccctctatctctctgtcctcctttctcctcttccttctttctgtctctctgtaatactacttcatagatggtgttttgtacttctatcaggaagatcataatgtctttctctcttcttgaaagcttagcagtcattaatattcagtaactagattaatttattgggattgaaaaatgatattttaattcaaacattccttcatttattagttagaatacttctattttttggttatccagtggtattgt

SEQ ID NO: 723513 - DNA, 880 bp, Homo sapiens
ttttttgttttttttttttagacggagtctcgttgttacgcggctggagtacagtggcgcaatctcggctcactgcaaccttcatctcttgggttcaagcgattctcctgcctcagcctcccgagtagctgggactacaggtgtgtaccaccacacccagctagcttttgtatttttagtagagacggggtttcaccatgttggccaggatgatctcgatctcctgacctcgtgatctgcctgcctcagcctcccaaagttgtaatcactctcttgtttttctttatcactcaaggttcatttctaaacactacagttcattttgtctgttttgaagatgtgttgtttagtccatcaccctccattgtctttttttccttgcaatttatctgttgaagaaagcaggacatgtgacctacagagtttcccagtcttcattttgctgattgtatccaatgttgcagtttataatgcacctkgataatttttttcctataaattgataattggtctataggcttcatttaattcagcttctttccttccttctttcctctctccctaccccctctcttttcctccttttttccttcctccttcattctcatcccttcctccttttttggtccctccctctatctctctgtcctcctttctcctcttccttctttctgtctctctgtaatactacttcatagatggtgttttgtacttctatcaggaagatcataatgtctttctctcttcttgaaagcttagcagtcattaatattcagtaactagattaatttattgggattgaaaaatgatattttaattcaaacattccttcatttattagttagaatacttctattttttggttatccagtggtattgt

SEQ ID NO: 723514 - DNA, 880 bp, Homo sapiens
ttttttgttttttttttttagacggagtctcgttgttacgcggctggagtacagtggcgcaatctcggctcactgcaaccttcatctcttgggttcaagcgattctcctgcctcagcctcccgagtagctgggactacaggtgtgtaccaccacacccagctagcttttgtatttttagtagagacggggtttcaccatgttggccaggatgatctcgatctcctgacctcgtgatctgcctgcctcagcctcccaaagttgtaatcactctcttgtttttctttatcactcaaggttcatttctaaacactacagttcattttgtctgttttgaagatgtgttgtttagtccatcaccctccattgtctttttttccttgcaatttatctgttgaagaaagcaggacatgtgacctacagagtttcccagtcttcattttgctgattgtatccaatgttgcagtttataatgcacctggataatttttttcctataaattgataattggtctataggcttcatttaattcagcttctttccttccttctttcctctctccctaccccctctcttttcctccttttttccttcctccttcattctcwtcccttcctccttttttggtccctccctctatctctctgtcctcctttctcctcttccttctttctgtctctctgtaatactacttcatagatggtgttttgtacttctatcaggaagatcataatgtctttctctcttcttgaaagcttagcagtcattaatattcagtaactagattaatttattgggattgaaaaatgatattttaattcaaacattccttcatttattagttagaatacttctattttttggttatccagtggtattgt

SEQ ID NO: 723515 - DNA, 1108 bp, Homo sapiens
aggttctgcctggtgataatccatataaattcaggaatgcttttacttctctgtgcctgtttctttgtaatacttttccacttttaattttttaaaaaattggaaaatcacaagaggctatcaaatgcttttacatatttggccaactaataatgaaattaaatgtttcaatcaaatcacttgggggatatattcctaaaacgttctttggacagagtaaacaaaggaactaaactatatatggaaagtaagggatagggatattaagccagcttcctagtctctgggattgctgcctgcacacgacttggccttctcatgaaattcagggtctgtgtgctgtggcagaaattcaaaaagcgctgcttccagcttcttccctgccaggaaatctctcttctaaagatacagcacaatgatgtacttggtgaatcagactcaaattttgtgtttatttacaggaaattaacaaaagtgaaaaaattataacgacttgaaaatactataataaatgttatcattataattttaaaataatgaggccacaaacaggaatacacaattcccccaaaagaaaatgatttacttcccctagtaactaaagaaaacaaaaagaataattttgcacttgtcaaactggcatatattatacaaaatgatagtatctactgctggtcaggatgtggtaaaatgggtgctcagatatgcagctgatggtaaaatacatgctatgatttttcctggggggaaattttccaatatggatcaagagtctaaagaaacgtcttaatcgaacaattttactgcaaatgattcataccaaggaaatgatcacgttatgcaatgctagaaatatttgtgtgcaaacaggaaaaataaaaacttcctatattcctaatctccaacaggtcaaatattagataaatgctaatatatttttaccacgaattataatggctccattttactgggctatggcaggtatgctatgaatcggctttttcaatggtgatataatccaggctcaaaggttcctaagactggcatggaaaagacagagcagggttgaagttacttgcatctaacaagcycagccccaacaagtcct

SEQ ID NO: 723516 - DNA, 632 bp, Homo sapiens
ttacagacgatgtcaataagcttcttctgtagcaaaaatacatgagtgtttttttgtttgtttgttttttgttttaagatcagatctacaattaaagaggcaatgtggctgaatgaattaatctcaaggctggaagccaaaagttttaaactgcaaattcacctctgccaattactttctgaccaactctgacaatcttctataattccttcagaaaayagcaaataattaaataatcaggatgagacagtcaaacaaaaataaaatgattgaaagtaaatatagaaatggaggcaagaaaacactgataaatatgacatcaaaaataagtcttcgggcctgggcgcagtggctcaagcctgtaatctcagcactttgggaggctgcggcaggctgatggttttgagcttaggaggtcgagaccagcctggcaaaatggcggaaagcctgtctctacaaaaaatacaaaattagcagggtgtggtggcacatgcctgtagtctcagctacttggaaggctgaggcatgagaatcatttgaatctgggaagcgaaggttgcagtgagccaagattgcaccactgcactccagcctgggcaacagagctaggctctgttaaaaaaaaaaaaaaa

SEQ ID NO: 723517 - DNA, 632 bp, Homo sapiens
ttacagacgatgtcaataagcttcttctgtagcaaaaatacatgagtgtttttttgtttgtttgttttttgttttaagatcagatctacaattaaagaggcaatgtggctgaatgaattaatctcaaggctggaagccaaaagttttaaactgcaaattcacctctgccaattactttctgaccaactctgacaatcttctataattccttcagaaaacagcaaataattaaataatcaggatgagacagtcaaacaaaaataaaatgattgaaagtaaatatagaaatgraggcaagaaaacactgataaatatgacatcaaaaataagtcttcgggcctgggcgcagtggctcaagcctgtaatctcagcactttgggaggctgcggcaggctgatggttttgagcttaggaggtcgagaccagcctggcaaaatggcggaaagcctgtctctacaaaaaatacaaaattagcagggtgtggtggcacatgcctgtagtctcagctacttggaaggctgaggcatgagaatcatttgaatctgggaagcgaaggttgcagtgagccaagattgcaccactgcactccagcctgggcaacagagctaggctctgttaaaaaaaaaaaaaaa

SEQ ID NO: 723518 - DNA, 602 bp, Homo sapiens
ttgatcactggttattctccaaactcctctcctaagccctctcacccttgtttgctgtcttccacccatggactggcctttggctaatcatcaaacacaacaaacttccctgaccaatcagaagtacttatattttcttgtgtgtgtcatcttctcccagatcgtcacctgatggctccttctcgtcatgcagaattcattttttatttattcattcaataattattgaactccaactatgtgcccgccatttttctagatgctggaaatgcggcaggaaatgaacacaaagtgtctgccctcattaagtatatattttagttgggaagaaaaataaataacaaatatggtatgaggcaatgatatatgctgaaatgtcagctttcctggctatagcacgtgttccctcacccaagacgctatttcatatatgattctgctttattttcctgttattttttatgaatgctttgattgataatattcatttgattgatttattttttatgtttttctagaccatgagaaycctgagtttaaggacattgactgctatttatttttatattctagaacagtacctgacagagagggggagctca

SEQ ID NO: 723519 - DNA, 1973 bp, Homo sapiens
caactactaacctctattttacagcatgaaagcagccataggtgatgtgtaaatgaacggggacggctgcattccaataaaactttgttaacaaagccaggctgaccaaatttggcctgtccacccaagcttgctgacttctgatatggaggatgaagtcacttgattatgagtatttattttggtacataattataattaaaatataattccaagtataatttagaatatgatcagctggaaaatttagtcccaaagagaagtaactatgaattctcttaccaggatattgcgctgtcagaccacagtaggtggccacgttgacgaagaggatgtgcttgcccacatactgcttgaaggaaacatattcattcttattaagtgcgatggcctcatagtcatagatggtgcctttctcgtctttgtggcaatccatctggaagattttttttaagtgataatactggtaacaataattcctggcatctgtgtaatctttcaaagaagtcaaagaatagttatgttctaaccaagatctagaaaacaaataagagttgtctaaagtgtcaatgacaagactgaaacttggttcttgtaacttggaaataaaaaatcaagtctcataagccaggcagagaaagacaagcattgcatgttctcacttatttgtgggatctaaaaatcaaaacaattgaactcacggagatagagagtagaaggatggttaccagaggctgggaaagatactaggagggtggaagggaggttgggatgattaatgagaaaaaaaaaagatagttagaaagaataaataagacctagtatttgatagcacaacagggtgactatagtcaataataacttaattgtacattttaaaataactaaaagcatataattggattgtttgtagcacaaaggagaaatccttgaggggatggataccccattttccataatgtgattataacacattgcatgtctgtatcaaaacatctcttgtaccatatatatatatatatatatatatatatatatatatatatatatatatatatatatatatatatatacacacatatatatatatacacatatatatacacacttactatgtacactcccccctccacacacacacataagaatcaagtttcctattattttgaaagctgtgagataccaggaaatacacggataatggaaaaggatattgattcataagctgggatggtaggagctggaagtaagtggggccgaagagaaaagcacacttgccttacatgcttctgtaaaaaacaggctactccttggctctggattgaaggcctcctgtctggactctctgagaagggagggttttaaattgctgaactatttttaggatatcttagttgcttatctttccccaggtcttctgacctcttactccactcatcagcaggtagagtagaaagaacactgccctgggaatcagaagccagctccattgttaaattcctttgtgaacctgggcaattcccatccctggccttcagtttccccatgagtaaaatgaagatatttatctagattcttactagaactccaagtgggcttccatgtttaacattctagaatctaatattatccccaccttgaataaatttctcctgtcactctcttactaacatggtggtcatgtaagccaatactctgaaaycccagcttttggtagctctcaagaaaggagatggagaaccctaaagtccatctgcaagtgagtccctgaaatctgttgggcagcatcacccagctcatcagcccattgtgctctaggtgtctaatatccactttcatattccattccacctatcccattccttctcaaatctcatgaacatattaatatttgagcagacttccatgcaacatttgttaagttccacttaatataaattagccctgcctgaaattctcattgcatgttcttt

SEQ ID NO: 723520 - DNA, 1536 bp, Homo sapiens
ccgaagtaattaagttccaaatcactgataattgccataattttaattaamatctctgtaattgtaacaatgtgtttagaaaccttaatcactatatttctagaatataaaatagaataatagtgaattaaaaattaaataaccaggttgtatttatataaaatccatttgtctacatttattcctatttcaacatgattaaagaacatgataaatgaaacaaatgtaataaaaatagcagctttctgaaataatgaaaagtatacagccaacttttgccagtcaatgtcacatattttaaaaattcattttattattttattgcatatatttatggtttaaacacgagcttttgatatacatggtgaaatggttactataatcaagccaattaacttatgttaaaaatattatgaaataacaatatgaaaattatatgtgagggatatatatctaactatttttagcatttaagggggtattcttaaattttgttctcatcagcatttacactgaaaccttattatactgtgcatttatattgtattgatagagatattagtcaagcaaagataaattttcagccaggtccccatcctcaaattgcaaattgatagtgcctttatttttatatccacttatgtgtctatcaaattattctattaagcttcctaaagctccaagaaagtgctatttaaaaaacattaaaactactgtgtagatgaatgagtataacacacatgtagatatatcaactctcaccaccaaccagaaccccctcttaatgtcattcatggtattcactaaacactgatagattgaaggaatgggaaacctttcaccaaatagctcaagactccacaacttccatccacatctcagtactgttgtattatctgctaattctgatggttatcctgaatcttcccttggaggagaacatctatgattcccagtgctgaaggtgaagttaaccaacagttcaactttatgcctatggtgggaaacctatacctatggaatgcttatgttggaaaacctatttgcaggtaggttttaaagatgattttcatttgtctattccttctagacaaagtcttaccttcccatagaaactagctgcatgtgtctttcccaccttcacctatcccaacacattctttcattttcattatccctaactatacaaagtaataatataacaaccataaaacaaaaacaaatgcctagtagctacatatacatacattcagtctgttttttaaaacactaaacaacaaataaatggggctgaaaaaggcttcacggaaattacagtctaatagaaaaaccattaaacaagtgttaaggagtcattaattcattctttttgttgttgttgtttttcatcgtatatggaaaccctaaaaataagtaggaatttcctgggtaagatggaatgaagaagccttatggtagggggtcagcaccaaccaagtcccagaggcaagaaaatgtgtgccattagcagctactttgctggagtgaccgcgtatc

SEQ ID NO: 723521 - DNA, 1670 bp, Homo sapiens
taaggtgtttgccaattcatgagcaacactgagaagctgaaaagttgaggagaacttctaccagtcttaggatattggaggaaaaagtggattcaaaaactatcaaggatagaccctagctttcagctgggacctaaaaaatgctatactgggaacagaagaagctggacatggataagcctttagaataacagcagctcagctttgaaatagctcaatccatgattaaattaagatgatctgtctctatcctaattgtttgctgaaaggaaaagcaccacttagaaccttaaattttatttgtgatttttcataccccaaatctgtcatttaattaaaaaattatcaggcataacaggaaagaaggtgaaatgactaaataacaagagaaaatacagagaatacaaactgacccatagaagagctagaattcggactcctcagacccagaatttaaaacgactgtgataaataagttctrtaagttatctgatatgatggagaacttcagtagagaacaagaagcctaaattttaaaatcaattccaaaactgaaaatcttaataactaaagtcaggaactcaaagtacaggtttaataatatattagataagctgatgagatagtgtctacctctgggaaacagggaaattgtagtgatgtgaactacacatgtgatgtgagtgtggggatcttctgagattcctgtcatattctcttcctttcatttgggtacatgggtgtgttcactttataataatccaagctgtacctatgtgttctgttatatgtgtgtgtaaactgatgagacttgttacatgaaatatccccacagatacactgaatgaaactgttggagaactggggtgtttcaggaagctgaatttctacaagtaagacaaacaccaagaaaaaaaatagataattaacattttcaggagaaaaatgttagacctttaaattactttctctgaaataatttgctgaattcactgacagtcaccatttcctctgctaaacctttcatcgggtgcccatggagtgtttaaactcaggtagttgtctcacacatccttccatttgttagagtgtataattacaagagtcagttgtgcttgctaatgacttgaaactaagcctattgtacgtgttcctttaatgacaaaatctagttaaatattatgtaactaaggctgggtgtggtggctcatgcctgtaatcctagcactttgggaggccaaggcaaaaggattgctaactcaggagtttctgcaacatagggagatcctgtctctacaaaaaaaattttttaaattagtcaggcgtgatggttccagctgtagttccagctcctcagtaggctgaggtgggagggttgcttgagcccaggaggtcaaggttgcagtgagccatgattgtgccactgtactgcagcctgggtgacagagtgagcccctgtttaaaaaaaaaaaaaatatatatatatatatatatatatatatatatatatatataactaatgatacttcagcgtaaaaagagaactgtttctatgaaaaattgaatgctttctcaataaaggtgagtcagtcaaaaagaaagataaacaagctgcccaagaatgtataaggaagattattgaggaataatctttttgtgtgttcacatac

SEQ ID NO: 723522 - DNA, 865 bp, Homo sapiens
tcatttctgttcattatctagtatagtgccagaaaatagaaaatgtttgctgaattaacagaatamtagcatcattgcaaccatataactttctgaaaactacattgcacttaaattttgctttttaaatgttgactcgtgtctagatacaatataacacacccagacctacttcccttcttccagatgttttaaatggttttccatagtctcagcttttatttcgtctctacaggctgctcattaccttcctctgtatctgcttctcctgccatcattacaccaaaactgcgttagagaaagtggcccaaatatacttcaacaccaaattcaaggtcttttatgttcctcattgtttttctaataattgcgactttttcgcattgataagcatgcaatccttcttgcagtttcagtctgatattccaggaccagatgctaagagatcttagtgtgcttgtttctgggtgctttctctccatcctggccacttctgcagacaatcctaacacactgttctgctcattcaggttctccacggggccacctgacttctctcactggcttgctgcttgctcctcccagtcttctagatttcttttcaccataatatttcactacttgaaatattttaaggaaatgccctatataaaagtacctcagcttaagactcattgaatttttatcatgcattaagcaatttatctcatagtaagaagggaaatctcttttcttgaattattatttaactcaaatcattgcttaagccaccttcttgtctcaccaaacagataacaagtataataaatgtcttttagagtaggtgtttttattttattttattttataagttccagggcacatg

SEQ ID NO: 723523 - DNA, 865 bp, Homo sapiens
tcatttctgttcattatctagtatagtgccagaaaatagaaaatgtttgctgaattaacagaatactagcatcattgcaaccatataactttctgaaaactacattgcacttaaattttgctttttaaatgttgactcgtgtctagatacaatataacacacccagacctacttcccttcttccagatgttttaaatggttttccatagtctcagcttttatttcktctctacaggctgctcattaccttcctctgtatctgcttctcctgccatcattacaccaaaactgcgttagagaaagtggcccaaatatacttcaacaccaaattcaaggtcttttatgttcctcattgtttttctaataattgcgactttttcgcattgataagcatgcaatccttcttgcagtttcagtctgatattccaggaccagatgctaagagatcttagtgtgcttgtttctgggtgctttctctccatcctggccacttctgcagacaatcctaacacactgttctgctcattcaggttctccacggggccacctgacttctctcactggcttgctgcttgctcctcccagtcttctagatttcttttcaccataatatttcactacttgaaatattttaaggaaatgccctatataaaagtacctcagcttaagactcattgaatttttatcatgcattaagcaatttatctcatagtaagaagggaaatctcttttcttgaattattatttaactcaaatcattgcttaagccaccttcttgtctcaccaaacagataacaagtataataaatgtcttttagagtaggtgtttttattttattttattttataagttccagggcacatg

SEQ ID NO: 723524 - DNA, 1469 bp, Homo sapiens
gcaaaagctggtattttctcataaaaaattaactggctaaagaaaaatctttccagtttaccttcattggctgaaaactatagtattaccwgaagataaggccaagacttcccaaggaagcagctttaggtctgcctaaagaatatgaaaatgtgcatcatgaaggccacagtttcccatagagaaaaacatttttgtctgggaattcctgaagatagtagctacaaatcagtggcttcaacccttaaaaggccttagcatggctactacagcacatttgttcttgcgcagactttatgctgattgaccaaccaagatcacactagctgcaaaatgctccctcagatgactctatgaactgaaccatgaaatggagttatttgccattgcccatgtaagtgataaagagcatctgcataaaatagtcattgtgtttctatcactaaaggcaacagtaaaggtttcagtctgcttgacttgaagcaaattactaagtaaacctaatatgactatatttctcagagatttttctattcccctcccaaataggtagaaacctatgatggtgtggatgagggtaccctgaaaaccagtaggaagacagcctcaattctgctcaaaaatacaaaataaactattgaaaacttccttattaaaccaacgtatgcctgtgtcctaatgcgttattataccaccaggaaacagtaaaacaaaagaccaatttctatagcctagtagtgttattctttcctgttattatagaatggtctcatgaggtggttgagcatttatctagttgcaaagcatccaaatttattttcctgactgttctggaaattctataagctacttatttccatataagttgcccattttgcttaaactggctagagccagttctgcttaagaaaatctgaaccctaactgatataaaaaaccagaatctcagagggatggaattttcttatgttttacaagacgggaatgttgcactcccagcctcactagacagtaccctcctccaagaatggcatggaagcagaaaaacaaccaaaacagaaaaaacagtctgcggactgggacaagcattccatcactaaccaatgttgttttgttttgttttgttttgctttgctttgttttgttttgtgttttgtctttagtttttttgctaactgcccttgaccagagggcgcagctcaatgtgctgatgctgtagaagatctgagaacttttgcacaagtctgggtaagggaacgggttgaataacaatgacaaaattgaattttcagctagctaagcaagatgggacctctgagttaagtgtaaattgatttttaaatatgaaatattatttcttgcactcttgaatttattgagtaaaattcatatccataataacaataatatttgtcatcataacaagcttaacaatactgatatagcacattttgatttgtgcagaattt

SEQ ID NO: 723525 - DNA, 1377 bp, Homo sapiens
ggggaaggagggaggggagcatggtttgaaaaactacctattgggtactatgttcactacataggtgatgggatccataccctaaaccatggtattgtacagtattcccatgttaacaaacctgcacatgtaccccttatatctaaaataaaaatwgaaatttttaaataaataaatgtaaaagaaaacctcttcttttgaggataaatctgaaatttttaaatgaatgaagttgtacagccccaattctggtgaccagagtaagtaaattgaagggtagaatgttgggcaaaattcaatggaaccataaacaaatgaactttgttaataaaatttgcattgttatacataataaaaatagctaacacaaaatcctactaagtgccactgttctgagcatttgacaaccacaatttcatgcaatgctaatacaacacgatgatgcaggttgcatcatcactattttgaagttaaaaaaactgaggcaaagaggagggaaaatacagctagtgagtggcaaaaccaaggatttaagcctgggaagtcagtctccaaagtccttgcttttaaccgtaatcctatattaactctaagactggttttaaagagaagtcctagtcaagttttgatgtagtgccatagactgttagatttaacattttattcactatcaactctcaatcttcacaatgtaataatttgcaattattctaaggcttggattttaatctttttggctagcttgcagaagcctatcgcataaccagtgactgagccttactcaccacctagccagcccattgcagtacagctttgaggcaattgtggagaagtttataccacaatgccctctgaatttgaggattcgaacattctcaacatacagtgtctgcaaatgtcagagtctcttgtaggtacacaaaattccatcatggcaactttccatggcagcatttattgagatattacaaatttaggatgatttgaaatactcaaaagaatgggggatcagggcaagggcaagagtacttgttatgtccctcaggatttgtgccaggcaagtgcagaacagcacgatatgccagcaaaggaacagacttcctaatcaatccaacctaaaatcttccacttattagacatgtgactttgggtaacttagttgatttatctgagccttagtttcttcatctgtaagacaagggtatcatcgtcacagtgtgtgtgagaattcggtaaaatataatctaattttgcgtggcaaaatctgtagcaatacacctttcataaatatgagttcttttcctttttcagcaatatccttggattccccaactgaaaaattatcctccaaatcattgactcagctttctaagagca

SEQ ID NO: 723526 - DNA, 1377 bp, Homo sapiens
ggggaaggagggaggggagcatggtttgaaaaactacctattgggtactatgttcactacataggtgatgggatccataccctaaaccatggtattgtacagtattcccatgttaacaaacctgcacatgtaccccttatatctaaaataaaaatagaaatttttaaataaataaatgtaaaagaaaacctcttcttttgaggataaatctgaaatttttaaatgaatgaagttgtacagccccaattctggtgaccagagtaagtaaattgaagggtagaatgttgggcaaaattcaatggaaccataaacaaatgaactttgttaataaaatttgcattgttatacataataaaaatagctaacacaaaatcctactaagtgccactgttctgagcatttgacaaccacaatttcatgcaatgctaatacaacacgatgatgcaggttgcatcatcactattttgaagttaaaaaaactgaggcaaagaggagggaaaatacagctagtgagtggcaaaaccaaggatttaagcctgggaagtcagtctccaaagtccttgcttttaaccgtaatcctatattaactctaagactggttttaaagagaagtcctagtcaagttttgatgtagtgccatagactgttagatttaacattttattcactatcaactctcaatcttcacaatgtaataatttgcaattattctaaggcttggattttaatctttttggctagcttgcagaagcctatcgcataaccagtgactgagccttactcaccacctagccagcccattgcagtacagctttgaggcaattgtggagaagtttataccacaatgccctctgaatttgaggattcgaacattctcaacatacagtgtctgcaaatgtcagagtctcttgtaggtacacaaaattccatcatggcaactttccatggcagcatttattgagatattacaaatttaggatgatttgaaatactcaaaagaatgggggatcagggcaagggcaagagtacttgttatgtccctcaggatttgtgccaggcaagtgcagaacagcacgatatgccagcaaaggaacagacttcctaatcaatccaacctaaaatcttccacttattagacatgtgactttgggtaacttagttgatttatctgagccttagtttcttcatctgtaagacaagggtatcatcgtcacagtgtgtgtgagaattcrgtaaaatataatctaattttgcgtggcaaaatctgtagcaatacacctttcataaatatgagttcttttcctttttcagcaatatccttggattccccaactgaaaaattatcctccaaatcattgactcagctttctaagagca

SEQ ID NO: 723527 - DNA, 1984 bp, Homo sapiens
tcttgctctgtctcgacctccaggctcaagtgatcctgccatttcagcctcttgagcagctgggactataggcacatgccactacacctggctaactattttgtattttctgtagacagagcttcgtcatgttgcccaagctggtctcaaactcctgagctcaagtgatcttacacctcagcctcccaaaagtgctgggattacaggcatgagacacagcaccttgttgaaaagcattttcttaagagaggaaaaactacaggttgcaaaatggaattatatgaagtatctcaagattttttgatacctctggggattatgttcttagagatggtcaaattctaagagaaacagaggctagcaaatggagttctgttgttgcttttgttctattttaatgtctgtggaataaaggattgtcccccaaccgaacccatgccctgtagattttggccagattacacagatgagagaatactttgattttaatcatcttaaaatctcaatgttatctcattacatgccaaagacggcttaagggtggtactcgtgtagaaagctaaagtttggaaagttaagtgttctagtggattactcaagtttaagatgcttgacaactttcttcttgaaattacttcatcttaatgccttttttggcatgcttctaaaaatactatatccattatttgtctctttgacatgttccttttcctataatcatcacttaacaaattttattaagttgtatcttaaaatatcttccactcttttggcaataaaacaaactgtataatttcaaactaaaaaaaaaaatcaaaaaagcctcccataacctcatactgtttattctcccaatattttatgagtttcaaagtattaaatgtattgtgttgattctgacaattctatgaagtaggaaatgtggagacatttatccgaagagagaaagtgaactacctaacaaaacagttaggaagtggtgggatcccaggtcggctcagttcttctggctggctgaccctgagtctagtgctttttccaccataatatacatgtgttgaattcagcaaagtgactgtctggaaaacaaattcttgtcgttaaaaactgcataataaaaacatttttkattctttttagtaccataaaagacatttaagggcatctgcctatagaaatcagttaattttgtagattacctattaatctacaatagtgaattaatgccttttacctattgtaccacctgaaacactggaattttgaaagtctgaaaccagaattaaatcaaacattctttttcaattaacagtttaaagttcatgaagtaatactaacagaaagctctgccaattctgacgagatgagaaagtctttgaagctcattttaccttccttaaaatggaaacccccttataccatcagctgtgtttattgagagtcattctaattattaatttttgccaaaatgttttttctttgaaatacaagaatcatcatgcttccagcttagatgtaatctaccttctacaatggcttatacaagaatatcacagaatctctggtgaaattatgatccaggattcatttcacatttcagttgtctaaaaagttttacatttctctataaaaaattaaaacttcaatataccaaaatcttaaaaacagtaaaaaatttaactggaacaatgactctcaattttaagagctggtcaagggaatgtaagtatatactttcaaagacacacaaaatgaatgaaaaaatgcagttcttcgaccagatgcagtggctcatgcctgtaatcccagcactttgggaggctgagatgggcggatcacttgaggtcaggagttcaagaccagcctggtcaacacggtgaaaccccgtctctactaaaaatacaaaaattagctaggcatggtggcaggcgcctgcaatcccagctactcaggaggctgaggcacgagtatcactggaatctga

SEQ ID NO: 723528 - DNA, 3407 bp, Homo sapiens
ttcactacttacaagaaggtaactaaaacagctacacagaagacattaagaattttatgagagtgagaagtggtacaatttttgagacacatagaactttttaggggaggagtctgctgactgtggcagataaactgaagaagggagctgcaatgggacttagggcacttgagagactggggaggggagcaatgggaaggacctggctgaagacaaggtcgtgggaaggtgccaaagacagataattttatctaggcttagcccagcatccggtaatcacgaaggaaattcttccattccttcatctctttggctgycaaaattgaaaacttaggttagaatcaataatatttttgtttagtcgtagttttgggttaaacagtttcatggactagcctgaaaaccaattattatttataataattatttctttgcagaaacaaaagacttaaatattcaaaacacagattgttctcaatttcaaggctgcctatactacaacttttttttcttttttttgagacagagttttgctctgttgctgggctggagtgcagtggcacgatcttggctcactgcaacctctgcctcccgggttcacgcgattctcccgcctcagcctcccaagtagctgggattataggtgcccaccaccacgcctggctcattttttgtattgttagtagagacaaggttttgccatgttggccaggctggtctcgaactcctgacctaaagtgatctgcctgcctcggcctcccaaagtgctgggattacaggcgtgagccacagtgcctggcccgcctatactacattttgaatcagaaccagaatttttgtgcttacagaagaaaagcttacagataatatcatttaattccttcattttacagaaggtaactggggcgtatgagtgtaagatgttgagctgaggttagaagtcagttttcctgacccctgagtgttgtgcttttcctagcatgctatcaagttaattgtggatagaatgcattcttctcaagaagcactactgtacttctcccctttaatgacagttttaagttattattatttttgttttcaggctctctgcgttcgttctgttttcacctctcaaggcctagtggtgaatctacagctttcagaaactcatatttagattttcttccctagctcttttttttttcattttaagctattatttaatgaacaaaaaccattattaaaacacgaagtagaaattaaaatacaagaaaggttcatacagtcttgtcacatcacatggtaagttctaggctttgtcaacacgtgcacataacttttaaataattgtcatttatcaactttgtgcttacatattttcagctctggctcattttttcccccataaatgagggctaaatttacttgagaatgaaacaacttattgtagttttgttttcacaggtaaccagataggactgaggtatacaaagtaaaagaatgcagttggggaactagaagctcttaagatgccagtcagctgaggaggcactgtggctagagaagaactgacagaactgtgcatgaggcaggtggcagggtcaaatgagttgaataagaaagctggtagctagaggggcagggtccccgaggataagaagtccatgaaacaaacattccaatctcagaatggagcagcttctaatgtactagtgcctcctctttttatttttttacatcatgagaatgaaaaacaatacccattggtaaacatatgcaaaggttacaaagacagtaaattaaagactagaaaatgataaaatcttggactatcagttataccatactagtaaaccaggaagggagcataaaacttactttcactagccacatgattagctggaaaataaccttcctgtccctttcctatgctgccataccaccagtcttcattatctttgaaaaacactcggataatgtctccgcgatggatggttagttcatctgatcgattcgctgtgtagtcataaagagccactacctaagagagagataagaccaccacagctttatcacaactgtaccacagagaaaacccccaacattcacttcctcttgcagaagagcagctgaaaccaaagcagtactttggtaagtgtgaggctgtctcaaggtttgctaatgggatgaggggtggtgggaacacagcaggagaagcaagataaaagactgtgggattgagaaatggttacgagcattcaatacactaagattagcttcaaaatagcagatgttaattttttaaagtaaattacttgtgaagcaaataaaaaaaagctcacacaccatttacttttttagaattgttttatactacctttatgtctcattctctgtgctaagcagatgcatctgaaaaaaaattcttcagaaggtctacagttttacaaaaaggaaaaactcaatggaacaatctgattgtattgcttggtttactgttaatgtctttttttgagataaatttctctacacacatacatattttttgatgttttatatcaacaacttaagccttctatctttaaaaagtatccatataagttatttttacttgatacgaatttaagaggaaaagccttttcatgagaatcctcttctttgtgttacaataatcattatatttgacttccttttcttttgaaaacccaagtcaaaatgatatggcagtggctgcacaggcatttaaaaatccttggctgggcatggtggctcatgcctgtagtctcagcactttgggaggccgaggcaggaggactgcttgaagccaagagttagagatcaacctgagcaacaaagccagacctccatctctatataaaaaaacaacaaaaaaaattagttggctgtggtagtgtgtgcctgcagtcctagcactcaggaggctgaggtgggaggatcacttgagccccagggtttggaggctgcagtgagctatgactgcactactacacttcagcctgggtgacgcaggaagaccttgtctctaaaaaaaaagaagaagaaaaaaatcccttatagtagttaaaggcaggaagacctcaattcattttagatttagatctgatacactgtataaagtaggacataataacatctatactaaataatacatttatgctgttttcccctctacttaaacagtatctgaaaatgtataggttatacaactacatatgtaatggaaaattacatatatagttatatatacatatatatatatatatatatatttatagcatgtctcagtgtgcacagcacgtgagagtccagggaagagaaacctaagagtcccatgtggtgggaacccggcattagacgtgagagctgagatagaaggttaggagaagctgaggctcatggagtaa

SEQ ID NO: 723529 - DNA, 3407 bp, Homo sapiens
ttcactacttacaagaaggtaactaaaacagctacacagaagacattaagaattttatgagagtgagaagtggtacaatttttgagacacatagaactttttaggggaggagtctgctgactgtggcagataaactgaagaagggagctgcaatgggacttagggcacttgagagactggggaggggagcaatgggaaggacctggctgaagacaaggtcgtgggaaggtgccaaagacagataattttatctaggcttagcccagcatccggtaatcacgaaggaaattcttccattccttcatctctttggctgtcaaaattgaaaacttaggttagaatcaataatatttttgtttagtcgtagttttgggttaaacagtttcatggactagcctgaaaaccaattattatttataataattatttctttgcagaaacaaaagacttaaatattcaaaacacagattgttctcaatttcaaggctgcctatactacaacttttttttcttttttttgagacagagttttgctctgttgctgggctggagtgcagtggcacgatcttggctcactgcaacctctgcctcccgggttcacgcgattctcccgcctcagcctcccaagtagctgggattataggtgcccaccaccacgcctggctcattttttgtattgttagtagagacaaggttttgccatgttggccaggctggtctcgaactcctgacctaaagtgatctgcctgcctcggcctcccaaagtgctgggattacaggcgtgagccacagtgcctggcccgcctatactacattttgaatcagaaccagaatttttgtgcttacagaagaaaagcttacagataatatcatttaattccttcattttacagaaggtaactggggcgtatgagtgtaagatgttgagctgaggttagaagtcagttttcctgacccctgagtgttgtgcttttcctagcatgctatcaagttaattgtggatagaatgcattcttctcaagaagcactactgtacttctcccctttaatgacagttttaagttattattatttttgttttcaggctctctgcgttcgttctgttttcacctctcaaggcctagtggtgaatctacagctttcagaaactcatatttagattttcttccctagctcttttttttttcattttaagctattatttaatgaacaaaaaccattattaaaacacgaagtagaaattaaaatacaagaaaggttcatacagtcttgtcacatcacatggtaagttctaggctttgtcaacacgtgcacataacttttaaataattgtcatttatcaactttgtgcttacatattttcagctctggctcattttttcccccataaatgagggctaaatttacttgagaatgaaacaacttattgtagttttgttttcacaggtaaccagataggactgaggtatacaaagtaaaagaatgcagttggggaactagaagctcttaagatgccagtcagctgaggaggcactgtggctagagaagaactgacagaactgtgcatgaggcaggtggcagggtcaaatgagttgaataagaaagctggtagctagaggggcagggtccccgaggataagaagtccatgaaacaaacattccaatctcagaatggagcagcttctaatgtactagtgcctcctctttttatttttttacatcatgagaatgaaaaacaatacccattggtaaacatatgcaaaggttacaaagacagtaaattaaagactagaaaatgataaaatcttggactatcagttataccatactagtaaaccaggaagggagcataaaacttactttcactagccacatgattagctggaaaataaccttcctgtccctttcctatgctgccataccaccagtcttcattatctttgaaaaacactcggataatgtctccgcgatggatggttagttcatctgatcgattcgctgtgtagtcataaagagccactacctaagagagagataagaccaccacagctttatcacaactgtaccacagagaaaacccccaacattcacttcctcttgcagaagagcagctgaaaccaaagcagtactttggtaagtgtgaggctgtctcaaggtttgctaatgggatgaggggtggtgggaacacagcaggagaagcaagataaaagactgtgggattgagaaatggttacgagcattcaatacactaagattagcttcaaaatagcagatgttaattttttaaagtaaattacttgtgaagcaaataaaaaaaagctcacacaccatttacttttttagaattgttttatactacctttatgtctcattctctgtgctaagcagatgcatctgaaaaaaaattcttcagaaggtctacagttttacaaaaaggaaaaactcaatggaacaatctgattgtattgcttggtttactgttaatgtctttttttgagataaatttctctacacacatacatattttttgatgttttatatcaacaacttaagccttctatctttaaaaagtatccatataagttatttttacttgatacgaatttaagaggaaaagccttttcatgagaatcctcttctttgtgttacaataatcattatatttgacttccttttcttttgaaaacccaagtcaaaatgatatggcagtggctgcacaggcatttaaaaatccttggctgggcatggtggctcatgcctgtartctcagcactttgggaggccgaggcaggaggactgcttgaagccaagagttagagatcaacctgagcaacaaagccagacctccatctctatataaaaaaacaacaaaaaaaattagttggctgtggtagtgtgtgcctgcagtcctagcactcaggaggctgaggtgggaggatcacttgagccccagggtttggaggctgcagtgagctatgactgcactactacacttcagcctgggtgacgcaggaagaccttgtctctaaaaaaaaagaagaagaaaaaaatcccttatagtagttaaaggcaggaagacctcaattcattttagatttagatctgatacactgtataaagtaggacataataacatctatactaaataatacatttatgctgttttcccctctacttaaacagtatctgaaaatgtataggttatacaactacatatgtaatggaaaattacatatatagttatatatacatatatatatatatatatatatttatagcatgtctcagtgtgcacagcacgtgagagtccagggaagagaaacctaagagtcccatgtggtgggaacccggcattagacgtgagagctgagatagaaggttaggagaagctgaggctcatggagtaa

SEQ ID NO: 723530 - DNA, 1106 bp, Homo sapiens
cttctctctctgggcctgtttcctcattggtaaactaaggtagcttagtagttctkggccctgtttgcccaagagcattacgtggagattttctttttaatactgatacctggcagagctcattgatagtgtcaaaagtcagaacaatgattgcctcccaggggggaattattgactgggagggggcatgaaggaactttctagagtcctggaaatgttctatctcttgaactggaagttgtttacacacacacacatatgtaaaaaatcattaacctttgcacttaagattagtacactctattgattaatcctcactttaaaaaaataattaaaaagcttaagaaagaatcgatatttggccccacccctgatcaattacatcagaatctctggaaggaagccccaggcatccgtttttttaaagggtcccctagagagcttaatgtatggctgtgagtcacaggcattgacagtacacattccaacatcttgcaacgaatgttccagcagcccatcattctgccccttccacagcctactgggatagaagtcaccaccatggccatgagaggaggtgggcattggtggggtccaggctatgcctgccagcctcttccagggccaataacctaagaaatggccctcagctccagggtttggcaggaccctggctagctgatgagggacagaagagaggtctggggtgtcagtgttcatcactctactgagtcccacttagggagtgtgaggatgtatagctaataggtaggttcattataagccttaaaatggtgccagacaggctcctgggcctgggccaacagtttctgggtacctgactcagcctgacggatgactcaggaaaacaggctcctcgggctaaaggattacccgtggagagcaggtagggactggcagcttctcatgcagctagcagctaggacctggggagtggggcttggtcctatatgtaatgtagtaaggagggaaatctcagagctgcagcaggacaaaagcagagacatgaggtactgtgggaagggcagcggacaatggggaagagatctgtgtcttcctctcagctctgaggctaccccgctcca

SEQ ID NO: 723531 - DNA, 624 bp, Homo sapiens
tatgactattttccttcattctcaattttattattgaaattgtcaaacctacagaaaagttgaaggaataatatgagtatctataatccatcaccaatatttttacatgttaaaattttgtcatatttaactttgcaggtatttattaagtgacacaggatcaaaattcagagtaaaaacagatacatctgatatggctatattttttaacaagagttagagagagggcttcgggtggayacgtaaggcaacttgctaaaacagaagaatttcttatgagactttttaagccatgcattaaaagtaataaacctttttctacttaatttcttaatcgcttactattaatttttcaattttgcactataaccgaatgtgtaattggtcattttcactggtgctatttaaaagaaaacttattatggagaaaatgactattataataactgttactttagattattaatttgaaccaagaaaagctcctcaaaattctgaccaagaaggtaaaaattctgaacaagaaggcaaaaggtaggtcatatttttttaaatttttctctggctttgttattttcaccaatcatgaatataggtatgcattaaagtgagaaatgattaaat

SEQ ID NO: 723532 - DNA, 1215 bp, Homo sapiens
ttaaaataagaactgttttattgttagatgtagtattgcaagccatctgttctctagcaggttagcactgtaaagagcttttattaggtaggcatcatctacaggctattatatttaaatgattgcttttaaagatttgataccaattttatttgtttattgtttgtacctagatcaaggagagggcctatgatcctgtttagatgataggcttcagggtcagttttgccaaacatatgctgagtgaattacaggtacacctccgaattaacttaaatgttgaattagtatttacatctctacaacaatttacctcatggcaggtaccactcatctcatcttccatatgacccttgagatggcatgagagtcatgttgtctgcatcctgtggatgaaaaactggagcttgggggcttgaggtgtcactggtgggaggcagaggcaggccagatgcaaagctaggtgagcaggtacacacacttggtctctaccaaaggtatataatgtttggagcgatggtttattatgatttaagaggcagagaattgcttagcatatggtcaatagaagctctttgctgctttcataagccatttttcatatcattaattttttgtatatgtttcattaattttcaaggtaatccatattcccctttcctgtgaaatatatcaccgcaggcttagatgtcttctccatgtagtgctaagccacctattatttttggtccgtctagtagtccagggaattacagacaccataaaatgtatgcaaattgaagggtggtgacaaaaaaatccatcggcccctgcattgtgtatttattcactgcacacctgttaagctcctactacgcaccaggctctgagaggcgctgggcatgtggggaagaatgggatgcagtctcacccaggctctgagaggcgctgggcgtgtggggaggaatgggatgcagtctcactctggcgagctcatggccatggggaggagatggataaatcaactgcaattcaccctaagtgcyacagcagaggtgttctggaacccacaggagggggcacccaggaaatgggtgcaattgcccatttatttcctgtgaggggagagggaccatccgtcctggcagggagcagagacatgaaaacccagccaagcagggctcttctcattgagagcagcaggatgtcagggatccggggaaagaagtaacccag

SEQ ID NO: 723533 - DNA, 1931 bp, Homo sapiens
ggtacttacagcatgcaaaacactgttatctcatctcatcctccaacaaacctgtgaggtaagcaaggcaaacattacagccttcatttcacagataagaaaacaaaagctcagagaggttcagtgacttgcccaagatcacacagctaagtggcgcaggactactactccctcactcttctgactcccagggtagcggtcttttagctttcaactggaaaattacctgagattaatcaactgcccattagacacattagtgactcctaaccccaataataaaatatcatgaagtagctatagttacttcaattcgttttataaaattatcaaatcaaaataatctccagtaatttcaatggcggatacactgccaagaccttttaagaaaaaaagcatgggtaacaataaaagccaacttataggtagtatttattatatactagacatatctcaaagtgatgtatatatattaacttaatcctcacaacactctatacgattattgttatatctccattttacagatggaaaaattgaggcacagaggttaagtaactttcctattgttgttccaacgacagggactgtctttggtgctgaacatataaagttaaataactggttcctcaccctcaaggggctcagtttcagcctcatttgatatcaatggcacagtactaaacacagtacataacttttctcattgcatcttcactatagttcaagaaggtaggtattatcatgagttcccagtttacagatraagcaactgaggtttagagaggttaagcagcttacccaggctcacagagctgggtaagttatcctataggtatcctatagatagtatcctacagatagtagtgggaaagaggaaacagttggctgttcttagggggtgactggcctgtcccaagcagatgttcatgcaaaagattacagaccctccaagctccatcctgcatctggatatagtcctatccaccctcttctaaggtggcctcttccagggaaacgtgatctcttcaattctatgaagggaaaaactagaaaaatggctgtacatccaatgacagagtaaagggaagtgaactaggaagaaaggaggtgacaaaagtcatgatgctggccctcttgcatttatcatttttcaccattctacctgcagaagcccacctgataacaatgggaatggggtagtccatggtaccttgtctctgaagaagggtaagggtatccatactctggtctcggctcccgggaaagccacactcacctcctctgcttagcatgttaagtttattactgagtctcaagaaggatccccgggagtgccctctggcactgtagcctgaattgtaaagatgcagcgatgtccccaggactgtcctcctagtctaaggcttggcggtgaaggctaacttttttgttctgcctcgtcctttgacaataattgaattctgttcacacacacaaggtggtgagaagtgatgcaggaagctctctcctctctccaacactgcagtgtccctgggttgtaacagcagaagaactgcagtaagcaggaggcagttccaccctgctggtttcccatgataaaagggctttgggaatcaaaatatgtagcccagcctcatggagggggaaaacaaccagctccaccgcacacaagtgaattcaatcaactcatggaacataaatttgcttgatgttcaatgtcagccaggtatctcacaaagcccaatatacagagtaggacgcagaaggagctatggaaaaccacaaacgctaatctgtcctagcttcagacagccttccagccagaagctatgtggaaatcatgtgttgcccaactcattttggcagattagtacaattttggtttaatctataacataaatatgcccccttacaatctcagtatggca

SEQ ID NO: 723534 - DNA, 794 bp, Homo sapiens
tggctctagatgttcaatttttttaattgagttatcatgacaatgatcattaactgagcaattcaaggtatataataaaaaattgataaattattatattaaaaaataagattgcattggggatgttccttgtgatgagatgattttgtggttgttgctctgtttcttgagtcacttatgtatctgtcccctggatcaagaagtggacarcagggatagcaggtgcccgtgactggtgcagttgtccggggagagctcagggtcccccccaaccacctacccctgtggttcatattaatattgacctttactgggggcctataaattgtctttttgggtaaggccttgtgatagatgaatagtgcttatttttagaattaagcaaaggagacctcacatcaattttattctcaccttttgttttttgtggttttgttttatagttgaatacactgagaaactttattcacgtctaagagtaggtgagaattttgttataccaatggcattcagttctgaggactccttctcggttatagccattagatctgcctttaaatgtgttgaaagcaaataattggaaaccacctccctcagaaagggatttgttttccaatcattcaaatcatcattgctcaatctcttggacgtctatgcaaagggcactattacaagactctcagaggactgtacaccagcgtgtccctcgtaggtacttggttcaacctgctaagagatagtgctgaatattattttatcatatgctttgaatatattttcctgaagaccttgag

SEQ ID NO: 723535 - DNA, 979 bp, Homo sapiens
gtgagaacatgtggtgtttggttttctgttcctgtgttagtttgctgagaatgatgttttccagcttcatctatgtccctgcaaaggacatgaactcatcctttttgtggctgcatagtattccatggtgtatatgggctcaccctaattttaaagccaaaacatttaacaacagtaaagaatcaaattaaaaatctaaaagcaaacaattagcaacctacaaaatggggrttatattttccttcttttgtagctacttccaaatactgttgcattcatagacaaagtgatgttacacactgtcttagtaaccaggaatgccctaacccattgttctaactgtcctgccgagacattgttttcttaaaggtattcctagaaatctttcaaaatagatatttctgagagtagctatccaaaccaacttctaaattaaaagtaaatatttcctccacctttatgtgactctttgatgaagcatcctatatagagaagccaaatctttattgacattattacgcagcttcaaattttagtttttagagtgcatgcataagaatatgcacatgagagtaaaggctttcttgggtttagttcctggctaccattaactctgtggtgatggagaagctacctaggtatttgtttctatatttgtaaaaagagagactgaggaatactttaacctattagactgctgttttaaaagaaccattgcatatagacaatttacccgtatgcatgttacatacaaaaaactcaataatattagctgttgtgaaaaatcattattgttcttagtgttcagctatagatcagaatagatccagcaataaagtgggctgaagtttgtgtaatttgaggccatgcattaaaacattgcaaaatatactaaactcaataaaaagattatgtcagtaaaaatggaaaggacctccaaatattcttcccacataaaagtgataagagtggcaaaaat

SEQ ID NO: 723536 - DNA, 979 bp, Homo sapiens
gtgagaacatgtggtgtttggttttctgttcctgtgttagtttgctgagaatgatgttttccagcttcatctatgtccctgcaaaggacatgaactcatcctttttgtggctgcatagtattccatggtgtatatgggctcaccctaattttaaagccaaaacatttaacaacagtaaagaatcaaattaaaaatctaaaagcaaacaattagcaacctacaaaatgggggttatattttccttcttttgtagctacttccaaatactgttgcattcatagacaaagtgatgttacacactgtcttagtaaccaggaatgccctaacccattgttctaactgtcctgccgagacattgttttcttaaaggtattcctagaaatctttcaaaatagatatttctgagagtagctatccaaaccaacttctaaattaaaagtaaatatttcctccacctttatgtgactctttgatgaagcatcctatatagagaagccaaatctttattgacattattaygcagcttcaaattttagtttttagagtgcatgcataagaatatgcacatgagagtaaaggctttcttgggtttagttcctggctaccattaactctgtggtgatggagaagctacctaggtatttgtttctatatttgtaaaaagagagactgaggaatactttaacctattagactgctgttttaaaagaaccattgcatatagacaatttacccgtatgcatgttacatacaaaaaactcaataatattagctgttgtgaaaaatcattattgttcttagtgttcagctatagatcagaatagatccagcaataaagtgggctgaagtttgtgtaatttgaggccatgcattaaaacattgcaaaatatactaaactcaataaaaagattatgtcagtaaaaatggaaaggacctccaaatattcttcccacataaaagtgataagagtggcaaaaat

SEQ ID NO: 723537 - DNA, 1412 bp, Homo sapiens
tggcccctgacggggctggctggctctggaggtgaggaccagcctatctcaggcaggtatatgaactgctgtttggtttggttttgaatgcttgtgaatggctgaaaaagcaatggcgactgggactgctggagaaaggcctaggtcgactccactgtgggttctgccaccattacctttctggaggtgcctgctgcgcagtttgctctgctctcgctctaagcagtgggaagacrtgtccccccccacagagcgacagcaggctggcttccaatccgcggccagccactggtaggagctcgagtcacgggacccaaccgagttcacaccatccttctggattgagttgtcacgtcccaaagccaaatgccttggcatttacaacgagcagtggctgctgtgcctcaagatggtacatgcagaactggaatcatatatctcgtcagttaatcagcaccaaggagattatgatccgagatggccgctctcttcttgcccatccacatgaggaccaccaagggcctaccagccccaggcttctgaccggcaggccctgggggaccgaaggacaggactgcaatcttagctcccctcccattgtaaaaatcagacagaaaaattgcaagataaggtgaaaataggaagtaaaaaggaaaagcagcagccataaggcaagagacagagcaagcagaaaggtgccagccatgggcgcctggcgttccagaaaagccagcacaggacaggagtgaggacaggaggtggcctgagggggagaaagagaaagatttttggctttattgagaatggtttgtggaagaataagaggaagccaagaagaaggaaagcgaaacgccccctccccccattgcaagacaggtttcggctgtttgagacggagcatcacaggcaggaaggaggaggcagggagggggcctgggctccttgccccctgctcggcccccaccaagaggattcctgttcttagcactttggccttagggagacttgagtttcttagtccgtggggaggttccgttctctgccttcaccactccattttcatggtaacctgggaagtggagagagacaagcatacatggtgtttctgctggagctaaggcagaagaggggagggtggggccaggccaaggaaggggcccgggcagcccagctgctatacatggatgcaccaaaggggcgccaggctgcagccttgcacagcaaatgcaagccagcagacggctcccaggagggtcctgtcttccccagggccctggactagtggccctgtttgagaggcttggtctctgactgcactttagcaggaggggcctgggatgacacacagtaactcagcaacaacagaggccagcctgcccaagcctgaggctggggctagatactcgccgaaa

SEQ ID NO: 723538 - DNA, 1976 bp, Homo sapiens
gggactatagttatgctttctcaagaaagcaccgcgtaagggctaaatgtggactcagaagctggactcttcagtttgtattgcagctctgtcctatgtgacccaggggtatctccatgtgtgacttttctgtacctcagttttctcatctgaaaaatgaggacaacatttcctgcatagtaagtttattatgagaattaaatgaataaatgcgaagtgcttagaacagtgtctggcacatagttaagtgctatatatgcacttgctattatttttgttgttgggctagtgcaaggatcaaatgagataatttgcttacaacagtaccaacaatttacagtaagtctgcaataaatggtggcttattaaaatacaattaaatagtaataaattagacaacatcccaggtatagaaatcttgtgaaactccgccattgcagcctgtggacagaggagaatctgcatccttgctccagtcagtgggcagcaggctgcggggctgtgagcctggtggccgtgtgcctgggtctgggctgctctctgcaacccccacctccaccaggcaaatggctgctctccagctgtgctgcattcgctctgagtcacacacacatgagtcatctcactgctgggatgcatttaccagaaggtagccaggctcagtttgtttcagggtggccagggaacaaagtcaagctgattgggtcactctgggagtccaccctaatctcagccaccctagactgggagaatgtaacggtgggcagtggtgagggggtgggaggaggtggcgaggacagagagaacatgatcttggaaatcagacaaactttcctttttcctctccctcttcctttccacaaagacctattctgtgagaggcactgggctaactgttgaaacatggagataaaagacaccacccccggttggaaaacatacagtgcagcagggagactaacagacagatgtacgattacactacagacgggcagcgctcctgagaagcacatacagtgagccacagcaggcgagggccccactctggctagggtggaggttgtgggtaaactgttcactggtcagggtgaacagaacggcattggaactcggggaccagcaggagaggccggtattggggacatcctagccagagaaagcagcatccacaaagaatgaagggactgaggctggactgctgggggcggaggggaggtcaccgtggtgagcggcgggctgctgtgcgtggccttgtgtgccatgtaaaagggtgtggactttatcctgaaggcaacgtggaaatatygaagaattcaaattaaacaggaaaatgatgacatttgcgttttggaacatttactctggcagcagtgaacatgcccagaggtaaggacaccggttagaaagctgttcctgtgatccaggtaagaagccacagggcctgaatcaaggcaggagaagagagaggaagggagaaggagggctgtcagtgagagagagctgatgagccttggccactgaggaccgaagggctgggatccaggatggggagtcaggcactgaacacccgaggagaagacacgaagatgagggagaggagactcatggcccagcctctccactctaccacatgtgacgccaggattacattttccttgccttcttcataaagagaccaattaggtggccgcatattttgaaattataaaataactaaacatagtttcatcatcaagatcatccttactaggcataatgggatttatactcaaccaaacaagcacagtccaaaaatcagtgaaacagtacctgacaagaccttagattatccattttaaagccctttacgagggtcacctgccattcttgataccaaatactagggttccaaagaaatatgactataatctgaaatccttcttgaaactagaatgaatgtagaaataaacacagactcgtgttcctctgctgttgag

SEQ ID NO: 723539 - DNA, 635 bp, Homo sapiens
tcatggtgccatgaacattcatgtggaaacttgtgtgtgaacgtagttttcaattcaractacgataagatacttggagtgtatacatctggcctttattttcctgtgtgcccaaggctatttttccaaaaatgagaccatgatagcatgttcttatagaaacttttcctgtattactgaataatctaatgatttttaaaatgaagtttcaaatattttaaaaattatccatgtggcaaatttgaaaaactcaatagaaacataaacgaagtgtattcttccatgatgataacagtattaaattacttgggaatccttccagagaatggcagaagtatatacacttgtgagtggaattgctcagtcaaatggataactctatctttaactttttgcagaaatgccaaatttgtccagagtatctacaccattttacattcccaccagcaatgtttgagggttccaattttttccacttccttgcaacatttgctatttaccattttcttgatcttagccatcctagtgagtataaagtggtatctcactgtgattttcatttgcatgttcctaatgactaatgatatcaagcatcttttcatgtacttattggccatttgagaatcttctttgga

SEQ ID NO: 723540 - DNA, 641 bp, Homo sapiens
cacacacacacacacatattataaagaaggaagtgatggcatgtgtttatggattttatgttgcatgtgaaagaaagatgcatggaatcaaagacgatgttaaagttctggcccaagaggaaaagatagaaatatcatttactgacatagggaaaatataaaatagaatataattttttgtttagaagtatatagcagaagttcagttttggttacgttcagtttgagattattattaaatactcaaytgggtgattttgagtaggtagttggatatatgagcctggaggtgagtgccaaatataacacgtaaatttgggggtcattgggtatttgattgtattaaaaagtcatcatactttttaatgaagctggatgagatcagccaggaagtgactgtagatagagatgtccaagggctgaatcatggacagtccaacataaaaagaatcagaaaaacagaagctgagaggaggcagccagttaatgccatgctcatgggaactgagccagattatttaatgttttactgaaatgtagcatacacagaaaagtgcacagtttcttactccataccctgatggagttttgaaaaaggaatatatccacctaatcaacatccagatcaagaaacagagcat

SEQ ID NO: 723541 - DNA, 629 bp, Homo sapiens
attacttgtccacagtcacacagtaataagtggcaaagcaaacactaagccactctgataaaaggatttatgagaaattctttttgacatgtatataaatgagttcaagttaagtttatttttcatcctaataaccaggctttttatatcaaccatgtctaccatctattgtgataagttgacaaaatacaagcctatactataaaacatgtatccagtcataatcatgtttctgaaagttttctatttccctctacataatcagaatgtgatgagattagcattattatttatttaatggtgatcaagaacatgacacaccatataaagaagagagccccatttactccaaaaaaaggaagaaaggaagaaaggaaggaagggaaggakggagaaagaaaagaaaaatatttttcttttttatgtgtaaaagagacaagacatttgatggcaactgtagtctaccatgcaaaacatgatgatcaatttcgttggacatttcttcccacattttgtgtattttctatctccatttttatttactaatattgggatgaattcagttcagccttacctgctaatttcattcaagtaatatgtaattggcccttcaaaataatcatcaaaga

SEQ ID NO: 723542 - DNA, 930 bp, Homo sapiens
aattaatgttgcagatcagtaagtgaaaaatcagggactcacaaactcaagtcttttgaacttaaacgtccttgctgtattaacattcactgataacctatgagggtggcattaagaatctactaggtgctattacattctgagaatagaaaacttattaagtttctttctgagagatagagagacagagacccacacacatgcgtgtatactatggttaatttcttgtgcaaatcactcaatgtatatatgctatagaaaagttaatctgggtttcccatgattgtctcatagtgggaatatcttcttagagattatagcgtttaaagaatattggtataattcaacaattaaatacaaacacttcatgtaatgttgtaaaactggagaaaatctggattagatttcagtgagcaataatatgtcattcttcaatatggcacaccttcctaatgggttaattagtatatttgactctatgtgatttttaccttacatgccagtttaaaaagctgtgattatactgtacctctttgggccttctcacaattttgtagtcaactgttagttaaatagtgagtgggtgtttactctttactaaatggagatagctttacatcttttttttttctttctttcttttcttttgagacggagtctcactctgtcgcccaggctggagtgcagtggcgcaatctcagctcactgtaacctctgcctctcgggttcaagtgcctcagcctcccaagtagctgggactgcagatgcccaccaccaccctggctaattttttgtatttttagtagagatggggtttcaccatgttggccagatggtctcratctcttgacctcgtgatccacccacctcggcctcccaaagtgctgggattacaggcgtgagccaccacgcccggccacctttatgtca

SEQ ID NO: 723543 - DNA, 659 bp, Homo sapiens
cttcccttcccttccctctttctttctttctttcttctttcttttcttttctttctttctttctttctttctttctttctttctttctttctttctttctttactttctttctttcattcatttcttttgacagagtctcactctgtcacccaagctagagtgcagtggcatgatcatggctcactgcagcctcaacctcccagacaaacaatcctcccaagtagctgggacaatacatgtgcactgccacaccgggctaatttttgtagagacagaatctcgctatgttgcccaggttgcaaattagctattacatctatagctcaaccaaaggaaaagctagctatttagattaatggagatatggtatgcttgtatactgtamaggcaaatttaaaaaattttgtggctaatttttattatatttgagttttaccttacatgtttctttagagtctaactcctgcacaagatgcaatttccattgtaatatctgccttaccaggtttgttctgagaatcaagtgatatatgtttaattgctttggaaaacttaacagtgctatgaaatgtaaattgtttctgtcctctggacaagacttggccaggaattcattctaatagatttgctcttatttgttttgtgttttcatacagaa

SEQ ID NO: 723544 - DNA, 1125 bp, Homo sapiens
tcccttttcctcatctcccacaatttagcaacaacttactaccaaataatttggttctccttgttgaatccctatctcattctgagctactgcttttgtaaatctggcctaggctacatgtaggctctcctttcactgccttttcttattctaacatctcaaactctcaattcaatatcttctgtagaatttgagatctattttctgtaagagatacaaagatgggtaagacatgatctctattgtcttgggatctgtgagagatgggaataggccagcagagttcaaatatatattcaataccataggcatagacataccacataaatgttgtgaaacaagaaatagcartcaatgcttatatgggaaaggttacattaggtttttttaaggaagtgggacctggataatattagtccaggaacttctaaatgaaagatttaaaagtatttatctaccccaaagactatcttctcatcttaaactaaaaataagtttaaaatataattaatattttcacaataaaatgctcactggagaaactttgaaaaaaataaaaatgtaaatataagaatattgaagtaatccagcgtgtaatttcaccctagatacatctactgctaatgatgggtgaaattttattttggatatttgacttgtctacaagtcaacaattctaaagatttagcttccagagctaaagttttctaacaataatgccaattaaatgttttaaaaggttaattataaaagatatgatgattaaatttaaaatatcttgtcacctcctgttcacaacattttgcttttcatttccatatatcttaagtatacatctgaaagctatgtgagcgttgtaaattgtcaagttgaacttaacaaagtatagtttatgttggggaaaactcattaaaatgggatccatttcttaatttccaaaagaatcatctatatgaattgaacattgatttaatatcattgaatattcaatacccatatacacattagaatgtttttatgatttacattgcttacagcacagaatattcaccaatattattgctaagagtagagatatgactcaaaagtatcaatatttaatccagtaagtatgaagctctatgt

SEQ ID NO: 723545 - DNA, 996 bp, Homo sapiens
gcgtgcttggaccagtataagcatgccagggcaaatatttaggctaaattgtgggaactaagaacataaagtacattgatttctttattacggctagtagatatttaagaatgttagcacaggtcgtttaataaattttgcttctaggagacgttactatttattcccawttagatgggtaggaaagtttctttggagagaaacctctactttttacacctgcaagagctcaggttgtaagtggctgtatttctttttcaaaggtcacagctcttgttgggcggtctctcctcagctcctccatttccaggatctagtaattgctccctcacattttaccttttttaggcctagtggtgggttatgtctttctattgtccccagagccaggggccacctgcatcacagtattcattagtttcccttaaccctacccacaactttgaatattgtttcttattgcctctcatagtttacccattttagcatgccgtgtgtttgttttcttgctgatctctgatagataagcatccagagatgatgatatgtctgctattaattaaggatttgttcgtcactccatatgagttaataaaagtccaaaatatgacttaaaattaacaaattttgtatgaacttgtggttgttccatatctatctagaaacatatctctagaatagttctcatttcatgtcgagattaagatatttagtatatagtggcattaactcttcatcttgcccattaaaggcaaaacagattgttttttaattatttcttcaaatggaacttcctttcataaagacaacgtgtactgtaagcattctttactgttttttacagccaagaaaaatcgacatagtttacacacctattgatttgtcataagatgtcaactagagaacaaaaaaaacccaaacagattaatggacaagagtgttaattgcaatgatatataaaaaagccaaaattacataatagctctaacgtaatag

SEQ ID NO: 723546 - DNA, 1194 bp, Homo sapiens
tttaggcacttaggagtatttcttctctttctgatttgaaatgaatttgattttaggggtcagaggtagtgtgtccctgtcatgaagatggaaggataaatggtggcgtgttcagacaatggaatagagcacagtaatcaaaaggaggggaccccagtagcataatagcagcatgactgtgttacaagcacagttgaatgaatgaaagaagccagacctcaagacccattctgcatgaatttattttggtgacgttctagaacaggttaaactaagctatggaggtggatgtcaggtctgtggctgcatcagggaacttttggggtaatggggtaactttcttgggctgaagggcacatgaatgtaaacatttttcaaaatctgttgaatgcacgcttaaaatctgtgcatattcttgcatggaaattatccctcaatgaaaggaatgtgaaaagatcttcccatgttttgtccttccatggattttgaaccctggtcagtcagttcatttcaaaaggtgataaggattaatctgtttgtggtccttcctgaccacccagccttttcctgttcacagacctgttcagaaaaggctttcattccaaggaagcagaatggaaaacagggtggcccactacagcctttgggccaaatctgctcaatcacatttttgtaagtaaagttgtattgggacacagccacatggccagtcatttatgtgtcttctgtggctgctttcatgccacagtgacagccgaggagcttttacagagactgatccaccacctaaagtgtttactctctatccctttacagaaaaggtttcctggcccttggtctaaacattcatttctttttggaacttctcccttcagatctgtgtgggtggaggttttggatggagagtgctctccaggaacgagaaccctgtagagccaggtacttaggttgagcrtggtcacaatttggataagctatccttcatcccatggagttcactgggcatgcgtgctgtcacagatctacaacagtgcacagagcttggcctacgtagaggtttttttaaaaaaaaaaaataaagttatccaggccactgtaaagagaagaggaataaataaggcctggaagccatcagtggacaaagctagactcctgttttaaactccaagctactggctataaattagtcctgca

SEQ ID NO: 723547 - DNA, 1194 bp, Homo sapiens
tttaggcacttaggagtatttcttctctttctgatttgaaatgaatttgattttaggggtcagaggtagtgtgtccctgtcatgaagatggaaggataaatggtggcgtgttcagacaatggaatagagcacagtaatcaaaaggaggggaccccagtagcataatagcagcatgactgtgttacaagcacagttgaatgaatgaaagaagccagacctcaagacccattctgcatgaatttattttggtgacgttctagaacaggttaaactaagctatggaggtggatgtcaggtctgtggctgcatcagggaacttttggggtaatggggtaactttcttgggctgaagggcacatgaatgtaaacatttttcaaaatctgttgaatgcacgcttaaaatctgtgcatattcttgcatggaaattatccctcaatgaaaggaatgtgaaaagatcttcccatgttttgtccttccatggattttgaaccctggtcagtcagttcatttcaaaaggtgataaggattaatctgtttgtggtccttcctgaccacccagccttttcctgttcacagacctgttcagaaaaggctttcattccaaggaagcagaatggaaaacagggtggcccactacagcctttgggccaaatctgctcaatcacatttttgtaagtaaagttgtattgggacacagccacatggccagtcatttatgtgtcttctgtggctgctttcatgccacagtgacagccgaggagcttttacagagactgatccaccacctaaagtgtttactctctatccctttacagaaaaggtttcctggcccttggtctaaacattcatttctttttggaacttctcccttcagatctgtgtgggtggaggttttggatggagagtgctctccaggaacgagaaccctgtagagccaggtacttaggttgagcatggtcacaatttggataagctatccttcatcccatggagttcactgggcatgcgtgctgtcacagatctacaacagtgcacagagcttggcctacgtagaggtttttttwaaaaaaaaaaataaagttatccaggccactgtaaagagaagaggaataaataaggcctggaagccatcagtggacaaagctagactcctgttttaaactccaagctactggctataaattagtcctgca

SEQ ID NO: 723548 - DNA, 1230 bp, Homo sapiens
atgagatttcatgagacttattcaataccacaagaacagtatgggggaaccacccccatgattcagttatctcccacagggtccctcccacaacacgtgggaattatgggagctacaattcaagatgagatttgggtggggacacagccaaaccatatcaccctacttccctgctgttggaccccttctcagaggagtgccccatcctgggcctaagaccactgacattctcaggtctcaggtctgcatcagaatccagtgagaaggacttgccgggatgggcccagctttttccagccaaagtctcatgaggcctgacaggactgtgtgttcattcctgagccaacggctgtgacaagcccatgccacaaggagatggagaagatgggctccatcccttagctcatgctccatgccaaatctgcagctggagtctcagctacatggaatatctgagcrggggataagttgacacccaacagcaatccagggctacagcaaagaggaggcatgcatggtgctgggctttgtctaaagccccggcgcccaccagacctcacagccacccaccctgcccctccagaacacccacatgttcagtgcttgctgttctcctgtggtctggacactggacgctgccctcagtgcctggattccacatctccttagcacccacccctcatctgttcacagaaccatctcgaagaggaaataattggcccattttgatggagtggaaggctctagggtgtcttttagatgagcaagaatagctggacagttcctcttcagaggatctgtttaaacatgttcccagtctcccagcatcccctgttgtactttaacttttttcatctcgagtttttagcttctatggagatctgggacattgaaaagaaattctttttattctaattatgttgtagacatataaaaccttgtaaagcctttctatatttgttgctttatatttcttttatctgtacatttaaatatgattgtgcttagagtatactttttgaattttgaaacaggaatttgatgacccagtgtggtttgcctatgaatgtacatctacagctagtcagaaaatcttcaacagataaaagggaaacagatcagaagcaacctataatatttcccacctctcctcttaactcttccaaaacagaagggaaggatcggaggcacagaatgaccaattttgtgttggcttttcaaatgcacaga

SEQ ID NO: 723549 - DNA, 1230 bp, Homo sapiens
atgagatttcatgagacttattcaataccacaagaacagtatgggggaaccacccccatgattcagttatctcccacagggtccctcccacaacacgtgggaattatgggagctacaattcaagatgagatttgggtggggacacagccaaaccatatcaccctacttccctgctgttggaccccttctcagaggagtgccccatcctgggcctaagaccactgacattctcaggtctcaggtctgcatcagaatccagtgagaaggacttgccgggatgggcccagctttttccagccaaagtctcatgaggcctgacaggactgtgtgttcattcctgagccaacggctgtgacaagcccatgccacaaggagatggagaagatgggctccatcccttagctcatgctccatgccaaatctgcagctggagtctcagctacatggaatatctgagcaggggataagttgacacccaacagcaatccagggctacagcaaagaggaggcatgcatggtgctgggctttgtctaaagccccggcgcccaccagacctcacagccacccacccygcccctccagaacacccacatgttcagtgcttgctgttctcctgtggtctggacactggacgctgccctcagtgcctggattccacatctccttagcacccacccctcatctgttcacagaaccatctcgaagaggaaataattggcccattttgatggagtggaaggctctagggtgtcttttagatgagcaagaatagctggacagttcctcttcagaggatctgtttaaacatgttcccagtctcccagcatcccctgttgtactttaacttttttcatctcgagtttttagcttctatggagatctgggacattgaaaagaaattctttttattctaattatgttgtagacatataaaaccttgtaaagcctttctatatttgttgctttatatttcttttatctgtacatttaaatatgattgtgcttagagtatactttttgaattttgaaacaggaatttgatgacccagtgtggtttgcctatgaatgtacatctacagctagtcagaaaatcttcaacagataaaagggaaacagatcagaagcaacctataatatttcccacctctcctcttaactcttccaaaacagaagggaaggatcggaggcacagaatgaccaattttgtgttggcttttcaaatgcacaga

SEQ ID NO: 723550 - DNA, 1230 bp, Homo sapiens
atgagatttcatgagacttattcaataccacaagaacagtatgggggaaccacccccatgattcagttatctcccacagggtccctcccacaacacgtgggaattatgggagctacaattcaagatgagatttgggtggggacacagccaaaccatatcaccctacttccctgctgttggaccccttctcagaggagtgccccatcctgggcctaagaccactgacattctcaggtctcaggtctgcatcagaatccagtgagaaggacttgccgggatgggcccagctttttccagccaaagtctcatgaggcctgacaggactgtgtgttcattcctgagccaacggctgtgacaagcccatgccacaaggagatggagaagatgggctccatcccttagctcatgctccatgccaaatctgcagctggagtctcagctacatggaatatctgagcaggggataagttgacacccaacagcaatccagggctacagcaaagaggaggcatgcatggtgctgggctttgtctaaagccccggcgcccaccagacctcacagccacccaccctgcccctccagaacacccacatgttcagtgcttgctgttctcctgtggtctggacactggacgctgccctcagtgcctggattccacatctccttagcacccacccctcatctgttcacagaaccatctcgaagaggaaataattggcccattttgatggagtggaaggctctagggtgtcttttagatgagsaagaatagctggacagttcctcttcagaggatctgtttaaacatgttcccagtctcccagcatcccctgttgtactttaacttttttcatctcgagtttttagcttctatggagatctgggacattgaaaagaaattctttttattctaattatgttgtagacatataaaaccttgtaaagcctttctatatttgttgctttatatttcttttatctgtacatttaaatatgattgtgcttagagtatactttttgaattttgaaacaggaatttgatgacccagtgtggtttgcctatgaatgtacatctacagctagtcagaaaatcttcaacagataaaagggaaacagatcagaagcaacctataatatttcccacctctcctcttaactcttccaaaacagaagggaaggatcggaggcacagaatgaccaattttgtgttggcttttcaaatgcacaga

SEQ ID NO: 723551 - DNA, 2489 bp, Homo sapiens
tgctgggcttaatacctaggtgatgggttgacaggtgcaacaaaccaccgtggcacactatgtaacgtatatttgtcctgcacatgtatcccagaacttaaaatagaattaaattaattttttaaaaagaactgtgattatctgtcttccaaatacagattttctataaaacatataagccatacctacttcactttttattattttattttattttatatttatttctttttctagacaattttagaagtttaaaggccacacctactttaaaccttttatgatctagtaattttttggtactgctgagttattcatttcttctgtatataaatataaccttttggttagatttgtacgaatatgtggactataacagttttacatattttttttctatttataccaagtaatgctttaatttctcttgcttgtttctagttcctggccctttcttttttcatacacactttccacctgtggttttctaaaaccattttttgcatttcaaaatttaggttaacgatgagaatgctttcatttggaaaggaaagaaaaaccaactcagaatggcttccactgtaggacatgtactggctcacataagcaggaggtctggagataggcagggctttagggtttgtatctccagggtcttggtttctttcctttcttccaccctccctccatcctgaaattgacgtcgatcacattgacaaaatggccactgggttccggggtgcaggaggagagtgctggctgatgtcttgttttccttcccagagaccccagcaaagccccctcattcatccagtaaaatccacagcactgactgcatacatgtgccagctttatcccaggtgctggggaaacagaaatgatgcaaacagatagaaattcttgccctcacggggggcctgcattctagatggtggagaaagatgtaaaggaaagagatcaaatgcacagtatataggcactaagggcgaacgtgaagagtatagcaggtgtggagaggggataggaactgctgagtgggagaggggctgccatttattgcctagggtgacaggaagggtggccatgagtaaagacctgaaggaggtgaggaggagccacttgggcatggtgagggcacaggtcctccacacctactctttaaaaatgtatcatgttcttctattttttgcttcacttctctttacatttgggatgaattgtttctgctcttaagtttggttactttaaatttcatgaccttgtgttctggtcctccacctaatttcattcttcttcccttgggaaattatatttgtgtctgtcatctgccctctggctgtgctggtgagcactgggacaaattattcattctgtcattagtgatggctacctcttctgtcaacacattccacacccaggttccctctccttttgtttagtgactacaggcctttgagatgagaacatttcctaatgtttatgttaacttgcactttaattgtggataaattaaatgcttcctttatgatacattttcttcatatattaacctctaagacacttccaaacttaatatgggatgagtgtgtgctatagatgattcttctatttccgctgcttgctcattcttgacctacccactggcttttctgtcctcttgtttattcattagcagagaacatattcaggtgaactggttgcccactccatcttgccaccctttcacatgatgcttttctgaaatttgacattttaaatgtggggaaacgtttcagatgtatttggctaaccaatatttattgtgctaggaattattttttataaataaatatttactgctgagttagatcatacagccattaacttggctcagtaaataaaatgcatttagctagttgtcctttaatcgattctcccccccaccatttctgttttctttgcttttctgtgagtggctcacacagaaaattaccattgttcctatttcaggcccgtgttattgtggagagtgttttaacatcgtcagtccttggccccttctgcttttaatcagcctccttgaacagaacccgatagaaacttcatttttaattttgtgggttttattttctttctttatttatttttgatttaaactgaaatactaatggctatcaaattgtttcatgattctattacaaagatcacttctttggaatccagaaagactcagatcamtttttcttctccctgttatttcatttttatttactggtattaaaaaatttccctattttctgcaagacataaagggcatccagataggaagagaggaagtcaaactattcctgtttgcagatgacatgatcccatgtcttgaaaatctcatagtctctgccccgaagctccttaagctgagaaacaacttcagcaaagtctcaggatacaaaatcaatgtgcaaaaatcactaatattcctatacaccaaccacagtcaagcctagagtcaa

SEQ ID NO: 723552 - DNA, 3173 bp, Homo sapiens
ttttttttgagacggagtcttgctctgtcacctaggctggagtgtagtggcgcaatctctgctcactgtaacctctgcctctagggttcaagcgattctcctgcctcagcctccccagctgggattacgagcacctgccaycatgcctgctaatttttgtatttttgtagagacggggtttcaccacgttggccaggctggtctcgaactccttgccccaggtgatttgtccaccttggcctcccaaagtgctgggattacaggcgtgagccactgtgcccagccggattttaattttttctgtggatattcaactgacccaacatcattcatttaaaaaatcttaattatatatttattataaatcaaatatccatccatgggtctatttctggcctccattttgttccattggccttatcttcctcctggcacacctcatcatattaatcaatatagctttataatgaaccttgatatctagtaggggaagtcttctcattttgttcttctttaaaatactcttggctacttttgggtttttgcatttccatatacattttaggatagatggatggatagtaatttttattgcaatttcactgcacccatagatcaatttgtagtcttccaattcatgaacctgatatatttcttcaactatatagatctttcatttttctcattaatattttatcgttttctgggtagaggccttacacatcttttgttatattcttttttccaagtatttcatgacttttgatgctgttgtaatggtatcttttaaatttatttaaaaaactttttgttgctggtatatagaaatatgattactcttttatattaaccttatatccagtaattttactaaattcacttattaatcctactaactatccttagatacttttggatttttctataattgtacataatcatatcgacggtgaataaagacaattttagttgttctttttcaatccttacccttttaatttctgtttcttactttatttcactggaagctccagtacattgccaaatggaagtaataataacgaacatcttttcctcattcccaatcaccactcccacttcctgcctctgggtactcaagaaatgttaagtgctggccgggcgcagtggctcacgcctgtaatcccagcactttgagaggctgaggggggcggatcacttgaggtcatgagtttgagaccagcctggccaacatggtgaaaacccatctctaccaaaaaataaaaaaattagctgggcgtggtagcgcatgcctatagtcccagttactcagaaggctgagatgggagaatcacttgaacccaggcggtggaagttgcagtaagctgagatcacgtgactgcactccctacctgggcaacagagtgagaccctgtctcaaaaaaaaaaataaaaataaaaaaaaagcaaaaaacaaagaagaagaaatgtaaatgcaagtgcaccaccataccaccctctcatctatccaagtcagctctgaggttatggaaatggggtttagcccttgtctggagattaaaaaggcctcagtctcccctaagcataacctccctgggttcacacagctgaggagctcaacccattccctgttggcatcttggttgatgacagttctggagagaagggggagtaaagaggggcaaatttctaggctgggctgtgtcacttgacctggtctagtgagacaggattctggaacctcatccagttctggaggcatcctaaaatttgagagattattggggagtcctgtaatccaaataagttcccctgctaatactttaaattcccccaagacagtaatacttaatcctgtaatctgtattaagtattgccttctccagatacttctctaaaaatgcaaatgcctttgaaagagggaagaaataaagtcagtgttacatagtgtgcaagtgtcaaacagttgctataataccagcaacacacatgcacatacatgcataaacatacactgtatggcatgttcaccgaactgcccttctctcattccagaaagacattggggaaatgtcccaggcaaagaaaagaaatgtcctttatgtggttgtgcacatgggctctggagctagactgcctgaattcactgtctgctttgccattaccagcttattaatctatgagaagctactcaacatctcagggactcagcttccttctctgtaaaatagaaataacaatactatctatctaattggcacatgataagctctcactaaatattgttgttattagacaatattaactccctgcctcccatgcctatgtttgatgcaaaccaattttacaaatagcaatagccaacttagactgccactgctttctaaggtctattcaatggccatcttcattcagcactgtgatggtcagttataatgtgtcaatttgaccggtccatggggtgcccaggcatttcatcaaacattattctggacacttctatgagggtttcttggatgagattaacatttaaattggtagactttgagtaaagcagattgccctccctgatgtgggtgggcctaatccaatcaactgaaggcctgaatgggacaataggctgactttcttctgtgtaagagggaattcctcctgcctcactgccttcaaactcagctttcccctgcctttagacttgaactgaaacgttggctcttcctggatctcaagcctgctggcctttcgactaaaagtacaccattgactctcctggttcttaggctttcagattcagagtgaggctacaccaccagctctcctgggtctccagcttgccaactgcagatcttgggacttgttagccttcataattccatgagccggttccttgtaatcaatctcttctgtccatatacatatgctgttagttttgtttctctggagaactccaatacaagaaacaccatcacttacaccactcgtctcctttgcttctttcaacataagaaacagtcataacctcctttggctgaccaaggaataggaggccaggaatctttctgaaggacatccctttaggcctgaagaaactacaaagatgacttcaatgagaagatattggagtggtcagagtcaagttattggcctctgaatctccttctttggttaccgtc

SEQ ID NO: 723553 - DNA, 3173 bp, Homo sapiens
ttttttttgagacggagtcttgctctgtcacctaggctggagtgtagtggcgcaatctctgctcactgtaacctctgcctctagggttcaagcgattctcctgcctcagcctccccagctgggattacgagcacctgccatcatgcctgctaatttttgtatttttgtagagacggggtttcaccacgttggccaggctggtctcgaactccttgccccaggtgatttgtccaccttggcctcccaaagtgctgggattacaggcgtgagccactgtgcccagccggattttaattttttctgtggatattcaactgacccaacatcattcatttaaaaaatcttaattatatmtttattataaatcaaatatccatccatgggtctatttctggcctccattttgttccattggccttatcttcctcctggcacacctcatcatattaatcaatatagctttataatgaaccttgatatctagtaggggaagtcttctcattttgttcttctttaaaatactcttggctacttttgggtttttgcatttccatatacattttaggatagatggatggatagtaatttttattgcaatttcactgcacccatagatcaatttgtagtcttccaattcatgaacctgatatatttcttcaactatatagatctttcatttttctcattaatattttatcgttttctgggtagaggccttacacatcttttgttatattcttttttccaagtatttcatgacttttgatgctgttgtaatggtatcttttaaatttatttaaaaaactttttgttgctggtatatagaaatatgattactcttttatattaaccttatatccagtaattttactaaattcacttattaatcctactaactatccttagatacttttggatttttctataattgtacataatcatatcgacggtgaataaagacaattttagttgttctttttcaatccttacccttttaatttctgtttcttactttatttcactggaagctccagtacattgccaaatggaagtaataataacgaacatcttttcctcattcccaatcaccactcccacttcctgcctctgggtactcaagaaatgttaagtgctggccgggcgcagtggctcacgcctgtaatcccagcactttgagaggctgaggggggcggatcacttgaggtcatgagtttgagaccagcctggccaacatggtgaaaacccatctctaccaaaaaataaaaaaattagctgggcgtggtagcgcatgcctatagtcccagttactcagaaggctgagatgggagaatcacttgaacccaggcggtggaagttgcagtaagctgagatcacgtgactgcactccctacctgggcaacagagtgagaccctgtctcaaaaaaaaaaataaaaataaaaaaaaagcaaaaaacaaagaagaagaaatgtaaatgcaagtgcaccaccataccaccctctcatctatccaagtcagctctgaggttatggaaatggggtttagcccttgtctggagattaaaaaggcctcagtctcccctaagcataacctccctgggttcacacagctgaggagctcaacccattccctgttggcatcttggttgatgacagttctggagagaagggggagtaaagaggggcaaatttctaggctgggctgtgtcacttgacctggtctagtgagacaggattctggaacctcatccagttctggaggcatcctaaaatttgagagattattggggagtcctgtaatccaaataagttcccctgctaatactttaaattcccccaagacagtaatacttaatcctgtaatctgtattaagtattgccttctccagatacttctctaaaaatgcaaatgcctttgaaagagggaagaaataaagtcagtgttacatagtgtgcaagtgtcaaacagttgctataataccagcaacacacatgcacatacatgcataaacatacactgtatggcatgttcaccgaactgcccttctctcattccagaaagacattggggaaatgtcccaggcaaagaaaagaaatgtcctttatgtggttgtgcacatgggctctggagctagactgcctgaattcactgtctgctttgccattaccagcttattaatctatgagaagctactcaacatctcagggactcagcttccttctctgtaaaatagaaataacaatactatctatctaattggcacatgataagctctcactaaatattgttgttattagacaatattaactccctgcctcccatgcctatgtttgatgcaaaccaattttacaaatagcaatagccaacttagactgccactgctttctaaggtctattcaatggccatcttcattcagcactgtgatggtcagttataatgtgtcaatttgaccggtccatggggtgcccaggcatttcatcaaacattattctggacacttctatgagggtttcttggatgagattaacatttaaattggtagactttgagtaaagcagattgccctccctgatgtgggtgggcctaatccaatcaactgaaggcctgaatgggacaataggctgactttcttctgtgtaagagggaattcctcctgcctcactgccttcaaactcagctttcccctgcctttagacttgaactgaaacgttggctcttcctggatctcaagcctgctggcctttcgactaaaagtacaccattgactctcctggttcttaggctttcagattcagagtgaggctacaccaccagctctcctgggtctccagcttgccaactgcagatcttgggacttgttagccttcataattccatgagccggttccttgtaatcaatctcttctgtccatatacatatgctgttagttttgtttctctggagaactccaatacaagaaacaccatcacttacaccactcgtctcctttgcttctttcaacataagaaacagtcataacctcctttggctgaccaaggaataggaggccaggaatctttctgaaggacatccctttaggcctgaagaaactacaaagatgacttcaatgagaagatattggagtggtcagagtcaagttattggcctctgaatctccttctttggttaccgtc

SEQ ID NO: 723554 - DNA, 1873 bp, Homo sapiens
aaaatgttggcagagatttacgtgtctttgccttacctgggtttcacaaacacaacgactcacattcaagccagcctcccttcagataacctcctctccccccgctaaaagtgccaaggatggtaaaagaagaaacaatctcaatcttttcgtttggaaatgaaagtccccggcttttcataaagggctcctcgcccctcacagttgagtcctagttargaaaaacgacttccaagtagaaataataggcggggagaaggaagggagatacagggatctggggggttcttagggcaactggcagtgaattttgtctcgagagtcctttctccactcaaaaaaccaaacgcgcgagccccgcgaaaggtttagggatagatcgtgtgggagaggactgagcagagagcgtgggggcagtgtcttgtagaatctttcttttcttaataataattttaaaagcttctgagtggagacgacgcaaagtcaagcagcaaaggtggcctgggaggcaagcggagggctcaagtgccgcatctttaccctcagggtctcctgcgcctacgggatgcgcattcccaagaagtgcgcccttcgagtaagtcctgggcccgcacacacttcgggtccgcagccagaatttaatggcgacaacgtttatgcaatgcaagctaaaaaccaaagcgtaaaaaattactatgtcatttattgaaacgccattctttgtcaaactgcaactactttgcttcacataagtttggctggaaagcttgcagccccagcccgggccagccaggtacaggaggccggactgcaaccggttgcttccctcccgtcgcgcctggccgtcccacgctgcgccgtcgctgctgcctcctggcgcccctgggattttatacgcacctctgaaacacgctccgctccggcccccggttcttctccttgcctaggggttgtttcccaatagatactgactcctttagaagatccaaaaaccaaaccaaaacaccccctacccgccccaaacacctgctctggggcgcgggggctgccaaacagagactagacgaagggagtcagatttagcgaagctcttcgagctcccaaagattcgaacactaactcgcgcccgtgggccgatggaggttctccctactccactccttggtccccttaactggcttccgcctcctggtcaatcactgagcaaccagaatggtatcctcgaccagggccacaggcagtgctcggcggagtggctccaggagttacccgctccctgccgggcttcgtatccaaaccctccccttcacccctcctccccaaactgggcgccaggatgctccggccggaatatacgcaggctttgggcgtttgcccaagggttttcttccctcctaaactagccgctgttttcccggcttaaccgtagaagaattagatattcctcactggaaagggaaactaagtgctgctgactccaattttaggtaggcggcaaccgccttccgcctggcgcaaacctcaccaagtaaacaactactagccgatcgaaatacgcccggcttataactggtgcaactcccggccacccaactgagggacgttcgctttcagtcccgacctctggaacccacaaagggccacctctttccccagtgaccccaagatcatggccactcccctacccgacagttctagaagcaagagccagactcaagggtgcaaagcaagggtatacgcttctttgaagcttgactgagttctttctgcgctttcctgaagttcccgccctcttggagcctacctgcccctccctccaaaccactcttttagattaacaaccccatctctactcccaccgcattcgaccctg

SEQ ID NO: 723555 - DNA, 1873 bp, Homo sapiens
aaaatgttggcagagatttacgtgtctttgccttacctgggtttcacaaacacaacgactcacattcaagccagcctcccttcagataacctcctctccccccgctaaaagtgccaaggatggtaaaagaagaaacaatctcaatcttttcgtttggaaatgaaagtccccggcttttcataaagggctcctcgcccctcacagttgagtcctagttaagaaaaacgacttccaagtagaaataataggcggggagaaggaagggagatacagggatctggggggttcttagggcaactggcagtgaattttgtctcgagagtcctttctccactcaaaaaaccaaacgcgcgagccccgcgaaaggtttagggatagatcgtgtgggagaggactgagcagagagcgtgggggcagtgtcttgtagaatctttcttttcttaataataattttaaaagcttctgagtggagacgacgcaaagtcaagcagcaaaggtggcctgggaggcaagcggagggctcaagtgccgcatctttaccctcagggtctcctgcgcctacgggatgcgcattcccaagaagtgcgcccttcgagtaagtcctgggcccgcacacacttcgggtccgcagccagaatttaatggcgacaacgtttatgcaatgcaagctaaaaaccaaagcgtaaaaaattactatgtcatttattgaaacgccattctttgtcaaactgcaactactttgcttcacataagtttggctggaaagcttgcagccccagcccgggccagccaggtacaggaggccggactgcaaccggttgcttccctcccgtcgcgcctggccgtcccacgctgcgccgtcgctgctgcctcctggcgcccctgggattttatacgcacctctgaaacacgctccgctccggcccccggttcttctccttgcctaggggttgtttcccaatagatactgactcctttagaagatccaaaaaccaaaccaaaacaccccctacccgccccaaacacctgctctggggcgcgggggctgccaaacagagactagaygaagggagtcagatttagcgaagctcttcgagctcccaaagattcgaacactaactcgcgcccgtgggccgatggaggttctccctactccactccttggtccccttaactggcttccgcctcctggtcaatcactgagcaaccagaatggtatcctcgaccagggccacaggcagtgctcggcggagtggctccaggagttacccgctccctgccgggcttcgtatccaaaccctccccttcacccctcctccccaaactgggcgccaggatgctccggccggaatatacgcaggctttgggcgtttgcccaagggttttcttccctcctaaactagccgctgttttcccggcttaaccgtagaagaattagatattcctcactggaaagggaaactaagtgctgctgactccaattttaggtaggcggcaaccgccttccgcctggcgcaaacctcaccaagtaaacaactactagccgatcgaaatacgcccggcttataactggtgcaactcccggccacccaactgagggacgttcgctttcagtcccgacctctggaacccacaaagggccacctctttccccagtgaccccaagatcatggccactcccctacccgacagttctagaagcaagagccagactcaagggtgcaaagcaagggtatacgcttctttgaagcttgactgagttctttctgcgctttcctgaagttcccgccctcttggagcctacctgcccctccctccaaaccactcttttagattaacaaccccatctctactcccaccgcattcgaccctg

SEQ ID NO: 723556 - DNA, 631 bp, Homo sapiens
caggagcatgccasaacaccctgctaatttttgtatttttcatagagacggggttttgccatgtttcccaggctggtctcgaactcctgaactcaagtgatccactgctttggcttcccaaagtgctggaattacaggcatgagccacagctcctggcctacttatataatttcttgaggtagagactttgatctttagtattaattcttttaatatattcttatacttaatatgtttaagtataagcatatattaagtataaacatatattttaatattttaatgtatgtttatacttaattctataagattttctttaagcagggcttaagctgccttctataaatttgatgtcataatttcataagcatttaggtcaaaataaattctaacttccattgtaatttcttcaatccctcagttatttaggcgtatatattttcatttccaagcatttgtgggcatttttattcatcctttttgttttttatttttagcctaattttcctgctctccattttcagctagctagtgaaatgctctgaagtcagaaggtgtccccttagaaacaaacctcaagctagatacatactaaggctaagaactgcagcccgaattcctctgagacta

SEQ ID NO: 723557 - DNA, 631 bp, Homo sapiens
caggagcatgccacaacaccctgctaatttttgtatttttcatagagacggggttttgccatgttkcccaggctggtctcgaactcctgaactcaagtgatccactgctttggcttcccaaagtgctggaattacaggcatgagccacagctcctggcctacttatataatttcttgaggtagagactttgatctttagtattaattcttttaatatattcttatacttaatatgtttaagtataagcatatattaagtataaacatatattttaatattttaatgtatgtttatacttaattctataagattttctttaagcagggcttaagctgccttctataaatttgatgtcataatttcataagcatttaggtcaaaataaattctaacttccattgtaatttcttcaatccctcagttatttaggcgtatatattttcatttccaagcatttgtgggcatttttattcatcctttttgttttttatttttagcctaattttcctgctctccattttcagctagctagtgaaatgctctgaagtcagaaggtgtccccttagaaacaaacctcaagctagatacatactaaggctaagaactgcagcccgaattcctctgagacta

SEQ ID NO: 723558 - DNA, 1077 bp, Homo sapiens
gatgcagattattttctaactttaagcatcatctactattaagagtatcataaagtatcaagggctcttcagccaatgattaataaagtcagcgtgatttgaatactgtaccaggactgaccgtcatacataaaagacgctacatttttttttccataagaggacacatttagaccaattacttgtctggcaaatgactagaaatatatctccttaaatgacaaagaatatagagaaatgtgggtctatttacctctactgtttgtaaattcttgtcagkgtaaaaaaaaaaaaacagaaaagaaattcaataaaattctcacctcagtcaccgtatcatcaaagtcattgcaaacattttttcgcctgccagaaaaatcctctcaggtgttgttgcctgaagtacaaagagctttaaaaaatgaataaaggagacttaaagaaagtgtctgctgatgccttcaggaacattttggcaggactacggggaaacaaagaactttgttttcaatgctcatatctttggttattcttacctcttttagaccccttgttaatatctgaaaccatcatgatccctttaccttccatatttctcatcttaaaatatcacttgcttcaaatgacattatttgtatatttcacagataccaagaattttcacatgctatgttgcatggcattatcataattacctactcatttactcaaattagtgagcatctgtttactatggcagatattatatgctaggttttttgatataagagagctgacagtagaggtaggggaacagaatgtgcaaatatggttatgatatgttgtcatatgtactgaaatagatgtaagtaggttgctttgacagatcataagaagggattatatacagctcccaaaaagagatgatctttatactcagccttcaagagtagatggaggctataggtaaaaactggatataaaattcagaagaggaggtccctagaaaccaagaggcaaaataatttcaggtaggagagaaggagtgtaatcgctggtgtcaaatttagtgcagggattgaaaaacagaagaattaa

SEQ ID NO: 723559 - DNA, 972 bp, Homo sapiens
ggcagggacggggtcagcgggcctcaccggtgtcggggtctcccagaaaggcgtcctcgtccttgcggcccctcagcggggccgcgggcgccggctcgtcctcgggcagccgcgggaagctggtgatgctcatgtagtccactggcgagtaggcgcccagggcgctctcctggctggcctcgttctccgccgccatcctcgcccgcgccccccagcagcgcagcgcctgccggaagtggctgcggcgggggagtgggagggcggagggcggggcctgatcttcgcgacagccgggagggggcgcctctcccagccctcggccgtgtcccggtctgactcgcccccgtctgctcagcgctatcagcctgcagctggcacacaggtgcgygtagatggacagccaggaaggcagcgcagggtcgaggggagagcgcggggcaagcgagacttcagtggctctgcactttacgcagctcagggaccaaaccccttcctccttccagcctgaatacagctagtgtcctcctcaaatcccaggcttccttttcgggccccagaccctttcactgaccgcaaatccctctcgaccccagatcctgtctctgaccccaaactcctcggaccccagacccctccttgaattccgagatcctcctcctccgattttagactcctcctccgaccttagacctctttttcgacttcagactctgtcttcacccccaaacccttttgaaaaccccagcccatgcttcatctccaggcctctttgactgcagacgcctctttggacaacagatccctcctctgacctcagatcccttcccgcaccccgacacttctgactcctctttcaaccgcattctcaaactttagtgtgtgttaggatctttgaaagcggatccccagattccactccagagatcatgattcagtaggctgggatgaggtccttggaacctgaatatttac

SEQ ID NO: 723560 - DNA, 957 bp, Homo sapiens
ctgtgtgacctctgttagtaagaaaaggcctggcttccctgccagtccctgtccttcacactatgagggagagtcctgacttgaaatcagaagacctgagcatctattcttggctctgccacttattattgtgtgaccaataatctctctaggtttcagttacctccttcataagtgctctgtgcagtaaggaaggagaggggaagcaatggtctgtggtgctaagggagagccagatggtgctggtgtctgaaggaggagggagaatattctgagcaggggcaatgatgtggccaaaagcgtggaggtggacctgaacttgccaagggaaaccagggatccacttacagtaaaattcaaacttcttactattgcctacaaggctctacgtgatttggctgctgcctacctctcattcttacccaacttcttgctcactgaaatctagccataytgtctttctttctttctttgaaaaggtctcagtgccttttcacttgatgctccttttccccagaatactcttcccaagaattagtatgattgcctacctctcattattcaggtcttggctcaaatatcacctctccagagagaggccttccaggaccatcttatttaaagtagttgttccctaatatttatcaatatttaaaatgcacacatcagccaggcacggtggctcacgcctgtaatcccagtactttgggaggccagggcaggtggatcacctgacgtcaggagttcaagaccaacctgaccaacatggtgaaaccccatctctactaaaatgcaaaaattagccaggtgtggtggtgcacgcctgtaatcccagctactcaggagtctgaggcagaagaattgcctgaacccaggaggcggaggttgcagtgagccaagatcgcgccattttactccagcctgggcaacaggagcaaaactccatcttgggaaaaa

SEQ ID NO: 723561 - DNA, 1826 bp, Homo sapiens
tctcatctatgtttatcacgttcattcatttttcaaattttcattgtggcaccattttatgacaggcactatgctggggatgctggcgactagggtagggagttaaaatgagagtgtctacttggaaagatgaacagataaataatcaccgtgataagtgctgtgctagagatatgcagatgtcaaaagaccttagaaggtctacaatccacttggagggtagggaatatagaaggcatttcagtgaaatagggtgcctttgacaaatcattaagaatgagttctacattaaaaaggggaagagagggtgatagctgaggaggcagcataggcaagaacatccagcatgaaagaacagtgaaggacatcaggaacatctttcaggaacatcaggtaaaacagacttagggcccaagtcaaaggagctaaaataatacaccctggaaagtggtatgatcatttctgcatctgctccagagaaacctgccaaaatatgattagcataatacccaagagaacatcacattccccatgtgtgaaaatgcaagagggagttatttctaatagttcataagctcagcaacaacagagtagacacaaaagccatagaatgtgcttaggctttactttaatgatatagggatatcacatatcatcagcctgtggagtacagaggtagtttacaaaggataaaccttcattgtttggaaaggaaagatcagagagctctttatgaagtttaaacaaaatcagagaaataaagagatgtgggaaagaaagaaaaaaaagaaagtacattgaggacagtccaatctaactgtgaactcataagggacagccagtaaattcaaaacagcctactgttttttgattacttgtgctactctattaaaatagccacaaacacaaaactagtctacctctttctctccccattattggccctaacccaaaaatagtgggagtaaatgatttaataatttattttcatgctccattttgttcttaagttaaaattactgtggttggtgcccctcctttagcttctgctaaagactttacataatgaaagctcatgaagtgtctggattactaacagttacttatccaaaaagatgagacatggttcattgatttgattctattagttctctcttgaagatatttttctcctccctctgtgaagaaacatttctttctgtgtcatacaagakgagtcatttttgtagttttaattccctcttgagtcctacaataatactaaaatactcacagtgactacagtatcctttgcagggaaaaaattgtaaattaaccatttaaatatagtcactaagttatgtggcattcactgactcagagttgaaaaagactccaaaattcttatccagtattagagtatacaaggacaaaaggagaggccaaactaagtctaggacgcacaatacaaagaagaaaatgagaagaccaaagttacagtctcaatactatgacatgatactaaaccatacagtcagtcagccaatatatatttgtgggcctagtatatactgggcactgtttgtaggtgtttgggttacatcagtaaacaaaaacaaagatactagttttcattctggagagggtaagaggcagtagaatttggaaaagacagacaatgaacaatagacataatgaagtaaattatatagtataaattatatagtaagaagataagagttacagaaaaagaaaacaaaaagtagaccagggttagtaattaagggggtgggggacagttacaattttaaatagggtggttagagtaaccctcaattagaagtgcc

SEQ ID NO: 723562 - DNA, 1826 bp, Homo sapiens
tctcatctatgtttatcacgttcattcatttttcaaattttcattgtggcaccattttatgacaggcactatgctggggatgctggcgactagggtagggagttaaaatgagagtgtctacttggaaagatgaacagataaataatcaccgtgataagtgctgtgctagagatatgcagatgtcaaaagaccttagaaggtctacaatccacttggagggtagggaatatagaaggcatttcagtgaaatagggtgcctttgacaaatcattaagaatgagttctacattaaaaaggggaagagagggtgatagctgaggaggcagcataggcaagaacatccagcatgaaagaacagtgaaggacatcaggaacatctttcaggaacatcaggtaaaacagacttagggcccaagtcaaaggagctaaaataatacaccctggaaagtggtatgatcatttctgcatctgctccagagaaacctgccaaaatatgattagcataatacccaagagaacatcacattccccatgtgtgaaaatgcaagagggagttatttctaatagttcataagctcagcaacaacagagtagacacaaaagccatagaatgtgcttaggctttactttaatgatatagggatatcacatatcatcagcctgtggagtacagaggtagtttacaaaggataaaccttcattgtttggaaaggaaagatcagagagctctttatgaagtttaaacaaaatcagagaaataaagagatgtgggaaagaaagaaaaaaaagaaagtacattgaggacagtccaatctaactgtgaactcataagggacagccagtaaattcaaaacagcctactgttttttgattacttgtgctactctattaaaatagccacaaacacaaaactagtctacctctttctctccccattattggccctaacccaaaaatagtgggagtaaatgatttaataatttattttcatgctccattttgttcttaagttaaaattactgtggttggtgcccctcctttagcttctgctaaagactttacataatgaaagctcatgaagtgtctggattactaacagttacttatccaaaaagatgagacatggttcattgatttgattctattagttctctcttgaagatatttttctcctccctctgtgaagaaacatttctttctgtgtcatacaagaggagtcatttttgtagttttaattccctcttgagtcctacaataatactaaaatactcacagtgactacagtatcctttgcagggaaaaaattgtaaattaaccatttaaatatagtcactaagttatgtggcattcactgactcagagttgaaaaagactccaaaattcttatccagtattagagtatacaaggacaaaaggagaggccaaactaagtctaggacgcacaatacaaagaagaaaatgagaagaccaaagttacagtctcaatactatgacatgatactaaaccatacagtyagtcagccaatatatatttgtgggcctagtatatactgggcactgtttgtaggtgtttgggttacatcagtaaacaaaaacaaagatactagttttcattctggagagggtaagaggcagtagaatttggaaaagacagacaatgaacaatagacataatgaagtaaattatatagtataaattatatagtaagaagataagagttacagaaaaagaaaacaaaaagtagaccagggttagtaattaagggggtgggggacagttacaattttaaatagggtggttagagtaaccctcaattagaagtgcc

SEQ ID NO: 723563 - DNA, 1581 bp, Homo sapiens
ctagaggcagcattctgcatgggggaccaacatgtattatcacctcaccatgctgaaaatctacagcctggcccctgatccaaatcagcaatatactaatattaaggaaaaagtaacagaaaccaaaatcacccacctaatgaagatatatgatctagcaaaagaaaatgaggctgagaacatccacaggtaagccaggctatgaggaacatagctctgaactcagcaggaacaaaatgaggaaccggggagagtacagagaagtgttaactcacactggtaggatgccccttctcactcaaaacagctgagttcatatcccaggcatggccgctgtatcaaaataattagtaattaaacaagttaatatatgcaacatgcttacagcttggcactgttaagattattaccctctttccttcaagcacagcagaacacgagaaatgtcacatctttatctgcagactttgggggatccaaggcagaattttcacctactcagagcaggctgagattcaacttcccttttcaggtttcaccgacatccctgaaggttccatagcatatctgccatcatgtggaaagataaaattcaattcccaggcattcccaggtgcacttctaaggaagtggtatggtgtgaagaataaagcaatggaccaagggctaaaaagtcagacatctggcctggcacagtggctaacacctgtaatcccagcactctgggaggctgaggcaggtggatcatttgaggtcagcagttcaaaaccagcctggccaacatggtgaaaccacgtctctactaaaaatacaaaaaaattagccgggtggtagtggcacaccccagtaatcccggctactcgggaggctaaggcaggagaatcgcttgagcctgggaggtggaggttgtggtaagccaacatcgcaccactgccctccagtctgggtgacagagtgaggccctgtctcaaaaaaaaaaaaaaaagtcagtcatcttgtctttgtactgccactgactatttttgtgctcttgaaaaattactttaccttggtgtttttttttttttttttgagatgcagtctctctctattgcccaggttggagtgcaatggcgtgatctcagctcatggcagcctcctcctcccaggttcaagcgattctcctgcctcagcctcctgagtagctgggattacaggtgcacgccaccatgtccagctaatttttgcatttttttcagtagagacggggttttgccacattggccaggatggtcttsaactcctgatctcgtgatccgcctgccttggcctcccaaagttctgggattacaggcatgagccaccatgcccagctgaaaaattacttacctttctaaggcctacagtttgtaatctgtttttaaaaagtgattagatgacatatagtcccatagccaagaaaatagtagcttaccaacatgttttactgtgacctacagtgagaaatatatcttgtaccagacctcaatattcacatatatacgtgcatagcaaaaacaaaaatttcaagaaacaatgcttgtccatactatgtgatactct

SEQ ID NO: 723564 - DNA, 1891 bp, Homo sapiens
tttccagggcagcctacaaatatccaccatattgaaagaactgtttgaatggatatgtttaatgttccaagaatttatgaaacttaaaaatatatgttgatactacagtttgaaaaggacccagaattggaaaagctgcttgttcatgagtgtcccttgtctctactgtcctgtagtcagtgccccctcaaagttggatgcatctgagtggagatgcttttctgtcacctaaagtcacacatttacctttgatccagaccctccccagaagcagtgcttttgaaatctcttctcctcttctttttgtttgacaaaatataaatgatagtttatttctagaacgatgccaaattcaataaagcaatgatggagttgtgtttcgttttctggtcaagttgacaccataaagtgggttttcctgaatatttccctgttccactggtgttcttggcattgtgaataaacagagctggtgataacatccatcatagaattaagcacattgagtgggtgataaagtcaacaagaagctgaaacaagaattaccacggataagctgccaagagttggctgtagattctaagtggacactgtggctcattcatcttcacccttcagctttccaccccaacatcatccctgcctcagcactcatgacaagagtaggaaagtaggagagaaggaaagcacagggatcaagtacaggggacaaatacatagcattgatctgcctgagataaaatctaaagacgcagtagtaaattcttaatgagtactgagagagaacaaagaaaaatgttgtgggttttgttgttgttgttgttgttgttttttgagacagagtctccccctgtcgcccaggttggagtgcagtggagcratctcggctcactgcaagctccgcctcccaggttcatgccattctcctgcctcagcctcccgagtagctgggactacaggcgcccgtcaacacacctggctaattttttgtatttttaatagaggcggggtttcaccatgttagccaggatggtctcgatctcctgaccttgtgatctgcccacctcggcctcccaaagtgctggtattacaggtgtgagccactgcacctggccgaaaaacactttttaagtcaaaatgaaccaactaacaaacaaaagtcatattccagaagtgcaagtagacacaaatgatcactgggcttcttttaagcaacattctgttttcttgtcctaacctatctcaagctaaggaaattctagggtctattgttcaaagacttgaaatgttttccttggattattcccactcttatatttttcttgcctctttccaaaagtgcgttaaaaatgtccaggttttttaactcattaagatgctcatcaagcatcttaatgagttagtcacgattacaactgcatcttttaaattacccaaactgttgaaaggctgccatgaaaggagcttctacaaacaaaatctgggctgtatttctcattatcttatgttgcaaaaagtgaatgaggagttacttccaaaacagtaattagcataaaggctgctgaagcagaggagagataggtgcgctactgtctcaatggaaaatgtcactgttttttctgcaaggaatatgtacattactactaaaggagaagctctttgctaacaaatgtgaaagggtttcacacagttcatggcacataataagtgctcataatttgtttgcttcatcggaattctctctgtagtctacttctcagtcaaataactgtgactacctccatttcctcacaatccagtctccttatgttccttctgttacaggaattgcagcctcatcacctatcacaatatttctcaacccttttcttttcattattgccttcctaag

SEQ ID NO: 723565 - DNA, 1891 bp, Homo sapiens
tttccagggcagcctacaaatatccaccatattgaaagaactgtttgaatggatatgtttaatgttccaagaatttatgaaacttaaaaatatatgttgatactacagtttgaaaaggacccagaattggaaaagctgcttgttcatgagtgtcccttgtctctactgtcctgtagtcagtgccccctcaaagttggatgcatctgagtggagatgcttttctgtcacctaaagtcacacatttacctttgatccagaccctccccagaagcagtgcttttgaaatctcttctcctcttctttttgtttgacaaaatataaatgatagtttatttctagaacgatgccaaattcaataaagcaatgatggagttgtgtttcgttttctggtcaagttgacaccataaagtgggttttcctgaatatttccctgttccactggtgttcttggcattgtgaataaacagagctggtgataacatccatcatagaattaagcacattgagtgggtgataaagtcaacaagaagctgaaacaagaattaccacggataagctgccaagagttggctgtagattctaagtggacactgtggctcattcatcttcacccttcagctttccaccccaacatcatccctgcctcagcactcatgacaagagtaggaaagtaggagagaaggaaagcacagggatcaagtacaggggacaaatacatagcattgatctgcctgagataaaatctaaagacgcagtagtaaattcttaatgagtactgagagagaacaaagaaaaatgttgtgggttttgttgttgttgttgttgttgttttttgagacagagtctccccctgtcgcccaggttggagtgcagtggagcgatctcggctcactgcaagctccgcctcccaggttcatgccattctcctgcctcagcctcccgagtagctgggactacaggcgcccgtcaacacacctggctaattttttgtattttyaatagaggcggggtttcaccatgttagccaggatggtctcgatctcctgaccttgtgatctgcccacctcggcctcccaaagtgctggtattacaggtgtgagccactgcacctggccgaaaaacactttttaagtcaaaatgaaccaactaacaaacaaaagtcatattccagaagtgcaagtagacacaaatgatcactgggcttcttttaagcaacattctgttttcttgtcctaacctatctcaagctaaggaaattctagggtctattgttcaaagacttgaaatgttttccttggattattcccactcttatatttttcttgcctctttccaaaagtgcgttaaaaatgtccaggttttttaactcattaagatgctcatcaagcatcttaatgagttagtcacgattacaactgcatcttttaaattacccaaactgttgaaaggctgccatgaaaggagcttctacaaacaaaatctgggctgtatttctcattatcttatgttgcaaaaagtgaatgaggagttacttccaaaacagtaattagcataaaggctgctgaagcagaggagagataggtgcgctactgtctcaatggaaaatgtcactgttttttctgcaaggaatatgtacattactactaaaggagaagctctttgctaacaaatgtgaaagggtttcacacagttcatggcacataataagtgctcataatttgtttgcttcatcggaattctctctgtagtctacttctcagtcaaataactgtgactacctccatttcctcacaatccagtctccttatgttccttctgttacaggaattgcagcctcatcacctatcacaatatttctcaacccttttcttttcattattgccttcctaag

SEQ ID NO: 723566 - DNA, 1891 bp, Homo sapiens
tttccagggcagcctacaaatatccaccatattgaaagaactgtttgaatggatatgtttaatgttccaagaatttatgaaacttaaaaatatatgttgatactacagtttgaaaaggacccagaattggaaaagctgcttgttcatgagtgtcccttgtctctactgtcctgtagtcagtgccccctcaaagttggatgcatctgagtggagatgcttttctgtcacctaaagtcacacatttacctttgatccagaccctccccagaagcagtgcttttgaaatctcttctcctcttctttttgtttgacaaaatataaatgatagtttatttctagaacgatgccaaattcaataaagcaatgatggagttgtgtttcgttttctggtcaagttgacaccataaagtgggttttcctgaatatttccctgttccactggtgttcttggcattgtgaataaacagagctggtgataacatccatcatagaattaagcacattgagtgggtgataaagtcaacaagaagctgaaacaagaattaccacggataagctgccaagagttggctgtagattctaagtggacactgtggctcattcatcttcacccttcagctttccaccccaacatcatccctgcctcagcactcatgacaagagtaggaaagtaggagagaaggaaagcacagggatcaagtacaggggacaaatacatagcattgatctgcctgagataaaatctaaagacgcagtagtaaattcttaatgagtactgagagagaacaaagaaaaatgttgtgggttttgttgttgttgttgttgttgttttttgagacagagtctccccctgtcgcccaggttggagtgcagtggagcgatctcggctcactgcaagctccgcctcccaggttcatgccattctcctgcctcagcctcccgagtagctgggactacaggcgcccgtcaacacacctggctaattttttgtatttttaatagaggcggggtttcaccatgttagccaggatggtctcgatctcctgaccttgtgatctgcccacctcggcctcccaaagtgctggtattacaggtgtgagccacygcacctggccgaaaaacactttttaagtcaaaatgaaccaactaacaaacaaaagtcatattccagaagtgcaagtagacacaaatgatcactgggcttcttttaagcaacattctgttttcttgtcctaacctatctcaagctaaggaaattctagggtctattgttcaaagacttgaaatgttttccttggattattcccactcttatatttttcttgcctctttccaaaagtgcgttaaaaatgtccaggttttttaactcattaagatgctcatcaagcatcttaatgagttagtcacgattacaactgcatcttttaaattacccaaactgttgaaaggctgccatgaaaggagcttctacaaacaaaatctgggctgtatttctcattatcttatgttgcaaaaagtgaatgaggagttacttccaaaacagtaattagcataaaggctgctgaagcagaggagagataggtgcgctactgtctcaatggaaaatgtcactgttttttctgcaaggaatatgtacattactactaaaggagaagctctttgctaacaaatgtgaaagggtttcacacagttcatggcacataataagtgctcataatttgtttgcttcatcggaattctctctgtagtctacttctcagtcaaataactgtgactacctccatttcctcacaatccagtctccttatgttccttctgttacaggaattgcagcctcatcacctatcacaatatttctcaacccttttcttttcattattgccttcctaag

SEQ ID NO: 723567 - DNA, 631 bp, Homo sapiens
tgctttattgttcccatcagttcaaagaaaatgccccagatgatttccaggaggaaaactaaagtattcagccctgtctcatcaaatgcccagctcgttcatggatgcaagaattttagacactgaaattagaatgaaggaggaaatctacaaacccttsagtccaaatcatacttctgtgaattttttacatctgcctgggtccaatgtgctgagagcgggctcaggttgccacaggcatggctggagactaggaatagagccttgctcactgacccatttcatgtctaggcttccaactgagactacagtttcattacaacctatatgcgcccataggtcctgcctgcggcaatgacgtctctcgggtcagtaaggggcacttggaacaggaatatcacccctatctggaagaccaggtggaggcttatcaccttcacagtaaggtactcactgtccacgtcaagagccaagccaaggtactgttcctccaatgagtaaacagcactgctgtagggctggcctaagtcaggcagttcaagataacctgaaggagtcgaataacatctatccagtgagtcctgcaagacttcaggctctttctcatccagcagctccctgctgagcctgg

SEQ ID NO: 723568 - DNA, 631 bp, Homo sapiens
tgctttattgttcccatcagttcaaagaaaatgccccagatgatttccaggaggaaaactaaagtattcagccctgtctcatcaaatgcccagctcgttcatggatgcaagaattttagacactgaaattagaatgaaggaggaaatctacaaacccttcagtccaaatcatacttctgtgaattttttacatctgcctgggtccaatgtgctgagagcgggctcaggttgccacaggcatggctggagactaggaatagagccttgctcactgacccatttcatgtctaggcttccaactgagactacagtttcattacaacctatatgcgcccataggtcctgcctgcggcaatgacgtctctcgggtcagtaaggggcacttgkaacaggaatatcacccctatctggaagaccaggtggaggcttatcaccttcacagtaaggtactcactgtccacgtcaagagccaagccaaggtactgttcctccaatgagtaaacagcactgctgtagggctggcctaagtcaggcagttcaagataacctgaaggagtcgaataacatctatccagtgagtcctgcaagacttcaggctctttctcatccagcagctccctgctgagcctgg

SEQ ID NO: 723569 - DNA, 1285 bp, Homo sapiens
aactgcagacggttacctggcacgctggccacaatctacctcactcttatcagagtctgagcagtgctttcagctctgagttgaggcacctcgaaccttgtttttgtggtgaaggatcctaaagtgctgtggggagtgatcacatttttcacaacagtaagttaagaatttcagttactgacatccctcagtcctgattaaacctatttgatttcaccagtttttaacccatcatatgtttgggtttcttctccccagtccctgactccacctcttctgccacaaacgtcagcatggtggtatcagccggcccttggtccagcgagaaggcagagatgaacattctagaaatcaacgagaaattgcgcccccagttggcagagaacaaacagcagttcagaaacctcaaagagagatgttttctaactcaactggccggcttcctggccaaccgacasaagaaatacagtaagatctataggctcaccatcatgaaagtgatgaatgtgagacactaaatgctctctccatcaaaaataatttcatccttcctgtacttctaggaaaacagaaatgggtattttaacattttgttaaagttggaagacagaggtaccaaagtatttagcaactttccatgtttgcaatcagatgggggtgggactagagttaaactcacagttattgatttctaacacaggcacagaacgacctgttttctccaagaggctcaatcatgttttcaagaatcctctctgtaccatataagatcctgcagacaaataacatctagtctgttgttctaaatgtctaggactagtgaacttttattcagttcaagtttctgttgaggcccaacaggcaaagctctgttctagtgactctgaggggaacttggtgatagtacccagtacctgctctgaggggcttcaagaggagtctgctcctaatagaacctgtgctatctataagtgacagcatcaagagcagggagtaggggccgtgcaacgtggctcactcctgtaatctcagcactttgggaggctgaggcgggcagaggacgaggtcagcagtttgagactagcctgggcaacatggagaaaccccgtctccactaaaaatacaaaaagtagatgggcgtcgtggcgggcaactgtaatcaccactaatcgggaggctgaggcaggagaatcctttgaacccagcaggcagatgttgcagtgagtcaagattgcactattgcactccagcatgggtgacagggcaagactcgtcaaaaaacaaa

SEQ ID NO: 723570 - DNA, 1298 bp, Homo sapiens
gatagtaaacaattaagaaagagattatttaacattttgtgacatggcaaataaatttgaagaacattgtracccagtatagcctaattctacatttagtgtgtatgcatatttttatttgtaaatagaaccgttagcaaggtagactatgtgctgagcaattaaaaaactgagtgtttcaaaatattgaaattttcccagtattctttcacaagagaattaaattagaaaccagcaaaaatcacttatctagaaaaaaacaaatattttgaaattaaacaataaacttccatataattaatcatcaacagacaaaccacaagacaaatgagaaaatatttcaaatcaaataaaaatgaactctctctctctgtctcccgacacatagaacatacacacacacacgtgtgtaacattctgggacacagctaaagcagtgcttaaaagaatagagctttaaagttttatattttcaaagtatgatagtttatgaccatgttttcatttttcaccctaagattgagaaaagtgaaattaaaactgaagtcatcagaaggaagaaaacagtaaaatcagtgaagaagagaaaacggacaaagaaacacagagaagggagaaaattagcaaagctaaaatcagtaaaacataataaaactaaaaaatacagagcaaatggagaaaatttaaaggcattacaattggtttttgaaaatattaataaaattgaggacaaagtaaaaacaatgatcaagatttaaaaaatgatcaatattgaggatgaaagagggcagtgacatcagcacgatgccagtataggaagccaccactctcccttccccccacaggcacactgattcaatgacgatactggaaacaattccctttatgagaaatcaagaaaccagttcaaagcctcctgcaaccccctaaagtaaacagagaccaatatattttgactgcttctccctcagagaggaaagataagagtgaactaagcatctatcatcctagcttttgggggagcatcctaaagtacaggtttctctcttgcttgtgtaggagcacttaacgatacctgcaatactctagtttcctgggggtaaaataaagagctaggcagggagtgatgtcagcaaaatggcagaagtggaagctcctgactcttcttccacccaagaatgtcctaaaaaaacatctattcataaatgaactcctcctgaaagaaaatgaaagaccagtaaagggactcctacttaacaggcaacaaagacaacattcacattgaacaagtaagaaaa

SEQ ID NO: 723571 - DNA, 1298 bp, Homo sapiens
gatagtaaacaattaagaaagagattatttaacattttgtgacatggcaaataaatttgaagaacattgtgacccagtatagcctaattctacatttagtgtgtatgcatatttttatttgtaaatagaaccgttagcaaggtagactatgtgctgagcaattaaaaaactgagtgtttcaaaataytgaaattttcccagtattctttcacaagagaattaaattagaaaccagcaaaaatcacttatctagaaaaaaacaaatattttgaaattaaacaataaacttccatataattaatcatcaacagacaaaccacaagacaaatgagaaaatatttcaaatcaaataaaaatgaactctctctctctgtctcccgacacatagaacatacacacacacacgtgtgtaacattctgggacacagctaaagcagtgcttaaaagaatagagctttaaagttttatattttcaaagtatgatagtttatgaccatgttttcatttttcaccctaagattgagaaaagtgaaattaaaactgaagtcatcagaaggaagaaaacagtaaaatcagtgaagaagagaaaacggacaaagaaacacagagaagggagaaaattagcaaagctaaaatcagtaaaacataataaaactaaaaaatacagagcaaatggagaaaatttaaaggcattacaattggtttttgaaaatattaataaaattgaggacaaagtaaaaacaatgatcaagatttaaaaaatgatcaatattgaggatgaaagagggcagtgacatcagcacgatgccagtataggaagccaccactctcccttccccccacaggcacactgattcaatgacgatactggaaacaattccctttatgagaaatcaagaaaccagttcaaagcctcctgcaaccccctaaagtaaacagagaccaatatattttgactgcttctccctcagagaggaaagataagagtgaactaagcatctatcatcctagcttttgggggagcatcctaaagtacaggtttctctcttgcttgtgtaggagcacttaacgatacctgcaatactctagtttcctgggggtaaaataaagagctaggcagggagtgatgtcagcaaaatggcagaagtggaagctcctgactcttcttccacccaagaatgtcctaaaaaaacatctattcataaatgaactcctcctgaaagaaaatgaaagaccagtaaagggactcctacttaacaggcaacaaagacaacattcacattgaacaagtaagaaaa

SEQ ID NO: 723572 - DNA, 635 bp, Homo sapiens
taagtttcttgttgacgtacgtccatcactttttcgataggtcccactggtcaggtgaaattaagccataagccagcacaggcatagcaaatatttctatagccaccttacctgtgtctgcttcactcactgatcatggctctctggtggcaaccttagagtactcaatcttgtatttgagagccattaccaattgttcacaattggcactggggacaaaaactttttgccatttcatggccagaggttttttaatcctcatcacactttctctgcaggttggatttgatttatgccattttcctcatcagaagcttgggtttaattgtagatgcttagtaaatattcctcattaatttaggtcaatgggccgagtgtggtggctcacccctgtaatcccagcactttgggaggctgaggcgggcggattgcctgagctcaggagtttaygaccagcctgggtgtggtggcatgcacctgtagtcccagctactcgggaggctgaggcaggagaattgcttaaagggggagtggggggtggaggctgcagtgagctgagatcacgccacttcactccagcctgggtgacagagtgagactccatctcaaaaaaaaaaaaaatttaggtcaatgaa

SEQ ID NO: 723573 - DNA, 806 bp, Homo sapiens
tttattgatttcagcaattaaaaaaatttattatgtgcaaggtgctatgcgatttrtgagagtgactcaaacatagactataagctctttgagagttgagaacaatagagaaattaagacatggatgcagagggatgtaataggatgaagaaagtgagatgtgcagacaaaacctgtggaggttcagaaaacaagagggatccacacatgttcttggaagaggtagcatttggttggagtttgaaggaagggtagtatggaaagaatgaagaaaaatttttaaaaattataactgcctttttatagagtgcttttataattttgaaacttgtatagttcttgaacacatggcattgatactaattgcaaattgatattctgactttaaaaattaaaaaagattactggaagccaggagtggtggcatgtgcctgtagtcccactgcttggcaggctgaggcaggaggatcccttgagctcaggaattagaggctgcagtgccctatgattatgcctgtgaatagctcctgcactccagcctgggcagcatagtgagaccttgttttttttttttttttttttaaacaaagatgattggagtgatcttaagttctctattttccactgactttaaaacagtgttacattattactactgaatacttgattttctttttgcctccagctactattatataaggcaggttgttttttcccccttaatatcataggctttctttggtaaaaactgtcctgttggtaaacattaaatgataaaagactgtgagtacaggactactatgaaa

SEQ ID NO: 723574 - DNA, 1130 bp, Homo sapiens
tgtcatggggattgaatgggggtttctcctgctacgttttcataatgagtgctttgtctgtgctgccaagtgcaccaccaattccataaatgtggttgacctggctccttacagaggaggtcaaaatcaccaagggttctgaacatctataagttgtggcccaacactatattctgaaaacaggtctgattaggaacacactgtaatgggtagacaaagaccccatctcctggaccctgatgggttttgcggattgtcaagttcctcttttcctaaaatagcttccttttcaacaacctgtgggtgcccgagtccctctgttggtatcagttgggctatctggtatatttatgggtagtcttatctgagccaagtaacctactatgtgctaacacgccaactcactccatgggcctgcttggaattcagaacccactgccatgcagacggacatcggggggcttccacaggtacccaggggtggatccctggcccgcagactgggctagacttgctgtcctagctaggttcctgcaccctcttccctgggtcctcacctcctgtcctgcaaatgctgtttcatcatctctcctaagaagcctcaagttctgaacgatggggtccttgtccattgtggttgtcattgtgccctttgtatcttgcacatggtttggcacagaacagggcctgaataaacacaggttgttgataaatgtggggtaggggtaagttagagagaagaggaggaaattgataataatagcatattctctcaatgtcaggagaccacgttgaccacccggtttccatgacacttggggagtatggctgtgtgcttggtatacttggygtcatatgaactcatttaatctttatagcaagtcctcaagggaagttctgtgatggccctcaagaggcacagagagggtaagcaacttgcccaaggtcacacagctaatatgtgatacagtcaagattctaggccctgaggctctagtactatagagactcctattaatagataacctactatgtgttgggcattttctcccttaatgctataaaaaccttgggaaaactgaagctcagggggctgaccctgccaagccaaacagccagcaaatggcaga

SEQ ID NO: 723575 - DNA, 1536 bp, Homo sapiens
ctgaagccacattaactgctctttgccttctcgcaaagtcacccactcttgattttttttgcataacttaattcagtttttctgctcttgctacattttcttcagctcctacacattttttgggaggtggttataatgttattatcttattattagtcactaaccgggaataattcacttttccaattgatctatgctgcytacaaaatgccatatcaactggaagcacagtctggttagtgagttttgagagccagttcagacagaccactttgtgtgacaggcttggctcaggcaatgatgacctctatgagctgaatttacctgtggtcaaacggtcccagtgttggaagagcatccacaagccagattctcaagggtgcggcaggggtacctgattgtgtccaactcatgttgtgtgctgaatattttacacagttcctgctagtttgcatttgtcctaaataaatttctgacaatgtcaagttcaatggattctctagataaaacatccctgagcaccatgtttcccttgaaaggatgcccagctgcatatgcacatttgtggtgtagccttcacacaaacacacttatttgggtaaagtagaagtgtgtatgtgggaactaatacatccttctgccatcgtgactcaagcctgaggagtgttaattgtggatgagtggggttttggggcataagcaattgcctggttcactttatggtagaatcaccccgaagctgtgtattgggaggagagaatgaggacggaacattaggtgaactaaaaggagaggctataaactgaagcttattctttgggtaagagcaagccaaatttattcatgaatgggtgttcctggcctttgctttcctgctgtcatctaatcaggttttcttgattcttgactaggtttttggaagaacttagggatatagaatcaaaaagaaaggaggagaaagaaatgaacaagaagccctctatttagggttcaggagaagtttttcagggtgttagaggaaagggtgggagaaccataggggtgacgagggagacaagagggcatagaaattttaagagatatcgctacagatatctccaatccgtagagtaacctggtgggctttgcatgtggctttgaccagtcattggcccttctgggtctcctcatctccccatctctcagaacttggaccccaggaagccaaagggcctttctagtgctcacattcagatgtcaaatggcatcctcaaactatgcttggtccaggactctggagagatctggattcctattgactcagaaaattactcagtattattttatctggtgtaagccacatccctcttctgtgccttgattactctattggctcatcaaggacactgaaataaacacaggggactcacaacgtgatattcatgaagttgggtttctttttttctttttttgagacagaatcttgctttgtctcccagactggagtgcagtggcgaggtcatggctcactgcagcctcaaccttccagtgtcaagt

SEQ ID NO: 723576 - DNA, 2517 bp, Homo sapiens
ggtggcgtatccgtgggaccgactgctgggcatggggcgtcccagccagcagagaggcagcaccggccccactgccgtccctcctctccacccctgagttcccactgtaccaggagtgggcttgctgttctctggctcctgcatccctgtggtggaatttcctcccttccccctggagggaggggctccctcaccctacccacaccccaggtggagctcagggatccttccctgtgtcccctacaaggccagcccctcccagtgggactcgtgtggggtctcctcccaccccattctgtcaaccatgygtgtgacttgaggatgcaagtggtttatgcatctgttataaaaacagtccccgcccctctctgcccattgtgcgtccacaaggctcccatgcccttgtgtttattttcccagcatttatgtttcaggtcagtcttttcatgtctgcctttttatgcttaaataatgtgcttaggaggccagacatggtgactcacacctgtcatcccagcactttgggagaccgaggtgcgtggatcacttgaggtcaggagttcgagaccagcctggccaacatggtgaaaccccgtctctactaaaaatacaaaaattagccagacacaggggggaatgcttgtaatcccagctacttgggaggctgaggtgggagtatcacttgagccagggaggcagaggttgcagtgagctgagatggcgccactgcactccagcctgggcaacagagtgagactccgtctcaaaaaataaataaaaaatgccaggcgtggtggtcaggagttcgagaccagcctggccaacgtggtgaaaccccctctctaccaaaaatacaaaaattagctgggcatggtggcacacacctgtaatcccagcaacttgggaggctgaggcatgagaatagcttgaacccaggatgcagagtttgcagtgggctgagatcgagccactgcactccagcctgggtgacagagcaagactctatctcaaaaataaataaataaataaaaataaataaaaaataatgtacttaggccgggcatgggggctcatgtctatcatcccagtactttagggggctgaggcgggaggatctgttgagcccaggagttggagaccactgtgggcaacacagcaagaccccatctctacccaaaataattatactgtgcttagctggacacttctcaggttctcagtgttgcacagggtctcctgattctccaccctggaagtgaaggatttaattccctctcacacatagaaccccccaactgtccccacccccaacataattttggtgagacagacattcagtgtctacgttactatgcgggtgcagctcacgctgagccgtgcagcaggctggggttcctcattttccctggagtgcatctggttcccaggccacttgtgccccagtttcttcctggggctgtgacttcacctctgcactctccttccgctatgtaagccgcctctccacgtgttcagacacattggaacagtttcctcccagagcctcctgaccatcccctgtggcctggtgcctggcctctgtcatctggcacccactctctcctatcagttggctcctgctgcctggaccccatcttcctctatgtggctgcccctcgttttgctcatgcccaccctccaagacttcttttttttttaaatatatataatggggacggggtgcggtagcccatgcctgcaattccagcactttgggaggccgaggcgggcggatcacctgaggtcaggagttcgagaccagcctggccaacatggagaaaccccgtctctactaaaaatacaaaaattagccggttgtggtggtagacgcctgtaattccagctactcaggaggctgagacaggagaatcgcttgaacccaggaggcagaggttgcggtgagccgagatcgtgccattgcactccagcctgggagacagagagagactctgtctcaaaaaaaaaaaatatatatatatatatatatatatatatatatattttttttttttttttttttttttaattattttttttttgcccacggcacagttccaagagatctcgggaacatgtttccctccatggccttctttttaattaattaatttatttatttattttgagacagagtcttgctgtcacccaggctagagtgcagtggtgagatctcggctcactgcaacctccacctcccaggttcaagcaattctcctgcctcagcctcctgaatagctgggactacaggggtgcaccaccacgcctagctaattttttcacatttttagtggagacagggtttcaccatgttggccaggctggtcttgaactcctgacctcaagtgatctgcccacctcagcctcccaaagtgctgggatcataggcatgagctactgtgcccagccatctacttctatttaagaaaggggcagcaaacagtggcttagacaccctgtgccacgtgcaggattcatcca

SEQ ID NO: 723577 - DNA, 2517 bp, Homo sapiens
ggtggcgtatccgtgggaccgactgctgggcatggggcgtcccagccagcagagaggcagcaccggccccactgccgtccctcctctccacccctgagttcccactgtaccaggagtgggcttgctgttctctggctcctgcatccctgtggtggaatttcctcccttccccctggagggaggggctccctcaccctacccacaccccaggtggagctcagggatccttccctgtgtcccctacaaggccagcccctcccagtgggactcgtgtggggtctcctcccaccccattctgtcaaccatgtgtgtgacttgaggatgcaagtggtttatgcatctgttataaaaacagtccccgcccctctctgcccattgtgcgtccacaaggctcccatgcccttgtgtttattttcccagcrtttatgtttcaggtcagtcttttcatgtctgcctttttatgcttaaataatgtgcttaggaggccagacatggtgactcacacctgtcatcccagcactttgggagaccgaggtgcgtggatcacttgaggtcaggagttcgagaccagcctggccaacatggtgaaaccccgtctctactaaaaatacaaaaattagccagacacaggggggaatgcttgtaatcccagctacttgggaggctgaggtgggagtatcacttgagccagggaggcagaggttgcagtgagctgagatggcgccactgcactccagcctgggcaacagagtgagactccgtctcaaaaaataaataaaaaatgccaggcgtggtggtcaggagttcgagaccagcctggccaacgtggtgaaaccccctctctaccaaaaatacaaaaattagctgggcatggtggcacacacctgtaatcccagcaacttgggaggctgaggcatgagaatagcttgaacccaggatgcagagtttgcagtgggctgagatcgagccactgcactccagcctgggtgacagagcaagactctatctcaaaaataaataaataaataaaaataaataaaaaataatgtacttaggccgggcatgggggctcatgtctatcatcccagtactttagggggctgaggcgggaggatctgttgagcccaggagttggagaccactgtgggcaacacagcaagaccccatctctacccaaaataattatactgtgcttagctggacacttctcaggttctcagtgttgcacagggtctcctgattctccaccctggaagtgaaggatttaattccctctcacacatagaaccccccaactgtccccacccccaacataattttggtgagacagacattcagtgtctacgttactatgcgggtgcagctcacgctgagccgtgcagcaggctggggttcctcattttccctggagtgcatctggttcccaggccacttgtgccccagtttcttcctggggctgtgacttcacctctgcactctccttccgctatgtaagccgcctctccacgtgttcagacacattggaacagtttcctcccagagcctcctgaccatcccctgtggcctggtgcctggcctctgtcatctggcacccactctctcctatcagttggctcctgctgcctggaccccatcttcctctatgtggctgcccctcgttttgctcatgcccaccctccaagacttcttttttttttaaatatatataatggggacggggtgcggtagcccatgcctgcaattccagcactttgggaggccgaggcgggcggatcacctgaggtcaggagttcgagaccagcctggccaacatggagaaaccccgtctctactaaaaatacaaaaattagccggttgtggtggtagacgcctgtaattccagctactcaggaggctgagacaggagaatcgcttgaacccaggaggcagaggttgcggtgagccgagatcgtgccattgcactccagcctgggagacagagagagactctgtctcaaaaaaaaaaaatatatatatatatatatatatatatatatatattttttttttttttttttttttttaattattttttttttgcccacggcacagttccaagagatctcgggaacatgtttccctccatggccttctttttaattaattaatttatttatttattttgagacagagtcttgctgtcacccaggctagagtgcagtggtgagatctcggctcactgcaacctccacctcccaggttcaagcaattctcctgcctcagcctcctgaatagctgggactacaggggtgcaccaccacgcctagctaattttttcacatttttagtggagacagggtttcaccatgttggccaggctggtcttgaactcctgacctcaagtgatctgcccacctcagcctcccaaagtgctgggatcataggcatgagctactgtgcccagccatctacttctatttaagaaaggggcagcaaacagtggcttagacaccctgtgccacgtgcaggattcatcca

SEQ ID NO: 723578 - DNA, 2517 bp, Homo sapiens
ggtggcgtatccgtgggaccgactgctgggcatggggcgtcccagccagcagagaggcagcaccggccccactgccgtccctcctctccacccctgagttcccactgtaccaggagtgggcttgctgttctctggctcctgcatccctgtggtggaatttcctcccttccccctggagggaggggctccctcaccctacccacaccccaggtggagctcagggatccttccctgtgtcccctacaaggccagcccctcccagtgggactcgtgtggggtctcctcccaccccattctgtcaaccatgtgtgtgacttgaggatgcaagtggtttatgcatctgttataaaaacagtccccgcccctctctgcccattgtgcgtccacaaggctcccatgcccttgtgtttattttcccagcatttatgtttcaggtcagtcttttcatgtctgcctttttatgcttaaataatgtgcttaggaggccagacatggtgactcacacctgtcatcccagcactttgggagaccgaggtgcgtggatcacttgaggtcaggagttcgagaccagcctggccaacatggtgaaaccccgtctctactaaaaatacaaaaattagccagacacaggggggaatgcttgtaatcccagctacttgggaggctgaggtgggagtatcacttgagccagggaggcagaggttgcagtgagctgagatggcgccactgcactccagcctgggcaacagagtgagactccgtctcaaaaaataaataaaaaatgccaggcgtggtggtcaggagttcgagaccagcctggccaacgtggtgaaaccccmtctctaccaaaaatacaaaaattagctgggcatggtggcacacacctgtaatcccagcaacttgggaggctgaggcatgagaatagcttgaacccaggatgcagagtttgcagtgggctgagatcgagccactgcactccagcctgggtgacagagcaagactctatctcaaaaataaataaataaataaaaataaataaaaaataatgtacttaggccgggcatgggggctcatgtctatcatcccagtactttagggggctgaggcgggaggatctgttgagcccaggagttggagaccactgtgggcaacacagcaagaccccatctctacccaaaataattatactgtgcttagctggacacttctcaggttctcagtgttgcacagggtctcctgattctccaccctggaagtgaaggatttaattccctctcacacatagaaccccccaactgtccccacccccaacataattttggtgagacagacattcagtgtctacgttactatgcgggtgcagctcacgctgagccgtgcagcaggctggggttcctcattttccctggagtgcatctggttcccaggccacttgtgccccagtttcttcctggggctgtgacttcacctctgcactctccttccgctatgtaagccgcctctccacgtgttcagacacattggaacagtttcctcccagagcctcctgaccatcccctgtggcctggtgcctggcctctgtcatctggcacccactctctcctatcagttggctcctgctgcctggaccccatcttcctctatgtggctgcccctcgttttgctcatgcccaccctccaagacttcttttttttttaaatatatataatggggacggggtgcggtagcccatgcctgcaattccagcactttgggaggccgaggcgggcggatcacctgaggtcaggagttcgagaccagcctggccaacatggagaaaccccgtctctactaaaaatacaaaaattagccggttgtggtggtagacgcctgtaattccagctactcaggaggctgagacaggagaatcgcttgaacccaggaggcagaggttgcggtgagccgagatcgtgccattgcactccagcctgggagacagagagagactctgtctcaaaaaaaaaaaatatatatatatatatatatatatatatatatattttttttttttttttttttttttaattattttttttttgcccacggcacagttccaagagatctcgggaacatgtttccctccatggccttctttttaattaattaatttatttatttattttgagacagagtcttgctgtcacccaggctagagtgcagtggtgagatctcggctcactgcaacctccacctcccaggttcaagcaattctcctgcctcagcctcctgaatagctgggactacaggggtgcaccaccacgcctagctaattttttcacatttttagtggagacagggtttcaccatgttggccaggctggtcttgaactcctgacctcaagtgatctgcccacctcagcctcccaaagtgctgggatcataggcatgagctactgtgcccagccatctacttctatttaagaaaggggcagcaaacagtggcttagacaccctgtgccacgtgcaggattcatcca

SEQ ID NO: 723579 - DNA, 2517 bp, Homo sapiens
ggtggcgtatccgtgggaccgactgctgggcatggggcgtcccagccagcagagaggcagcaccggccccactgccgtccctcctctccacccctgagttcccactgtaccaggagtgggcttgctgttctctggctcctgcatccctgtggtggaatttcctcccttccccctggagggaggggctccctcaccctacccacaccccaggtggagctcagggatccttccctgtgtcccctacaaggccagcccctcccagtgggactcgtgtggggtctcctcccaccccattctgtcaaccatgtgtgtgacttgaggatgcaagtggtttatgcatctgttataaaaacagtccccgcccctctctgcccattgtgcgtccacaaggctcccatgcccttgtgtttattttcccagcatttatgtttcaggtcagtcttttcatgtctgcctttttatgcttaaataatgtgcttaggaggccagacatggtgactcacacctgtcatcccagcactttgggagaccgaggtgcgtggatcacttgaggtcaggagttcgagaccagcctggccaacatggtgaaaccccgtctctactaaaaatacaaaaattagccagacacaggggggaatgcttgtaatcccagctacttgggaggctgaggtgggagtatcacttgagccagggaggcagaggttgcagtgagctgagatggcgccactgcactccagcctgggcaacagagtgagactccgtctcaaaaaataaataaaaaatgccaggcgtggtggtcaggagttcgagaccagcctggccaacgtggtgaaaccccctctctaccaaaaatacaaaaattagctgggcatggtggcacacacctgtaatcccagcaacttgggaggctgaggcatgagaayagcttgaacccaggatgcagagtttgcagtgggctgagatcgagccactgcactccagcctgggtgacagagcaagactctatctcaaaaataaataaataaataaaaataaataaaaaataatgtacttaggccgggcatgggggctcatgtctatcatcccagtactttagggggctgaggcgggaggatctgttgagcccaggagttggagaccactgtgggcaacacagcaagaccccatctctacccaaaataattatactgtgcttagctggacacttctcaggttctcagtgttgcacagggtctcctgattctccaccctggaagtgaaggatttaattccctctcacacatagaaccccccaactgtccccacccccaacataattttggtgagacagacattcagtgtctacgttactatgcgggtgcagctcacgctgagccgtgcagcaggctggggttcctcattttccctggagtgcatctggttcccaggccacttgtgccccagtttcttcctggggctgtgacttcacctctgcactctccttccgctatgtaagccgcctctccacgtgttcagacacattggaacagtttcctcccagagcctcctgaccatcccctgtggcctggtgcctggcctctgtcatctggcacccactctctcctatcagttggctcctgctgcctggaccccatcttcctctatgtggctgcccctcgttttgctcatgcccaccctccaagacttcttttttttttaaatatatataatggggacggggtgcggtagcccatgcctgcaattccagcactttgggaggccgaggcgggcggatcacctgaggtcaggagttcgagaccagcctggccaacatggagaaaccccgtctctactaaaaatacaaaaattagccggttgtggtggtagacgcctgtaattccagctactcaggaggctgagacaggagaatcgcttgaacccaggaggcagaggttgcggtgagccgagatcgtgccattgcactccagcctgggagacagagagagactctgtctcaaaaaaaaaaaatatatatatatatatatatatatatatatatattttttttttttttttttttttttaattattttttttttgcccacggcacagttccaagagatctcgggaacatgtttccctccatggccttctttttaattaattaatttatttatttattttgagacagagtcttgctgtcacccaggctagagtgcagtggtgagatctcggctcactgcaacctccacctcccaggttcaagcaattctcctgcctcagcctcctgaatagctgggactacaggggtgcaccaccacgcctagctaattttttcacatttttagtggagacagggtttcaccatgttggccaggctggtcttgaactcctgacctcaagtgatctgcccacctcagcctcccaaagtgctgggatcataggcatgagctactgtgcccagccatctacttctatttaagaaaggggcagcaaacagtggcttagacaccctgtgccacgtgcaggattcatcca

SEQ ID NO: 723580 - DNA, 2517 bp, Homo sapiens
ggtggcgtatccgtgggaccgactgctgggcatggggcgtcccagccagcagagaggcagcaccggccccactgccgtccctcctctccacccctgagttcccactgtaccaggagtgggcttgctgttctctggctcctgcatccctgtggtggaatttcctcccttccccctggagggaggggctccctcaccctacccacaccccaggtggagctcagggatccttccctgtgtcccctacaaggccagcccctcccagtgggactcgtgtggggtctcctcccaccccattctgtcaaccatgtgtgtgacttgaggatgcaagtggtttatgcatctgttataaaaacagtccccgcccctctctgcccattgtgcgtccacaaggctcccatgcccttgtgtttattttcccagcatttatgtttcaggtcagtcttttcatgtctgcctttttatgcttaaataatgtgcttaggaggccagacatggtgactcacacctgtcatcccagcactttgggagaccgaggtgcgtggatcacttgaggtcaggagttcgagaccagcctggccaacatggtgaaaccccgtctctactaaaaatacaaaaattagccagacacaggggggaatgcttgtaatcccagctacttgggaggctgaggtgggagtatcacttgagccagggaggcagaggttgcagtgagctgagatggcgccactgcactccagcctgggcaacagagtgagactccgtctcaaaaaataaataaaaaatgccaggcgtggtggtcaggagttcgagaccagcctggccaacgtggtgaaaccccctctctaccaaaaatacaaaaattagctgggcatggtggcacacacctgtaatcccagcaacttgggaggctgaggcatgagaatagcttgaacccaggatgcagagtttgcagtgggctgagatcgagccactgcactccagcctgggtgacagagcaagactctatctyaaaaataaataaataaataaaaataaataaaaaataatgtacttaggccgggcatgggggctcatgtctatcatcccagtactttagggggctgaggcgggaggatctgttgagcccaggagttggagaccactgtgggcaacacagcaagaccccatctctacccaaaataattatactgtgcttagctggacacttctcaggttctcagtgttgcacagggtctcctgattctccaccctggaagtgaaggatttaattccctctcacacatagaaccccccaactgtccccacccccaacataattttggtgagacagacattcagtgtctacgttactatgcgggtgcagctcacgctgagccgtgcagcaggctggggttcctcattttccctggagtgcatctggttcccaggccacttgtgccccagtttcttcctggggctgtgacttcacctctgcactctccttccgctatgtaagccgcctctccacgtgttcagacacattggaacagtttcctcccagagcctcctgaccatcccctgtggcctggtgcctggcctctgtcatctggcacccactctctcctatcagttggctcctgctgcctggaccccatcttcctctatgtggctgcccctcgttttgctcatgcccaccctccaagacttcttttttttttaaatatatataatggggacggggtgcggtagcccatgcctgcaattccagcactttgggaggccgaggcgggcggatcacctgaggtcaggagttcgagaccagcctggccaacatggagaaaccccgtctctactaaaaatacaaaaattagccggttgtggtggtagacgcctgtaattccagctactcaggaggctgagacaggagaatcgcttgaacccaggaggcagaggttgcggtgagccgagatcgtgccattgcactccagcctgggagacagagagagactctgtctcaaaaaaaaaaaatatatatatatatatatatatatatatatatattttttttttttttttttttttttaattattttttttttgcccacggcacagttccaagagatctcgggaacatgtttccctccatggccttctttttaattaattaatttatttatttattttgagacagagtcttgctgtcacccaggctagagtgcagtggtgagatctcggctcactgcaacctccacctcccaggttcaagcaattctcctgcctcagcctcctgaatagctgggactacaggggtgcaccaccacgcctagctaattttttcacatttttagtggagacagggtttcaccatgttggccaggctggtcttgaactcctgacctcaagtgatctgcccacctcagcctcccaaagtgctgggatcataggcatgagctactgtgcccagccatctacttctatttaagaaaggggcagcaaacagtggcttagacaccctgtgccacgtgcaggattcatcca

SEQ ID NO: 723581 - DNA, 1189 bp, Homo sapiens
tcatcagtgttgttgttgtttttttttttttttagacggagtctcgctctgttgccaggctggagtgcagtggtgcaaacttggctcactgcaacctccactttctgggttctaaagagttctcctgcctcagcctcccaagtagctgggactataggcccacgccataacacctagctactttttgtatttttagtagagacagggtttcaccatgttgtccaggatggtctcgaactccygacctcgtgatctgctcccctcggcctcttaagtgctgggattacaggcgtgagccacagcgcccagccaatcatcagtggtttctaaaaccattgggtgaaagatagataagaaaccttattactgtatctattgatgaatcaggccaaccacatttgaacaacatttgattgataacaagacattatgtgcctcttgatgtggtaccatcggaagtacatagagaatagagtatacatatataaagtggctggaagcagtggctcatacctgtaatcccagcactttgggaggccgaggcgggcggatcacctgtggtcaggggttcgagaccagcctggccagcatggtaaaaccccgcctgtactaaaaatatagaaaattagctgggggtggtggtacacgcctgtagtcccagctactcaggaagctgcggcaggagaatcacttgaatctgggaagcagagtcggcagtgagctgagatcatgccattggattccagcctgggcaacagagcaagactcgtataaaaaaaaaatacagtatacatatatatccttacctaaataaataatttttttttttttgagatggacttttcgctctttttgcccaggctggagtgcaatggcgcgatctcagctcgccacaacctctgcctgctgggttcaagcaattctcctgcctcagtctcctgcctcagtctcccaagtatctgggattacaggcgcctgccaccacgctcggctaatttttgtattttttgtatttttttttttttttgagacagtcttgctctgtcgcccaggctggagtgcagtggcacgatctccgctcactgcaagctgcgcctcctgggttcacgccattctcctgcctcagcctcccgagtagctgggactacaggcgcccgccaccacgcctggctaatttttttgtattttt

SEQ ID NO: 723582 - DNA, 2103 bp, Homo sapiens
tcaaaatttatcaacttacatactttaattttttatttattattattttttaaattgagctgaggcttttgctatgttgtcaaggctggtctcaaacatctgggctcaaatgatcctcccaccttggcctcctgagtagctggaactacaagtgtgcactgccacacctggctgacctgtatgctctaaacatacacagcatactggatgtcatacatacctcaacaaatcaattcagtgtaataaaattataagaaaaaataagtcactttgataaagacaaaggtaaagagaggaaaacaaaatagcagtgaccttaatagtttacttaaatgacatatggtggtgacttagattacaatggtggcaactggaatggggaaaaaaaataaggacttggcgattgattagatatagtgattttcaggataaaggagaaaatgacatctggtggattttcctgatttctggcttcagcaaactggatagatgatggtattgcaggctggcttctttggggtaacagtcaaattagcatgcagaacactaactagcatgctttggggaacaccaggggaaaggaggagagagaagcagaatcagacagactgagaagttgatctatgataagtcccaatgaaggcttttgccaacagtacatgaagttctgaaactgaagtatccgttcataatggtcctcagatgagataaaaggcccagatctttgtaccctcacaccaatcagtcatttagatggtggatgcctctgaaaagagttgtgaccttgggcaaggcagttctcattagctgaggcaatctcaaaagaaggtttagtctcaaagagggctattctcacccagcactcccaagaactctaaaatcagtcattccttccccaggagggactgggcagcacatctcagtgtccaccacaggtggtggttctctcactgagacacagaacccttacctcaaatggataacaactttacatattacaaaaacacaagggaggcgtggtggctcacgcctgtaatcccagcactttgggaggccgtggcgggaagatcacttgaggccaggagttcaaaacaagcctggccaatatggcaaaaccccatctctactaaaaatacaaaaattagctgggtatggtggtgcattcctgtaatcctagctacttgggaggctgaggcaggagaatcaattgagcccaggaagttgcagtgaaccaagattgtgctactgcactccagcgtggacaacagagccagaccttgtctcaaaataaaataaaataaaaaactcaaacaaacaaacaaacaaaaaaacacaaccatcagtcaagtgctatactagcttgttaataaaattttaaatttgcagctagacatatgcctgtaatcccagcactctgggaggtcaaggcaggaggatcccttgagctcaggagtttgagaccagcctaagcagcatagtgagaccctcatctctacaaaaaaaaaaaaaaaaagaaaagaaaagaaggaaaggaaagaaaaagaaagaaagaaagaaagaaaaggaaagaaaaagaaagaaagaaagaaagaaagaaagaaagaaagaaagaawgaaagaaagaaagaaagaaagattgattagctgggcaaggtggtacacacctgtagtcccagctacttgggaggctgaggcaggagaatcacatgagccttggcagttgaagctgcagtgagctgtgatcagcctctgcactctagcctgggtggcaaaataaatacattctgcatttaatggtcacaaatgggttttagaatgcttgccttctgaaatcacaccattgcaagagtaactccctagtttcttaagagaataatgatggagtttctgtggaagtaaaaacaatctgaggaaacaatccagccctgcctacttctctcaacccctactgcaggattcaagcctcctctcactactccttggattatcattacagcccctgaaacagctgctcttgtgccaggcaaaccattcttcacatttcagctaaagaaaagcttcagacattaaccatttacagctccagcagctagcacaatcact

SEQ ID NO: 723583 - DNA, 2494 bp, Homo sapiens
ccaaaatctctctctcacttttccccgacgcctggtctctctagtcctcttttccaagccaccagaagggactctctcgggaatttccttatctgattaagaaagcatctttccaaaagaaatgcaattgttttaagactccctccctagaaaatctcatcaaatgaccaggaaagatcaaccaccagagaatagaagagaccaggagtcttcatcatgtccagacagaattttcatttgtttttctgagggcagcttcaagagattacctgaggggcttcatctacataataataaaaaacctttgttatgcctctcaactttggagttactcccaatcagctcccacagagaaccatagtctgagcattgggcctattcattcctccatccctcccccaaccccatgaaacagggtacagaagcttctgtaccactgagttgttgggtgatcaccctgtgattctccccckgtgcccagcacattaatagattttgcgtgccttttctcctgttaatctacattttgtcagttgcttttcagaaaacttcatggtatttttttctttttctgtttttctgtctctctctttccttctttctttcttttctttccttttttgacagggtctcactctgcttcccaggctggatagcagtggcttgaattcagctcactgcaacctccatcagttcccccacctcagcctccctagtagctgggactataggcattgtgcctctatacttggctaatttttttaaatttttgtagagatgatgtctcactacattgcccaggctggcctcaaactcctggccttaagcgatcctcctgccttggcctcccaaagtgcccagcttcagagaaacttcaaagggctaagggcaagttttcccttggtccctacagatacaaatgcaaatgtgactgagcctgtggcctcatagagctgatggtctgatagaaaaaaataagacacagaaaactagaaaactcagaaatccatggcaagtaatcttagagagggactaggggcagaggggataaggctgtctggaatgtcccacaggagaaacagaggaggtctttgaggtcaaagtatcattttatctgggctcctagggtaaaatttcaaccacaaaaactctgagcattttgcaggtgcaaggcttaacatcagcaatatcgttcaggcctaatattgcttttgataataggtgattaattcagtctaggaaatccctagtgataacacctcagaagtctgagaacaggttttatgaattgagaaggcacataggcctcaaatccatgcagaggctgggtgccgtggctcacacctgtgatcccagcactttgggaggctgaggtgggtggatcacttgaggtcaggaattcgagtccagcctgaccaacatggtgaaaccccatctctactaaaaatacaaattagccaggcgtggtggcacatgcctgtaatcccagctacttgggaggctgagacatgagaatcgcttgaacccaggaggcagaggttgcagtgagccgatgtgccactgcactccagccagggcgacagagcgagactccgtcaaaaaaaaaaacaacaacaacaacaaaacaaacaaacaaacaaaaaacacccatgcagagcaatatatatttctattctctcctatttgactattcagatgagtcaggaaaagaagtgttaagactgctgaccactctgtactccaaatttgctctctaaggattatagtctggaaagttaatgatcagtttattcaacatgattcagacttggggaacgcagatcacaccgcctcaactcacaaaacaggtgacctcatcatgttctctccaagtccctgatgtacaaaagcatagaaaccatgcatcttaggcttcccaaagcagtcccagttttatataatcttcctcttttggatgaaaacaaaaatatataaccaaatgtaacttaattcttgcagacttgatatatacataaattcaaaattaaagaaaaatatattttgtcagattgtcaatcctgattttgggtaccatatctacaagaaatgatgttgatttctcactctagggaagagtgaatcagggcctgaggaacagggaaacaattaaatgtgaaagattgctgtctataaaagagtatattgatattcatacaagcacttactgatgatctagtagattgaagaaaatcctaagtaatgagaggagatattatgcctttgaataaaacaggctttctggcacctgagagctcataaagtagtagggaagacagtttacacaaacatctttaatataaaagagcgcttgagaaatgctacaattaaagtgccaagtattgtattgtgagtaattagggaggggagtgtttgtttcagttcattctccatactgccaccaaaatgaactttctttctttcttttctttattgagacagagtcttgctctgtcac

SEQ ID NO: 723584 - DNA, 664 bp, Homo sapiens
ctcacgcctggaatcccagcactttgggaggctgaggcgggtggatcacaaggtcaggagttagagaccagcctggccaacacggcgaaaccctgtttctactaagaatacaaaaattagccaggcacggtggcgggcgcctgtagtcccagctactcaggaggctgaggaaggagaatcgcttgaacccagaaggtggaggttgcagtgagccgagatcgcactactgcactccagcccgggtgtcagagcgagaccccatctcaaaacaacaacaacaacaacaacaacaacaactcttccgccagttccaagctgtggatgctacttccgctctaaagtagaaatacaaattaatactttacctaccaaagggcagaagactgttttttttctaattctaatgtctataattctattttctttctttcttttatgtaacaaatcatttacaagaaagaataaaccaaaattaagagatgaataacagtaattgaacacactaaaattattcactaaatcaaggaacaattagaacacagctatttactcctgaaatcttgaaaacaawtagttttatcagcagtgagtctcctttgttacggagagaaaacacaaacgaagtaggctaattgggtatgcacttctggaaaatatgtgcaat

SEQ ID NO: 723585 - DNA, 1796 bp, Homo sapiens
tttgaaaaattagatatttgttgtttaagaaaatatgatcaatgaagagtcaaactacttcttcttcttcttcttttttaatgaaatgaacaggtaaaagtccttctatggcttagccatcccagactccagtagaaatgggtatgaagataattgcattatagctaacgagtagtggaaagagtgaagctaacaccaatcgcttgagggaacaagtaaattaaatgctgatgacmttgaccaggcagcaaactacattcattgattattttaattttctctcttctacactcagttaaacatccatagcagtggatttcaaggtaactaaaaggttgtttagcatacttttaaaagagtcaggaatagcagaacaaaaaggcccctatcaaacaaacaaaaaaatacctcatctgatgtgtgtcctctatatgtgggtgtacatgagtgattatttgcctctatgtatctgctcctcagaagggatgcatatgtgtttcaacagaaaggaagaaaaagagaaaattgacaggtagaacatttgaataaaaaagggaggaatgtcctatcctgggtaattctgttatgtgcagcattttaaaactgtgatattatgtggtagaaggaaataaaaacttgaggggaggataataaaatgaaagtgagaaggtgaatttttgtagttctggcttcttagatgtccactgcatttatctgaaaaaggaactcaacctgcttgaaaatttaggctttacaaacaaagtaaaacaaaaacagtttaaagatatttctacttttaaaaaatttttatttatttatgtatttatttgtttgtttgtttatttttgagacagagtctcactctgttgcccaggctggagtgcagtggcatgatcttgctcactgcaacctctgcctcctgggttcaagtgattctcctgcctcagcctccctagtagctgggattacaggcacgccaccaccacgcccggctaacttttgtatttatagtagagacagggtttcaccatgttggccaagctggtctcgaactcctgacaggtgatcctcccgcctgggcctccaaaagtgctgggatttacacgtgtgagccaccgtgccaggccaaaagatatttctaaaatgactaactagttgttgagttttgatggggattatactaaatcagaaatagtaatcaaaattaaagaattaataaggaaataatttgagttatagtgaagggtctttttaagagaatataaatccaaccagatgatatttaaatatgcctttctgttttcaccatttaatggcttgtctggattaagttgttgaaggactagggctgtgttaggatttgaatgtgtcctcacgaaagcatgtgttagaaacttaatctccagggcaatagggttgggaggtggggcctattaggaggtgattaggacaggagggttctgccctcatgaatggattaatgtcattgtcatgggaataggttatttatcttcaaagttggttcattataaaaaagcgaattcagtgctcccctactccctgccatccccctctcaccctcttgccttctgccaagggatgactcagcaagcaggcccttgccagaggctgttgcctcagtattggactttccagccttaagagctgtgagaaataaaaaaataagtttattttcttataagtaacccagtctctgttattctgttaaagtagtgtgaaacagatgaagacaggctgctttgtgaaaagtggttatatgaacacaaaagtttatt

SEQ ID NO: 723586 - DNA, 642 bp, Homo sapiens
tcagttataagtgggagctaaatgatgagaaattatgaacacaaagaaggaaacaacagacactgaggtctacttgagggtggagtgtggcaggagggaggggagcagaaaagatcactattgggtactgggcttaatagctgggtgatgaaataatctgtacaagaaaatcccttgacacaaatttacctatgtaacaaaccttcacatgtacacccaaacctaaaattaaaagatttttaaaaagagagaaattttaatgtatcttacatattaattgtgtgctttaaaaaaatacagactatacaattaaggtttcaggaaaagatakattggaaggaaatatagcatatcattaatagtagcataatgggttatttttactttttgcttatacttgttatattttccagagaaatacaatagatattctaaatgttaaaagcatagtgtcatacaaaatgtcttatagatagaggcttcccctgtttccaatgctgactctggcattcaaaatatttcttatgaccccttcaggaaattattctcaaagtcacagatgataatcattcattctcctgactttatggttatgcctcattttttatccccaaatatgactgtcttagccagttcaggctt

SEQ ID NO: 723587 - DNA, 1575 bp, Homo sapiens
aagaatatgagttgattgcgggtgttcgcatttggagaataatagttgtacaccaccttgtcgactcctttcttcatttagtgccctttgaaagaagagttataggcagttttcataaaataacataaggaaatatatcatccccaaatatggcattatataaaccaatttttttgagatacctgaaaatgttctaagctaaaattattttaaattaatgacgtttggaaagaactttacattttatttcattgtgtgtatttcatttaaattacactttattcatttttatgtattcagttgaaaaatgtatatggggtattgatttcattaaaaaatttagttcagtcagttcacagattcattcaactttatgctttacaggccaacattgctaaaaataatttcattttagactgaatttactgaatgaactagtgctttttcagaaagagtccttacaaagatagatctgatttacctccctctggttgtttccaatttttagaataatcatatgtttggaatgaaaagttaaaacatttatcacaaattgtgataattttggttcataaggtcctccttaaaattcctattttaaagaataccaactaaaacttttagccacaacttatttaaaacattaattaagcacatttctttttaaattttgcaacccccatgccaaaaaaaagatttttatctaatctagatattaggttggaaaaatgttacatttgtttaacctaygatgattttgtttatataaattaaaatgtgggtgttttagaattaaagcaatctctcaacctaaaatcagtaaaagtgcgctatttttgtgcctactacttaatcttgtagactgtattttgtaaacagaagaaattataataggataaaattccactcatgtgtttactgcaaaatagttgtgtacctgtagaaacaaattttggagagctttttattagtcatatgacttctttcctgtttacttttgtgtttatcctacttactgtgacacaccatctggaaataagaaataaagacatgagttaatttaggctagagttcaaaacacagacatccaaatatttgtacattgaatctgtgtgatgtatttataaaatggtcattacaaatatccaaagctgacctgctttaaggaaatgttacataattctaaaacagagttatgtttccacaaccgcattaattcattcacacgtttagaaaccttgtacgttttaaattgtaggaggatattcttccataacggcatttatccaatactctatgacatttaatagatgttatacagtaaattgggtttaagttcaaataaatttgggaacatttacaattcgatctccttcttcaaatacaatgagataccctactgagtttaagtcctacttaaagctgcttgaggatagtactttaaaaggagactagcttatatttgaatctcagttggaccctttactagcaggcaatcttaggcagtcaggtagcataagcctcaatttacttataaaataaaaataacaatggtacccatgttatagaattatt

SEQ ID NO: 723588 - DNA, 571 bp, Homo sapiens
tcctctcacagtctgcccctgcttcttcccaggaacggtatgattcagtcacatgaattacatctaggtacctgaaaacaccatgatcattcttacttcctggcctttgtctggtcttcacatggcatggaacactctgtgtcctcttctccattcaccagactcaccccaattcaccctgcagacttcagcttcagtgcacctcccctgggaagcctcgcaaggccctaattcaccctgcagacttcagcttcagtgcacctcccctgggaagcctcgygaggccctcccagctgcacagtgcccctcctggcattcctgtttcgagtgttataccacttcccaaactttactgtgcttaactgtttgctttctagaagctttttctttttttttttctttaagttttagggtacatgtgcacaacgtgcaggttagttacatatgtatacaggtgccatgtcggtgtgctgaaaccagtaactcgtcatttaacattaggtatatcgccaaatgctatacctcccccctccccccaccccacaacaggccccagtgtgtgatgttcccc

SEQ ID NO: 723589 - DNA, 571 bp, Homo sapiens
tcctctcacagtctgcccctgcttcttcccaggaacggtatgattcagtcacatgaattacatctaggtacctgaaaacaccatgatcattcttacttcctggcctttgtctggtcttcacatggcatggaacactctgtgtcctcttctccattcaccagactcaccccaattcaccctgcagacttcagcttcagtgcacctcccctgggaagcctcgcaaggccctaattcaccctgcagacttcagcttcagtgcacctcccctgggaagcctcgtgaggccctcccagctgcacagtgcccctcctggcattcctgtttcgagtgttataccacttcccaaactttactgtgcttaactgtttgctttctagaagctttttctttttttttttctttaagttttagggtacatgtgcacaaygtgcaggttagttacatatgtatacaggtgccatgtcggtgtgctgaaaccagtaactcgtcatttaacattaggtatatcgccaaatgctatacctcccccctccccccaccccacaacaggccccagtgtgtgatgttcccc

SEQ ID NO: 723590 - DNA, 602 bp, Homo sapiens
catgagactccagtttcattcctctacatatggcttgccaattatcccagcaccagttgttgaatagggtgtcctttccccactttacgtttttgtttgctttgtcaaatactagttgggtgtaagtatttggctttattgctggttctctattttgttccattattctgtgtgcctgtttttataccagtaccatgctgttttggtgactatagtctttgctartatagtttgaagttgggtaatgtgatgcctctagatttgctctttttggttagtgttgcttcagctatgaaggtacttttttggttctatatgaattttaggattgttttttcaagttctgtgaagaatgatggtattttggtattttgatgggaaatgcattgaatttttaatttgctttctggtcctgggcttaagaaagaaaggaagtgaaggtatagtaataattaaagacaggaagttcttgatcagggttgtgaaagctcctttccctgtaatggattagagaggtcctaaagatcctagccagactacagatcaaatccctgctcttcaatattctttgatgtctcaagcaagtacagttaaactctgag

SEQ ID NO: 723591 - DNA, 1607 bp, Homo sapiens
ttttgtgcccactcctcttctggccccagtatgcaatgttcctatttcctaagccttcattttttttcttgtgaattttgatttgcatttcctatcttcaggactgctgatctctgcagaataactagatgtccacttatgtggcaggactgtccacagccacttattctatccttcagtcttcatctytccatctatccatcccttgaacctatctctctcctcatccaccccatccatccactcattcaccagtccacctacgcacacatccaccacccactcccgcaaccatttacccacctatgcatcacaaacttacccatctactcatgcatgaaggcttatatccactcacctgtccatcctccccctgcttaatgactctccccttctttacacacatctattcgactatgcttttgttcatctgtcctcttcaacttatccatccatctattcactcacccacccactcacacaccccatctacccatgcatacaaggatgcatgcatctgttcagccacccatctatccattatccttcctggaactcaaccactctctccttcaatacactcatgcacccatctcctcacccactcacttcacatccaaccgttcactcaaccatgtattcaattccacccatctatctattcactcatctgattccatctactctgtacctcccgctcatctacccactaagccttgcatgcataattccctctgcaggagtcccattgtacctgttttgtgcctttcttttcactctgggtcatggtagccatattgttgaaggttcacttcccagatcctcttttcttggctgcttcctgtctgtacagccacttcctgtttgtccagtttgttttgtggccatcttggccatgtttaattttccttggccctggcatcactcttgcatccaagtgtttgtcattttattttgtgtcccttagttgttctcatatcttccagtattctctgtcagttggactgcttcctgtctactctgctacatcttctgcctgccttgcagttatggctgccttttctaccctgctgctgcatcccacacctcctgctcttggcacccgtgagcttctgctgcctttcctttatgctgctgtctgggtctttggggttgatgtgggatctgggagaattttgaaacggatcattgctgtcaggatgaaggtggagaggggcattctgaagatctttgttttggggagttggggtggtggtgaatgtttcaccttctccccacccttatcttggctatggcctggatttgggaacaggcatctgaatggaggtgtgcaagggagggaactggttggcttggagtgtacatgagggccagaagaagggcaaagcatcctgctgggagaggaactgtggggtgcattgtagggggctgctctggggcttggataactgagcccaagaactgtatgttttgcaaaaggcagttatgaggcctgagtttggaatatctctgggaaatgctctccaaatttacttggagtatggatacttaacctgtgcagggtttttacatttttgaactccttcaaattctaaataaaattttgt

SEQ ID NO: 723592 - DNA, 1607 bp, Homo sapiens
ttttgtgcccactcctcttctggccccagtatgcaatgttcctatttcctaagccttcattttttttcttgtgaattttgatttgcatttcctatcttcaggactgctgatctctgcagaataactagatgtccacttatgtggcaggactgtccacagccacttattctatccttcagtcttcatctctccatctatccatcccttgaacctatctctctcctcatccaccccatccatycactcattcaccagtccacctacgcacacatccaccacccactcccgcaaccatttacccacctatgcatcacaaacttacccatctactcatgcatgaaggcttatatccactcacctgtccatcctccccctgcttaatgactctccccttctttacacacatctattcgactatgcttttgttcatctgtcctcttcaacttatccatccatctattcactcacccacccactcacacaccccatctacccatgcatacaaggatgcatgcatctgttcagccacccatctatccattatccttcctggaactcaaccactctctccttcaatacactcatgcacccatctcctcacccactcacttcacatccaaccgttcactcaaccatgtattcaattccacccatctatctattcactcatctgattccatctactctgtacctcccgctcatctacccactaagccttgcatgcataattccctctgcaggagtcccattgtacctgttttgtgcctttcttttcactctgggtcatggtagccatattgttgaaggttcacttcccagatcctcttttcttggctgcttcctgtctgtacagccacttcctgtttgtccagtttgttttgtggccatcttggccatgtttaattttccttggccctggcatcactcttgcatccaagtgtttgtcattttattttgtgtcccttagttgttctcatatcttccagtattctctgtcagttggactgcttcctgtctactctgctacatcttctgcctgccttgcagttatggctgccttttctaccctgctgctgcatcccacacctcctgctcttggcacccgtgagcttctgctgcctttcctttatgctgctgtctgggtctttggggttgatgtgggatctgggagaattttgaaacggatcattgctgtcaggatgaaggtggagaggggcattctgaagatctttgttttggggagttggggtggtggtgaatgtttcaccttctccccacccttatcttggctatggcctggatttgggaacaggcatctgaatggaggtgtgcaagggagggaactggttggcttggagtgtacatgagggccagaagaagggcaaagcatcctgctgggagaggaactgtggggtgcattgtagggggctgctctggggcttggataactgagcccaagaactgtatgttttgcaaaaggcagttatgaggcctgagtttggaatatctctgggaaatgctctccaaatttacttggagtatggatacttaacctgtgcagggtttttacatttttgaactccttcaaattctaaataaaattttgt

SEQ ID NO: 723593 - DNA, 1607 bp, Homo sapiens
ttttgtgcccactcctcttctggccccagtatgcaatgttcctatttcctaagccttcattttttttcttgtgaattttgatttgcatttcctatcttcaggactgctgatctctgcagaataactagatgtccacttatgtggcaggactgtccacagccacttattctatccttcagtcttcatctctccatctatccatcccttgaacctatctctctcctcatccaccccatccatccactcattcaccagtccacctaygcacacatccaccacccactcccgcaaccatttacccacctatgcatcacaaacttacccatctactcatgcatgaaggcttatatccactcacctgtccatcctccccctgcttaatgactctccccttctttacacacatctattcgactatgcttttgttcatctgtcctcttcaacttatccatccatctattcactcacccacccactcacacaccccatctacccatgcatacaaggatgcatgcatctgttcagccacccatctatccattatccttcctggaactcaaccactctctccttcaatacactcatgcacccatctcctcacccactcacttcacatccaaccgttcactcaaccatgtattcaattccacccatctatctattcactcatctgattccatctactctgtacctcccgctcatctacccactaagccttgcatgcataattccctctgcaggagtcccattgtacctgttttgtgcctttcttttcactctgggtcatggtagccatattgttgaaggttcacttcccagatcctcttttcttggctgcttcctgtctgtacagccacttcctgtttgtccagtttgttttgtggccatcttggccatgtttaattttccttggccctggcatcactcttgcatccaagtgtttgtcattttattttgtgtcccttagttgttctcatatcttccagtattctctgtcagttggactgcttcctgtctactctgctacatcttctgcctgccttgcagttatggctgccttttctaccctgctgctgcatcccacacctcctgctcttggcacccgtgagcttctgctgcctttcctttatgctgctgtctgggtctttggggttgatgtgggatctgggagaattttgaaacggatcattgctgtcaggatgaaggtggagaggggcattctgaagatctttgttttggggagttggggtggtggtgaatgtttcaccttctccccacccttatcttggctatggcctggatttgggaacaggcatctgaatggaggtgtgcaagggagggaactggttggcttggagtgtacatgagggccagaagaagggcaaagcatcctgctgggagaggaactgtggggtgcattgtagggggctgctctggggcttggataactgagcccaagaactgtatgttttgcaaaaggcagttatgaggcctgagtttggaatatctctgggaaatgctctccaaatttacttggagtatggatacttaacctgtgcagggtttttacatttttgaactccttcaaattctaaataaaattttgt

SEQ ID NO: 723594 - DNA, 1607 bp, Homo sapiens
ttttgtgcccactcctcttctggccccagtatgcaatgttcctatttcctaagccttcattttttttcttgtgaattttgatttgcatttcctatcttcaggactgctgatctctgcagaataactagatgtccacttatgtggcaggactgtccacagccacttattctatccttcagtcttcatctctccatctatccatcccttgaacctatctctctcctcatccaccccatccatccactcattcaccagtccacctacgcacacatccaccacccactcccgcaaccatttacccacctatgcatcacaaacttacccatctactcatgcatgaaggcttatatccactcacctgtccatcctccccctgcttaaygactctccccttctttacacacatctattcgactatgcttttgttcatctgtcctcttcaacttatccatccatctattcactcacccacccactcacacaccccatctacccatgcatacaaggatgcatgcatctgttcagccacccatctatccattatccttcctggaactcaaccactctctccttcaatacactcatgcacccatctcctcacccactcacttcacatccaaccgttcactcaaccatgtattcaattccacccatctatctattcactcatctgattccatctactctgtacctcccgctcatctacccactaagccttgcatgcataattccctctgcaggagtcccattgtacctgttttgtgcctttcttttcactctgggtcatggtagccatattgttgaaggttcacttcccagatcctcttttcttggctgcttcctgtctgtacagccacttcctgtttgtccagtttgttttgtggccatcttggccatgtttaattttccttggccctggcatcactcttgcatccaagtgtttgtcattttattttgtgtcccttagttgttctcatatcttccagtattctctgtcagttggactgcttcctgtctactctgctacatcttctgcctgccttgcagttatggctgccttttctaccctgctgctgcatcccacacctcctgctcttggcacccgtgagcttctgctgcctttcctttatgctgctgtctgggtctttggggttgatgtgggatctgggagaattttgaaacggatcattgctgtcaggatgaaggtggagaggggcattctgaagatctttgttttggggagttggggtggtggtgaatgtttcaccttctccccacccttatcttggctatggcctggatttgggaacaggcatctgaatggaggtgtgcaagggagggaactggttggcttggagtgtacatgagggccagaagaagggcaaagcatcctgctgggagaggaactgtggggtgcattgtagggggctgctctggggcttggataactgagcccaagaactgtatgttttgcaaaaggcagttatgaggcctgagtttggaatatctctgggaaatgctctccaaatttacttggagtatggatacttaacctgtgcagggtttttacatttttgaactccttcaaattctaaataaaattttgt

SEQ ID NO: 723595 - DNA, 1607 bp, Homo sapiens
ttttgtgcccactcctcttctggccccagtatgcaatgttcctatttcctaagccttcattttttttcttgtgaattttgatttgcatttcctatcttcaggactgctgatctctgcagaataactagatgtccacttatgtggcaggactgtccacagccacttattctatccttcagtcttcatctctccatctatccatcccttgaacctatctctctcctcatccaccccatccatccactcattcaccagtccacctacgcacacatccaccacccactcccgcaaccatttacccacctatgcatcacaaacttacccatctactcatgcatgaaggcttatatccactcacctgtccatcctccccctgcttaatgactctccccttctttacacacatctattcgactatgcttttgttcatctgtcctcttcaacttatccatccatctattcactcacccacccactcacacaccccatctacccatgcatacaaggatgcatgcatctgttcagccacccatctatccattatccttcctggaactcaaccactctctccttcaatacactcatgcacccatctcctcacccactcacttcacatccaaccgttcactcaaccatgtattcaattccacccatctatctattcactcatctgattccatctactctgtacctcccgctcatctacccactaagccttgcatgcataattccctctgcaggagtcccattgtacctgttttgtgcctttcttttcactctgggtcatggtagccatattgttgaaggttcacttcccagatcctcttttcttggctgcttcctgtctgtacagccacttcctgtttgtccagtttgttttgtggccatcttggccatgtttaattttccttggccctggcatcactcttgcatccaagtgtttgtcattttattttgtgtcccttagttgttctcatatcttccagtattctctgtcagttggactgcttcctgtctactctgctacatcttctgcctgccttgcagttatggctgccttttctaccctgctgctgcatcccacacctcctgctcttggcacccgtgagcttctgctgcctttcctttatgctgctgtctgggtctttggggttgatgtgggatctgggagaattttgaaacggatcattgctgtcaggatgaaggtggagaggggcattctgaagatctttgttttggggagttggggtggtggtgaatgtttcaccttctccccacccttatcttggctatggcctggatttgggaacaggcatctgaatggaggtgtgcaagggagggaactggttggcttggagtgtacatgagggccagaagaagggcaaagcatcctgctgggagaggaactgtggggtgyattgtagggggctgctctggggcttggataactgagcccaagaactgtatgttttgcaaaaggcagttatgaggcctgagtttggaatatctctgggaaatgctctccaaatttacttggagtatggatacttaacctgtgcagggtttttacatttttgaactccttcaaattctaaataaaattttgt

SEQ ID NO: 723596 - DNA, 1607 bp, Homo sapiens
ttttgtgcccactcctcttctggccccagtatgcaatgttcctatttcctaagccttcattttttttcttgtgaattttgatttgcatttcctatcttcaggactgctgatctctgcagaataactagatgtccacttatgtggcaggactgtccacagccacttattctatccttcagtcttcatctctccatctatccatcccttgaacctatctctctcctcatccaccccatccatccactcattcaccagtccacctacgcacacatccaccacccactcccgcaaccatttacccacctatgcatcacaaacttacccatctactcatgcatgaaggcttatatccactcacctgtccatcctccccctgcttaatgactctccccttctttacacacatctattcgactatgcttttgttcatctgtcctcttcaacttatccatccatctattcactcacccacccactcacacaccccatctacccatgcatacaaggatgcatgcatctgttcagccacccatctatccattatccttcctggaactcaaccactctctccttcaatacactcatgcacccatctcctcacccactcacttcacatccaaccgttcactcaaccatgtattcaattccacccatctatctattcactcatctgattccatctactctgtacctcccgctcatctacccactaagccttgcatgcataattccctctgcaggagtcccattgtacctgttttgtgcctttcttttcactctgggtcatggtagccatattgttgaaggttcacttcccagatcctcttttcttggctgcttcctgtctgtacagccacttcctgtttgtccagtttgttttgtggccatcttggccatgtttaattttccttggccctggcatcactcttgcatccaagtgtttgtcattttattttgtgtcccttagttgttctcatatcttccagtattctctgtcagttggactgcttcctgtctactctgctacatcttctgcctgccttgcagttatggctgccttttctaccctgctgctgcatcccacacctcctgctcttggcacccgtgagcttctgctgcctttcctttatgctgctgtctgggtctttggggttgatgtgggatctgggagaattttgaaacggatcattgctgtcaggatgaaggtggagaggggcattctgaagatctttgttttggggagttggggtggtggtgaatgtttcaccttctccccacccttatcttggctatggcctggatttgggaacaggcatctgaatggaggtgtgcaagggagggaactggttggcttggagtgtacatgagggccagaagaagggcaaagcatcctgctgggagaggaactgtggggtgcattgtagggggctgctctggrgcttggataactgagcccaagaactgtatgttttgcaaaaggcagttatgaggcctgagtttggaatatctctgggaaatgctctccaaatttacttggagtatggatacttaacctgtgcagggtttttacatttttgaactccttcaaattctaaataaaattttgt

SEQ ID NO: 723597 - DNA, 1607 bp, Homo sapiens
ttttgtgcccactcctcttctggccccagtatgcaatgttcctatttcctaagccttcattttttttcttgtgaattttgatttgcatttcctatcttcaggactgctgatctctgcagaataactagatgtccacttatgtggcaggactgtccacagccacttattctatccttcagtcttcatctctccatctatccatcccttgaacctatctctctcctcatccaccccatccatccactcattcaccagtccacctacgcacacatccaccacccactcccgcaaccatttacccacctatgcatcacaaacttacccatctactcatgcatgaaggcttatatccactcacctgtccatcctccccctgcttaatgactctccccttctttacacacatctattcgactatgcttttgttcatctgtcctcttcaacttatccatccatctattcactcacccacccactcacacaccccatctacccatgcatacaaggatgcatgcatctgttcagccacccatctatccattatccttcctggaactcaaccactctctccttcaatacactcatgcacccatctcctcacccactcacttcacatccaaccgttcactcaaccatgtattcaattccacccatctatctattcactcatctgattccatctactctgtacctcccgctcatctacccactaagccttgcatgcataattccctctgcaggagtcccattgtacctgttttgtgcctttcttttcactctgggtcatggtagccatattgttgaaggttcacttcccagatcctcttttcttggctgcttcctgtctgtacagccacttcctgtttgtccagtttgttttgtggccatcttggccatgtttaattttccttggccctggcatcactcttgcatccaagtgtttgtcattttattttgtgtcccttagttgttctcatatcttccagtattctctgtcagttggactgcttcctgtctactctgctacatcttctgcctgccttgcagttatggctgccttttctaccctgctgctgcatcccacacctcctgctcttggcacccgtgagcttctgctgcctttcctttatgctgctgtctgggtctttggggttgatgtgggatctgggagaattttgaaacggatcattgctgtcaggatgaaggtggagaggggcattctgaagatctttgttttggggagttggggtggtggtgaatgtttcaccttctccccacccttatcttggctatggcctggatttgggaacaggcatctgaatggaggtgtgcaagggagggaactggttggcttggagtgtacatgagggccagaagaagggcaaagcatcctgctgggagaggaactgtggggtgcattgtagggggctgctctggggcttggataactgagcccaagaactrtatgttttgcaaaaggcagttatgaggcctgagtttggaatatctctgggaaatgctctccaaatttacttggagtatggatacttaacctgtgcagggtttttacatttttgaactccttcaaattctaaataaaattttgt

SEQ ID NO: 723598 - DNA, 650 bp, Homo sapiens
gcagaagcttgatgaccaattcagatgaaatcctttcataagtaagatcatggatgttggcttacactgaaatatcttcccccaccccccgccaccctattaaattctttatttcactccaaggcatactgactttactttgccccctttttatggatgcaaaatactaagtagtcttgattgaatcttagaatagccaggcacagttttaagggccttacatgcatgacttcacttatttataccaataacacccctgaagttgttgtgaaaattaagtgcttagaaagagaaagtgttcagtaagaaggacatgctcaagaaacaatgaccattattaaatcttctcagatgccttgtgaattgcttattgttatcattcccgttttacagatgagaaaatagatgttaaacaactccccaargtcacccatgtggcacagtcaaccttggaacccagacactctggctttagaacctatgttttaaccaccatatttatgactttcatttgctagaaatttatgaaagttttaggtaagacagacttttaatatttgattttagacccctaatggtctctaaaattggggaaataatcccgtttacttaacttcctttgttttttttccagaaacaattataaataa

SEQ ID NO: 723599 - DNA, 934 bp, Homo sapiens
gaatattgctgggtgttttttgttttgtttttggtgactcagcgtataaacctgctttctttgggggacaaaagaaaggtatggaacttaaaacgcagcatgtattttctgctactgaatccaaagatcgtagatgctactgagggagcatgtgactaatgactaaggcttggccagccattagctcttgcctgattaaactccacagactttggaatctagcaatattgtcagcatcgtgtgtccattattagaattgttggtggtgactttctgggcaaattatttcttttgaccagtctcccttggttcttaccttttatgcaatcctggttctccactactgattctgtaaactaatccaatatttttaatgaaatccgcttccttagttagctaaattcagtttcgattctttctaagaatcctgattgctacagttaggaaatcagctatcatatgagttttaaaataaggggaggtatgctatgaattattggtaagtagggtcctgctwtgaaagtgatgagagagactctgtactttaataggttaaaacttatttgtaattatgttgctgtggaatataagcagtttttttcatctcacccaatacagctactaggctttatagatgtatgacagagttaccatgtgcaatagagtttggggtgataccaacaccattgaattaatcagtgttttgatagaagggtgatcatctgaattccaaatttgaggaatacaatagttttcagttaaatatgaatctttagattggcatctagagccattaaatttcctttgtaaactaaagcatgatgagtaaaaaattaccaattaccttatgtatactaaatactgtactagtctctgtattatgccaggaataaaaaaaaaaaaaggatagcacaataatatgccactctccatc

SEQ ID NO: 723600 - DNA, 1394 bp, Homo sapiens
atatyctctttattgatattgtgatgatgtttgaagtgtgaaatgaagaacaggcctcaaaaagagtcttcagccagcctcggtggttcatgcctgtaatcccagcactttgggaagccgaggtgggtggatcacgaggtcaggagtttgagagcagcctgaccaacatggtgaaacaccacctctactaaaaatccaaaaaattagccgggcctggtggcatggctacttaggaggctgaggcaggaaaatcgcttacaccagggaggtggaggttgcagtgagctgagatcaagccactgcacaccagcctgggcgacagagcgagactctgtctcaaaaaaaaaaaaaaaaaaaaaaagccttcatttgattatatttgatttttattttagctattaatatattctaatagctgtttagaagttatatcaaaacataaaactctaagcatttattcaaatatattagaaatttaaatgacataaaaattgttaagtactttatttggactagtgcaaatagcataaatgtgaatttaaatatatacaaaaagttaagtaattgaatatcaataaaatattaataaacagtaaatataaattttctatatgtgactagtgagatctactaagctagtctagccatttttctcaattatctccattatttcctaaagtatcctgtggagtaactctgattgcctttactctcattaaaaagatgaggaaattaagacaaaaacagcaaaagtatctgcaacgaagccacaatttcagtctaggtttgtttgattgcagaggctgaactcactattctccaaagtaaatatttacatggaaacactaaaaaacaaagaaattacattttaaattgtgtcaagattacactttctttagagttaaaagaattccacagtgtatccatgcatgtaaaaaatattaaatatatgaaaagacgactactgcaatagataggtatcataaagttaatagaataatcttcggactgtgatttatagatattttttcagtttgcctaatctgaatttcctaaatttttaactacgtacatgaatttctttctagttatttggacaccaactgatgtacttcaattcaattcaggcactgattatttggagttagctggacctcaccagttaaagggcacatttcccaacaagactgtcccaacttcagacgccagctgcaagtggggttcccaggccacttgctcttctgagcaactggcttcaaatccagggattcccactaccccttcatgttcaataatatgctagaatgactcatagaatatagaaagtgctgtccttatgattatagttttatcataaagaatacaaatcaggaccagtcagatgaagagacgca

SEQ ID NO: 723601 - DNA, 2046 bp, Homo sapiens
ttactgctgtctttttgtttgtctgtgccctgcccccagaggtggagcctacagaggcaggcaggtctccttgagctgtggtgggctccacccagttggagcttcctggctgctttgtttacctaagcaagcctgggcaatggcgggcgcccctccccagcctcactgccgccttgcagtttgatctcagactgctgtgctagcaatcagcgagactccgtgggtgtaggaccctcggagccaggtgccggatataatctcgtggtgcgccgttttttaagcccgtcggaaaagcgcagtattcgggtgggagtgactcgattttccaggtgccgtccatcacccctttctttgactgggaaagggaactccctgaccccttgcgtttcccaagtgaggcaatgcctggccctgcttcggctcgtgcacggtgcatgcacccactgtcctgcgcccactgtctggcactccctagtgagatgaacccggtacctcagatggaaatgcagaaatcacccgtcttctgcgtcgctcacgctgggagctgtagaccggagctgttcctattccgccatcttggctcctccctccagaaagtgagtttttaatcatttaaaactttgatttttaaacataggcttacaggaagaaaataatttatttgaaacaaaagataaatttctgttttctggcataaaacttttgcaattatgacaaagaaggtaggtcacatcttaaaaacttttgaaactattttactccgtgaacttatgtaggaatttttctttccatcaatgtgctatagaagtgttatttgattcaaatatgaaattgcattgcttcttagcaccgctatcatgcttcacttaaaatgtgtctcaaacttgtaatatctttttaaaatttgtatcttgcagctagttgtggcgttaatttaaaatgatgtgctatttgtgcacagcagttttgatactcagataatttctctacctaaaggagcttctaagttgttggcataaaactgtgtgtgtttcaatggcatgggaggttttattttatgaaggttcagaagaaattaaaacccagtaagttgtactacaagcatatggaaaattaagatagaaacatatttattatattttctttgggaggaaacagaggtagacacagttatacttttccatttttcaacatacattagcttgctgcatcattattatttataatatgaaaatcgtttgccacatatttaaaatttacattatctaaaataagaaaacattatactaaaccttacattaaaaatgtagaggggataaagatttaaatgtatggagatcgctacacccagataaagaacaatgacaaacaactgaaatatgggatttcatcttgaatgaatgttttgcttaaatattgaaaagattaatttctactgtttattagttttatggacgatttcatgtcagtgtaaagatcttccaagaacttcagatgttgttttctttttaaagcgcctgaactgaactctttttggagaccatgcctgttggtgttcaccactttgcatagtccccttccacattgattctggacttgccatgagatataagtatgatccaaacacaccaaataaaaacacacatattgggacatgctgtgttcttttaaaattctcatacttaatatccagacactatataaagtaacacaagatagatatatgaagatgcttcatggagagagagagagagaatgacagagacagagagaatgacagagagagagcttatgagggagagataaattctagtcttccagctcaaagggcctattttaaaaagaaggaaccatttccattttgttcattctttgtcacaattatatggtgwagtctctgtaagaaagaatgcatgcattattaaaacaatggacacattcaaagcagaaaaatagactataactggatttttgctttatattcataaggaaataaagaataaaagataattgtctttaacctattttttgaaacaaagaaataaa

SEQ ID NO: 723602 - DNA, 1210 bp, Homo sapiens
taaaactgctctgtaaatttattttgaatgctctgagatgcacatgataattctttaaaactttatatttttagtgaaacattattttgattttggtgttaatgatactcaactgtttatctctctccaaatgtacccaaagaacccttccattggcgtctcccactgagcacaaaatatgctaatatagtcattagtgtttctaatttaaatccattaagaaggggaagataatattgaagatgttaccaatttgcaaaataacctaatttatatgcattttctactctatttctcaactctagctatgttggcagagcagtaagatgaatttaaagtgttctctcaaaatatcctgagaccatttaaagtagaaagacactggtgattcaactattctgtagagctaaaagaggaaatgttggcagtttcccacaaaattaaaacataaaagatgcatacatacatacaggtatagcataatgctctccttcataggctttcttaaatcaccattccaagttatttatctcctaaaaccctccatttgtaccatatttatttgctttatgttcactccagtgatgttgttgtttagattacaaactttttgtcaaatatatttttgagaatgtttaaagttgttttgagaatgttaaagtcaggtattaatggcatttgaaagattttacaattttcactcatgtagataataggtagacagaaactatacagaagaaacaaagcaatatgctctagagattgtgaatttttggaagcattaattccaaaaaatagagtatggcctgtgacaggcattgatttacctatgttatcgttttacaccaggggctatagtctctgaccccaaaagcaatctttatgctttctagaaccaacaagtttaaaaatcttgttgtaagcttattgcatttctgattctacccttaaaaatatgctgaatgaccttggaggaaattgcttatgttctccagtcttatttattttctaggaaaacaatacatgttattgtgactagattattttaaaaattrcctgcatgtaggtgaatgcagtggcttcattttgttatttatgatgctgcctcaatttaggatatgtttagaaattttttctttttcccagatgaaaatgtattatgatgtttatgtgatgtttgaatgagacacagctttattttggatttcag

SEQ ID NO: 723603 - DNA, 615 bp, Homo sapiens
ttcaccatgttggccaggctggtcttaaacttttgacttcaggtgatccacctgcctcggcctcccaaagtgctgggattacaggcgtgagccactgtgcttggccaggattgtattttctaattacaaactggcacatgtattaatccagaaaacctgggggaaaaaaaagtaaaggaaaacacacacacacacacacacacactcataacctcaccactcaaaaaaaaaaaaatctcaccactgtctgtccattacttttctaaatgtgtgtttatatgtatatatatatayacacacacacatttatatataaaatgttataacaacctgctgttataaaaagcagtctgcttttttttcactgtatatgtacatatacttctttacaaccaattggaatacccacaatgatatgccacatcccaaaaagctatcagaagctaagcaagcacggttacatagattttggaacagctataattatgttattctctaggttattcttactctttctctttatctgctccagaatggattggtttcattgcaaccagtgcttccgaaaagatggggcccatttctttgtcaccagctgtggccatattttctgta

SEQ ID NO: 723604 - DNA, 1292 bp, Homo sapiens
tgtgctgccaaagcaatcacaagatggagtccttgataaaaatttttagacatcagcaggccaggggtgtgtgtgtgggtggagagaggaaatggaattctttgcaaattcccctgaaatcataccaagtaattgcttattttgtccacctaattgttctcattatcaaaaccctgccattagtctccttgaatcatcaaatccctgatagaaatagcttgtatagctgcaagcatttctcagtaagtattaactagatgttaatagttataataataaaaaatcaggtttttaatccctgatttgctggagctgattgtttccatcttttgcctagagaattgtcagtcttaaggaaggagaatggagaactgaagaaatttctagccattctaaaggtgaatgaaatagattttccttattattattttctctcttacttttctcatctatctagctgactgtatagaatagtgtttcctaatctttttctcatcatggcacacacagaaattgatatttgtataacaagcacactatagtaaatggatgaggtctcagcagaccttgggggactgaaaggatcaatatatagcacacttgtaacccattcctgaacatcagtgagtcatgacctaccagttggaaagctctcttatagaagagacagctgttgcaacttaaacatttctcttcaagaaactcaaagatacctcaggacccttcctctgcatcacactctacttcctaaatagtttttcttcctaagaatgttctgtgtatttatataattttcctattgatcctactcctgtaattattctagcacattgtagtgtgtcattttcctttctctcaccagagactccgtatttccccacatatgttagtctatgggattccgtatgcactcttatgaagaactaaacttttatcccctcaaagctaataatatcctaaggaaatactgctgctacttttcctcctactgggartcttagcaaccatgactaaggggcactgagcttagttatctcgcaagtaagactgaagatctgttgattaggatcctcagttgcagctttcttcactcctggttttttcacctataggaatctccaagtcggtaccaaggaagcaggtcagttttatcagctcccatactagcccagccccctgaaaattcctgttctttcttgactcctggctgtgtgaactctgagagagagaaaatggttaatgaatttagctttcacttctccgaggaagagttagttactgaaagtgccgaa

SEQ ID NO: 723605 - DNA, 620 bp, Homo sapiens
catagaatgtgaaagtcatgagaaggcagccttgggaaacactgtacactctctactctcttttcagagacccatcctgcacatgaacttccagttacaaataaatctttttttgtcccccttgagctagggtcttgctgtgttgcccaaggtggtgtgcagtggcacaattataattcagtataaccttggactcctgggcttaagcgatgctcctgcctcagcctcccacatagctgagactgtaagtgtgtacctccaagcccacctatttttcttttcatttttgtagagatggggtttcactatattgcccaggctgttcttgaactcttgggttcaagtgatcctcctgcctccgcctcccaaagcacttatagaacagaggccaacattctggccaataaatcttttatacttagtttawtcaagagtttccttgtctaatttgaccagagaatgcccaaactgctcttcctgccttccttcctgcctttctgccttcttaccttccttcctgccttcctgccttcctggcttccttcctgtcttccctttctttttgtcaaatgaattggaagggaaaatataggatggctcattatttggaatttaagttc

SEQ ID NO: 723606 - DNA, 802 bp, Homo sapiens
ctgagctggttttatacaagataaaaacccacaactgtctgtggtcatcttgggacttggttgcttcctggcctcccattggggatgacccgttgcctggaagtggaggtctttagcccaggggatgaatccatgaagttaggccctgttgccccaagccctgatgactcacagtgttgttataccatctccctcttgcacactatgtggacacatttggggagtttcttgtctcctagggacttatttccaccaataatatatttccagggactctggaatccagaactgctctctttatcttcccaccgtggcttggttcaccctaaagaagcaaaccagtgctacacatctgtcagctaaaattcacagagctatttggaagcaaaaccaagaaaaacaaaactgattagggaaagatctgctttcagaaaacctatttctgtcacagggggatggataaataaaataatgtttcaataatttatgcagcctgcacgcgaaaaaacattggaaatgtgaaatgaggacgacacataaagaacaaccgaagttgatagctgctttaatcagttcggttgataattctaaaataaattggaaaaatcagtcttgctctcagcttttgaatgatgatgggatggtagggggaatgtgtgttcttttgtcctgcaaaatgcttattctyattgggtcttgccaaggacacaatcctcagtccccagtggatcccatcccgggtcagcttttctcctgtcttcaccattccatgcatggtgtgcatgtttagcccccagacctg

SEQ ID NO: 723607 - DNA, 1869 bp, Homo sapiens
ccactggtgtccaaggcagaggtgccacagggtgggcgacagtgcaaggcgaggcccctgggagggctcctctcacctgccggagtccccttgaacctgtagagcgattttgggacttccagggcctctccttacgtgtaaagacttcccaggcctgatccctttgcaagacaggcttaccaaagggaagtggggtctggcaccgtgtcctccaaatagcaggggctcatcctgcttcttggccttgtagaatgaactgctttttaagtgccaagtcccctgggctgagtgctgtgggtcataaggttaccccaccttatactaaccctacaaagtggggctgtcatcatccatgttttctggaatgctcagagagagcaagtctctggtccagggtcacactgccagaaagttggtggagcagggagggaatcccagaagtgcagggaagaccagcggattattcaacgtcagccagcacatcagtaatgggcaagcactttgatttcctggttcccagccaggacttgatctactagtccttccttctgtaagggccagagagtaaacaccaggctttgcggcagggccacgtcttgacttttgtgggtccttggcacttttaccttcttgagtccctttcttggtaagaaaatataaaaaatattacaacatattatacaatttttacaatattttgtctatttacaataaagacaaagatagcctaggttggatttcttattattatattcatgtttttcttcctattttaaagtaaattagaattaaaacatttttgtgagcccctaaaagtaactgaggcctgaggcactgtgtctggtgggcccagtggagtgctaggccctgcttgtctggcaacctgctctccccttttcctacccatctctgccgctatatggcaacagctgtcctggatggtataggaatgaacatgtggactgtgttcccgtcagaccttattgatggacacagcaataggaatttcctataattttcaggggtcacaaaggcttcttctgagttcttttccacccatgtacaaatcattctttgctcaaggaccttggaactatgccatgtaggtttcctgggcaaagcctcccctgacgttggacttggtaacatgagaaacaagttctaggcatatctgctgagaaataatattttatttttcctttatccattagggatggccccattttgagggagctgtccctttgcccaccaagtgctaatgacacagagaattgtgctgtctcccaggcctggggctgaggaggctgaaagcaaygaacagcacccccatcctctccagcgtttttctccacctctggtagaaaattgtaagggaagttctgtctttgtcatcctcatttcaatgcatatgaataggcaagcgcttcaggtaaaggaaaggacactctctctgcgccttctcccctggcacttcaggggagtgtgtgggatgggggggatcaggtcactgtccctcttggtttgaatgtctcttgtcaagttggcagcattctgtgtggttcccatggcaacagctttttgtgtaggggggaagggtcatgcactgtgacctcggtggaaaggacaatgacagcatgcccgtctttcagtgtttttgcctctcctgatggatttgagtccaaccttgaaactgggtgaatacagggcaaagaacatgaaacacaaccatggggcgtctgatcacggggccggggagtgctggacttggcctttgtttactggggaacaggatgagcagcccaggccacgagctccatacgtgggctgccggcatcttgagttgtagttgagcacattggacctcacagc

SEQ ID NO: 723608 - DNA, 1869 bp, Homo sapiens
ccactggtgtccaaggcagaggtgccacagggtgggcgacagtgcaaggcgaggcccctgggagggctcctctcacctgccggagtccccttgaacctgtagagcgattttgggacttccagggcctctccttacgtgtaaagacttcccaggcctgatccctttgcaagacaggcttaccaaagggaagtggggtctggcaccgtgtcctccaaatagcaggggctcatcctgcttcttggccttgtagaatgaactgctttttaagtgccaagtcccctgggctgagtgctgtgggtcataaggttaccccaccttatactaaccctacaaagtggggctgtcatcatccatgttttctggaatgctcagagagagcaagtctctggtccagggtcacactgccagaaagttggtggagcagggagggaatcccagaagtgcagggaagaccagcggattattcaacgtcagccagcacatcagtaatgggcaagcactttgatttcctggttcccagccaggacttgatctactagtccttccttctgtaagggccagagagtaaacaccaggctttgcggcagggccacgtcttgacttttgtgggtccttggcacttttaccttcttgagtccctttcttggtaagaaaatataaaaaatattacaacatattatacaatttttacaatattttgtctatttacaataaagacaaagatagcctaggttggatttcttattattatattcatgtttttcttcctattttaaagtaaattagaattaaaacatttttgtgagcccctaaaagtaactgaggcctgaggcactgtgtctggtgggcccagtggagtgctaggccctgcttgtctggcaacctgctctccccttttcctacccatctctgccgctatatggcaacagctgtcctggatggtataggaatgaacatgtggactgtgttcccgtcagaccttattgatggacacagcaataggaatttcctataattttcaggggtcacaaaggcttcttctgagttcttttccacccatgtacaaatcattctttgctcaaggaccttggaactatgccatgtaggtttcctgggcaaagcctcccctgacgttggacttggtaacatgagaaacaagttctaggcatatctgctgagaaataatattttatttttcctttatccattagggatggccccattttgagggagctgtccctttgcccaccaagtgctaatgacacagagaattgtgctgtctcccaggcctggggctgaggaggctgaaagcaacgaacagcacccccatccyctccagcgtttttctccacctctggtagaaaattgtaagggaagttctgtctttgtcatcctcatttcaatgcatatgaataggcaagcgcttcaggtaaaggaaaggacactctctctgcgccttctcccctggcacttcaggggagtgtgtgggatgggggggatcaggtcactgtccctcttggtttgaatgtctcttgtcaagttggcagcattctgtgtggttcccatggcaacagctttttgtgtaggggggaagggtcatgcactgtgacctcggtggaaaggacaatgacagcatgcccgtctttcagtgtttttgcctctcctgatggatttgagtccaaccttgaaactgggtgaatacagggcaaagaacatgaaacacaaccatggggcgtctgatcacggggccggggagtgctggacttggcctttgtttactggggaacaggatgagcagcccaggccacgagctccatacgtgggctgccggcatcttgagttgtagttgagcacattggacctcacagc

SEQ ID NO: 723609 - DNA, 1869 bp, Homo sapiens
ccactggtgtccaaggcagaggtgccacagggtgggcgacagtgcaaggcgaggcccctgggagggctcctctcacctgccggagtccccttgaacctgtagagcgattttgggacttccagggcctctccttacgtgtaaagacttcccaggcctgatccctttgcaagacaggcttaccaaagggaagtggggtctggcaccgtgtcctccaaatagcaggggctcatcctgcttcttggccttgtagaatgaactgctttttaagtgccaagtcccctgggctgagtgctgtgggtcataaggttaccccaccttatactaaccctacaaagtggggctgtcatcatccatgttttctggaatgctcagagagagcaagtctctggtccagggtcacactgccagaaagttggtggagcagggagggaatcccagaagtgcagggaagaccagcggattattcaacgtcagccagcacatcagtaatgggcaagcactttgatttcctggttcccagccaggacttgatctactagtccttccttctgtaagggccagagagtaaacaccaggctttgcggcagggccacgtcttgacttttgtgggtccttggcacttttaccttcttgagtccctttcttggtaagaaaatataaaaaatattacaacatattatacaatttttacaatattttgtctatttacaataaagacaaagatagcctaggttggatttcttattattatattcatgtttttcttcctattttaaagtaaattagaattaaaacatttttgtgagcccctaaaagtaactgaggcctgaggcactgtgtctggtgggcccagtggagtgctaggccctgcttgtctggcaacctgctctccccttttcctacccatctctgccgctatatggcaacagctgtcctggatggtataggaatgaacatgtggactgtgttcccgtcagaccttattgatggacacagcaataggaatttcctataattttcaggggtcacaaaggcttcttctgagttcttttccacccatgtacaaatcattctttgctcaaggaccttggaactatgccatgtaggtttcctgggcaaagcctcccctgacgttggacttggtaacatgagaaacaagttctaggcatatctgctgagaaataatattttatttttcctttatccattagggatggccccattttgagggagctgtccctttgcccaccaagtgctaatgacacagagaattgtgctgtctcccaggcctggggctgaggaggctgaaagcaacgaacagcacccccatcctctccagcgtttttctccacctctggtagaaaattgtaagggaagttctgtctttgtcatcctcatttcaatgcatatgaataggcaagcgcttcaggtaaaggaaaggacactctctctgcgccttctcccctggcacttcaggggagtgtgtgggrtgggggggatcaggtcactgtccctcttggtttgaatgtctcttgtcaagttggcagcattctgtgtggttcccatggcaacagctttttgtgtaggggggaagggtcatgcactgtgacctcggtggaaaggacaatgacagcatgcccgtctttcagtgtttttgcctctcctgatggatttgagtccaaccttgaaactgggtgaatacagggcaaagaacatgaaacacaaccatggggcgtctgatcacggggccggggagtgctggacttggcctttgtttactggggaacaggatgagcagcccaggccacgagctccatacgtgggctgccggcatcttgagttgtagttgagcacattggacctcacagc

SEQ ID NO: 723610 - DNA, 570 bp, Homo sapiens
tttatctgtttattaatttattaacaacaaattttgcccccactaacactacccctttgcctgctcataaaggcaaaactttgtttttcccggttccctggggagccttcagttcacagggtggcctaaggagagatcagtgaagctacgcgttgtagtctattaaagcacagctgttcatcaattaggacsgagaaaatagtcctgctgttttagagtggcgtgatgcgcctcgtattgccggagcaggcacaatgagatgggaccgggtcgcccattttccttcattcatcgcccgtagatgcttgtcgggagggcagccaggtttctgttcctgcttctcatccacaggcctactccatccagcctcaaccacagccacagggaactggctgtcctgttttagtactcaagctgatctgtaccccagaggctgatgggagacccaggccacaatgggtccctccgtaaactcgacttgaatagtatagtgtccttggtttgacctgaataaagcttccactgaaacccattgtgttccatgcgtccaccccttgcaaatccctttag

SEQ ID NO: 723611 - DNA, 570 bp, Homo sapiens
tttatctgtttattaatttattaacaacaaattttgcccccactaacactacccctttgcctgctcataaaggcaaaactttgtttttcccggttccctggggagccttcagttcacagggtggcctaaggagagatcagtgaagctacgcgttgtagtctattaaagcacagctgttcatcaattaggacggagaaaatagtcctgctgttttagagtggcgtgatgcgcctcgtattgccggagcaggcacaatgagatgggaccgggtcgcccattttccttcattcatcgcccgtagatgcttgtcgggagggcagccaggtttctgttcctgcttctcatccacaggcctactccatccagcctcaaccacagccacagggaactggctgtcctgttttagtactcaagctgatctgtamcccagaggctgatgggagacccaggccacaatgggtccctccgtaaactcgacttgaatagtatagtgtccttggtttgacctgaataaagcttccactgaaacccattgtgttccatgcgtccaccccttgcaaatccctttag

SEQ ID NO: 723612 - DNA, 868 bp, Homo sapiens
ttcactgggagtgggaggaaactgcagttcccacgtggagggaacagaacatggaaaagacaaaagaaagcaggaaaaaataaaaattgctcttgtgatgggggagaaaatgccaagagaaaaagaagtttcctgaagagtctagaaagttctgtcctgatggtgggggagcagcagccctgactaaggtttcaatggggaagctgaggctcctgagtgcatctccattcccacttcctgggctgcctgtggggtggttcatgcctgggtagggttgcctgtctatcctttgcagggactggatgcctgaggaagttctgtgggtgtggactggagaggagtcgattcctttgaaaccagacctggtcaattgcagcaatttgtttatctgtcttgtagcttcacacttgtcctcctgttattatgtgtttgtcttcttttaaaaatggttttctaactctccctccaaaaaggaagcctagcaaaatgggttttggagtcagacagtccttgatcaaacagatgccccatcacttattagttttatgaccttggacaactgactctgtctggataatccttttactcattggcaaaaaagaatgagattacccaacatatgaagcacttgtgaggattaaatgaaaaaaaaaaatacaggctcactgtccattagtttctttctccctgtttcccctcctcgagggcagagwttatttgtgtagacccctttatctccaggccagtacaatggggggtgtatcaggcacccatcaagtcgtttgaatgagtaaatgagggctgaagaagagaaagaggggtctcgtgcctttattaagtcattctgcaatcaagtatttactgatca

SEQ ID NO: 723613 - DNA, 1461 bp, Homo sapiens
gtactcagaaaccccaaatagctcccggccagcctaatctcacttcctctactgacagttctcatttccctaattctctttgccgattcccctctgattcctccccactgggtctcagccctttctatcccttgagcaaaacttgcaaatatgcaccatcttaccagtgcttaaaaccatcttcctcccctctcttctccaccaatccacatacattcccttccctgagtaacgaaagttcaaaaccacctacttcttctacttctcattcttatccatcttgtgccacacgtccttcatcaatcacattaactgtctttacttgtgactttgcatttattcacatgtatgtttcatcactccaattacactctgaactcagcaaaggcaaagactatgtccttgatgttgtgtgaggtctcagtcatcctacaagagtaggctaagcatataccacaagcactaaacatatgtcccataatatgagaaaccaaaggccaacatgccagaaaacatttaacactgggttctctcctagcttgtcaaacatgaaacttggtttaggaagcacctgctcactacgtaattcaagtggggttcttactgcactcatcacaaagactgagttttaatagctttcctggacaatgaacctggctcatcataagaatgcatctttagggtattttaataagaaaattgttcaatctggattcattcctaatgcttcttttaaagaactcacctatgccttcaaatgaattgaatgaatggagtccagaattccaaaattcagaaggttttggactgaaaattarttttatttatcatatgttttaaataaataagaaatcatttatcctatattaggcttccttttctcaatctgttaaggggttctctgtcttcatctgagcaaatatagaccagtggttacaaatacggactttggattcagtcagatctaagttagactctcaactctaccattcaccagctccaggaccttgtggaaatttatttactcacatagcaaacattaatcgaaagctaccatgtgccaggcactttgactgacctccctaagtctcagtgttctgagaatgagaataacattccttgacagtagaggcattgtcaggacttttaatctgtcagaattaaatatgataatgtacgcaaaatgcctggcactcttccaggttcatagtaacaataaatgttagttatcactgtcattatcaccatcatcatcatcatcattatcattatcttgagtcgttgtagagcctttagtgctgctaattaagttccccttcttaaaactctctcctcccttgacttcacagagatatcattgtactgtttttagtttattaatttttaaaattttgaaatttggtttataaattttttagttttagtttattaaactaacaaatagaactttttttcaaagag

SEQ ID NO: 723614 - DNA, 615 bp, Homo sapiens
tgccctacatgacctgagcatcacccacctctccccaccctcatgcgccatgccacacctcactttccaaccagtagcaaaacccacatctccaaacaagagaccacggctctctttcctgtgcctcattgcctttctctgttcatttaaaacacatctaaaaaaatctcatgrtctataccagactgtgagtgcaggagtgttactggaaactttgagtgccatgagccaccgttgttatgcccagctgtaaataagtctagagtatgtatactacaggacttaggaccaattttcacagtaaaaatggaaaagcggaagaaattaggtgcatgaggcttagtctggatcataatgaatccttgtggatctcagaactgaaaaaggggctacaggaagtgttgagttagtaggaagttaaaatcaccagtgtagaaaccaccctgaaagtcagtcccttgtcagggtggttgggggcagggatgggggaatttctggatgaaagaatagaggggaaaacaacagaaccagaaggggggcacagtggcgtcttggcatcctgagactttttccactcttggttactatggttacagatgccatcagtgctggctc

SEQ ID NO: 723615 - DNA, 615 bp, Homo sapiens
tgccctacatgacctgagcatcacccacctctccccaccctcatgcgccatgccacacctcactttccaaccagtagcaaaacccacatctccaaacaagagaccacggctctctttcctgtgcctcattgcctttctctgttcatttaaaacacatctaaaaaaatctcatggtctataccagactgtgagtgcaggagtgttactggaaactttgagtgccatgagccaccgttgttatgcccagctgtaaataagtctagagtatgtatactacaggacttaggaccaattttcacagtaaaaatggaaaagcggaagaaattaggtgcatgaggcttagtctggatcataatgaatccttgtggatctcagaactgaaaaaggggcyacaggaagtgttgagttagtaggaagttaaaatcaccagtgtagaaaccaccctgaaagtcagtcccttgtcagggtggttgggggcagggatgggggaatttctggatgaaagaatagaggggaaaacaacagaaccagaaggggggcacagtggcgtcttggcatcctgagactttttccactcttggttactatggttacagatgccatcagtgctggctc

SEQ ID NO: 723616 - DNA, 746 bp, Homo sapiens
aagaaaaacacggctgggcatggtggctcacgtctgtaatcccagcactttgggaggccgaggcgggcaaatcacctgaggtcaggagttcgagaccaggctggccaacatggtgaaaccccatctctactaaaaatacaaaaattagccagatacagtggtgtgcgcctataatctcagctactcgggaggctgaggcaggagaatcgcttgaacctgggaggtggaggttgcagtgagctgagattgcaccactgcacaccaacctgggtgtctaaaaaaacaaaaasagaaacgaaacaaataaaaaaccccagaaactctcattgaaaatgccatttgatcaaaaaattataaaattcaaaccttttagtataatatagacagaccattttactatctgttcaaatcagttttactcaattgtgtatagattccctgtgaatcattgtttctcagtccttcccctgcatacacatctacattaagacatttgggatcagtttacagtctaccatagaacaactgtgaagctaactagattcacaagtctgtaaccctagacccattaacgttatgttttaactcaagctgaaaaaggcatattctatttataaatagtcttttgacagggtcattatatgatgcataaaatttttacagttagaaatattgtatctaatttatttatgttagtttcatccagattacctctcctatattcctgtgagctacttgcctagaat

SEQ ID NO: 723617 - DNA, 610 bp, Homo sapiens
tggcccccagtccacctgctccagtccatgaaacaagaaaagtgatatttttcaaatccaaacctttccacaacctctggcttctctgggaaaagttcaagctccttcatctgtcttccaagtcctcctgaatgggccctgcttatccttccaccctcacctcccaccattcaccaataacacccagacttagtatagatcccccttaagccaaccctagtcagggaatggagtgcttgtggttttggtgggcagggaccccaggaagggagcaggaaagttagccgggcaggaaggagctaagaagagcgtgctgaaaagcacctcaccaggtggggaacccaagctgatccccggtgcagaacgctcatgaggggcaagggagctgagtacttactctcctctctcaaagatcactggccgacggctgctkcttgaggggcagggtgggagtgaattctctggttcctgtgactttccagactgactgctccctcgggcaaagggtgcagactcttgcagcaggagcgtgggagagctggccagcccacaccccatgtgaggccaaaggagcacaacgggcatgggacagcaggttccctcccagggt

SEQ ID NO: 723618 - DNA, 598 bp, Homo sapiens
cgaggagagcgatatctcagtgtatgaatctgtgggttttctgtgtgcccttgcagtcctggggaccctcatggcccttggtgagcccacattgaaggagaagaaccaagaggcggcagagaatctagattcaggctgcagaaagtcttgctactgcagaggtgagacgaggccagggcaggaagggagcaggggtggggtgcaggaccctgagtcccctagaggccacggtaggacatcagcagcaccagggggagtcaccaaagctaagtgccaagatgyggtcgactgaggacctgctcctggtgcccgccccttcagcccagagacggtgtgtggtccgtctccacccagcacaaccgtcctaaatacctgaatgagtttccttgagctcctgcagcagagacccataaaatgcttaaaggagcagaaatctactcccttgctgatctggagcccagaagtctaaagtcaaggtgtcgacagtgtcgtgctccctctgaaggttcctgggggtgcccttcctcacctcctcagctcctggtggccctggacatccgatggcttgcggctgcatcatccactctctgcctttgtc

SEQ ID NO: 723619 - DNA, 598 bp, Homo sapiens
cgaggagagcgatatctcagtgtatgaatctgtgggttttctgtgtgcccttgcagtcctggggaccctcatggcccttggtgagcccacattgaaggagaagaaccaagaggcggcagagaatctagattcaggctgcagaaagtcttgctactgcagaggtgagacgaggccagggcaggaagggagcaggggtggggtgcaggaccctgagtcccctagaggccacggtaggacatcagcagcaccagggggagtcaccaaagctaagtgccaagatgcggtcgacygaggacctgctcctggtgcccgccccttcagcccagagacggtgtgtggtccgtctccacccagcacaaccgtcctaaatacctgaatgagtttccttgagctcctgcagcagagacccataaaatgcttaaaggagcagaaatctactcccttgctgatctggagcccagaagtctaaagtcaaggtgtcgacagtgtcgtgctccctctgaaggttcctgggggtgcccttcctcacctcctcagctcctggtggccctggacatccgatggcttgcggctgcatcatccactctctgcctttgtc

SEQ ID NO: 723620 - DNA, 653 bp, Homo sapiens
cttgcaggccgcatgtctggcaaatctcttaccctctctgaggcccctcagactctacccagcaggggccctgccccaggccccacgtctcggggagctccagctttgawgtgccctcctcaaattgtctgagacccctgtggtgtctgggacaagccctgacctggactgtggggaccctagttcccccttctccccatttggggcgctctctaactctacccaaccaccaccccacatggggtaaaccaggtgtccagaggtaccctgggaatgaactaggtctgggagggaggcctggcaggccggccactcggctggaggatccacgcttctttcgtgaggtcacatgaggctgggccatcagaaccgcacacgtggggtggcactcacccatgtcaaacacaagacaagctcaagtctctgagtccaccaccaacacttggacttgagccacagcgtgagcctgagtgctgattcccgggtgctgacctctctctgttctggccagggtgctgcttccagtccgtggcacccaagaggcatgatggtgactggcgctaaccgggtagctccgctgctggcagccacactctccactgctgcatgccaggtcagctgtcctccagggtgctcagaggccactgtcccca

SEQ ID NO: 723621 - DNA, 653 bp, Homo sapiens
cttgcaggccgcatgtctggcaaatctcttaccctctctgaggcccctcagactctacccagcaggggccctgccccaggccccacgtctcggggagctccagctttgatgtgccctcctcaaattgtctgagacccctgtggtgtctgggacaagccctgacctggactgtggggaccctagttcccccttctccccatttggggcgctctctaactctacccaaccaccaccccacatggggtraaccaggtgtccagaggtaccctgggaatgaactaggtctgggagggaggcctggcaggccggccactcggctggaggatccacgcttctttcgtgaggtcacatgaggctgggccatcagaaccgcacacgtggggtggcactcacccatgtcaaacacaagacaagctcaagtctctgagtccaccaccaacacttggacttgagccacagcgtgagcctgagtgctgattcccgggtgctgacctctctctgttctggccagggtgctgcttccagtccgtggcacccaagaggcatgatggtgactggcgctaaccgggtagctccgctgctggcagccacactctccactgctgcatgccaggtcagctgtcctccagggtgctcagaggccactgtcccca

SEQ ID NO: 723622 - DNA, 1469 bp, Homo sapiens
gcctatctttccaatttgggaggcggtggttttccctgtgacctcacttctctgtcagatctaagacagagatctgttgacttttagtctgtttagattttaactagttaggatggagtggtgacttccaagcttcttacatgtcagaccagaaatttgaagttgacatggtcttataaaaatttatttaccatctcaaagccaaaagggcaagaaacaaacaaattccttgtcaaatttgtaattacctagagaaaatttgcagaacgaggaagggatggtacagctgcaggaagtgaattgggaccttgacccacacctgctgctgactcttctatagaacttgccaaagttccagaggcgtgacttaggtgctgtggtagaaataagacaggattggggtccagcctatcccaaggacggctttggaaactgcttgcggggctggagtgagtcaattaggagatggttaagtaagttaacaccatagttttcacccacttaagatagcatagtgtgacagaaactgctggctaacaccccaaaaatttatatttccccttctgtagtgtgcatttgttgccaggaggtgactgttcaaccacagacttatttcctactacttcttgcatgcaggtgtgaccacgtaactggctcttaccaatggaatgttagtagaactgatatgttccattccaggattttccatggtttggatgcagaagacagaggaaccatgagatggaaggagctcaagagtctgaattaccctaagtaagacaactccctgctgaacagtattacacacatcagactggtatatggtgaagaaataaacttttactatgttaagccactaaatgtttgagatttatttattatagcagccctaactaatacaggattacactcatggcccaagggacaataacctactccttatactttgctatgaagtagaaaagcatttggaagttttctaacttgcgacacttcaaaggaaaaagcagttagggaaagggttttaaggagtagttaacacatgccagggcgagtgtgagtctcagagtaaattatctactctttgtttttctgatttcccatcatacttcacttctgcaggcagggagttgtgggaaagcggggaagaaaaagcagctgtattyttccacaggcgaatctgaggacagggattttatattccaggggtggaccagtaactaagaccaccagatcaaggagttttcaattatatgatctgggggtgggggagcgtggacagagttcattcccaagtaactacaacaccaagccatgaaataacagacagccgggatgtgcagagaaggccaatgggaagcccaggcagagacttcacagcactttggagggtcatggaaggctgagggagaggagagctttggaaattctttctgaagatggagagcaattttgacagagggccaact

SEQ ID NO: 723623 - DNA, 1469 bp, Homo sapiens
gcctatctttccaatttgggaggcggtggttttccctgtgacctcacttctctgtcagatctaagacagagatctgttgacttttagtctgtttagattttaactagttaggatggagtggtgacttccaagcttcttacatgtcagaccagaaatttgaagttgacatggtcttataaaaatttatttaccatctcaaagccaaaagggcaagaaacaaacaaattccttgtcaaatttgtaattacctagagaaaatttgcagaacgaggaagggatggtacagctgcaggaagtgaattgggaccttgacccacacctgctgctgactcttctatagaacttgccaaagttccagaggcgtgacttaggtgctgtggtagaaataagacaggattggggtccagcctatcccaaggacggctttggaaactgcttgcggggctggagtgagtcaattaggagatggttaagtaagttaacaccatagttttcacccacttaagatagcatagtgtgacagaaactgctggctaacaccccaaaaatttatatttccccttctgtagtgtgcatttgttgccaggaggtgactgttcaaccacagacttatttcctactacttcttgcatgcaggtgtgaccacgtaactggctcttaccaatggaatgttagtagaactgatatgttccattccaggattttccatggtttggatgcagaagacagaggaaccatgagatggaaggagctcaagagtctgaattaccctaagtaagacaactccctgctgaacagtattacacacatcagactggtatatggtgaagaaataaacttttactatgttaagccactaaatgtttgagatttatttattatagcagccctaactaatacaggattacactcatggcccaagggacaataacctactccttatactttgctatgaagtagaaaagcatttggaagttttctaacttgcgacacttcaaaggaaaaagcagttagggaaagggttttaaggagtagttaacacatgccagggcgagtgtgagtctcagagtaaattatctactctttgtttttctgatttcccatcatacttcacttctgcaggcagggagttgtgggaaagcggggaagaaaaagcagctgtattcttccacaggcgaatctgaggacagggattttatattccaggggtggaccagtaactaagrccaccagatcaaggagttttcaattatatgatctgggggtgggggagcgtggacagagttcattcccaagtaactacaacaccaagccatgaaataacagacagccgggatgtgcagagaaggccaatgggaagcccaggcagagacttcacagcactttggagggtcatggaaggctgagggagaggagagctttggaaattctttctgaagatggagagcaattttgacagagggccaact

SEQ ID NO: 723624 - DNA, 1197 bp, Homo sapiens
taaaagtgcatacctttgccaaagcctctcacctcatcaatttatatctggaaacaaaggctttgccacagtcaggctgcacacacttgtacggccgctccctggagtgggaataattgtgaatcgtgaacttctccagggtgaggaacgtcttgccacataactggcaggggaacgtggccatgggctttgcttctcacaccttccttttcagatgtgctgaccaaatgctgtgccatttaagcacaaacagaacgatggtgctgggcacatcagcagagtccctgcagctgaactccagaccacgggagaggcagcatcgtgggcctggttctacccagacatggacctctcagctgtcactagctttgcttcctgctttcacacatcccagtttacatgcagtctcaagctgaggggagaaagtctgaggcacaggtgcgattcaggagcagaaaggtaatctgcatcactatagctggggcatgtcctgggtcccccggattggctgtggagagaagaggaacagttttcttgcattagccatttgaaaacaatgcttttcctccctgaccgcttcagaatcaactacccacaatcaacacgttcctttaaatggtgctcatggaacacagttctccatgtgagagggccatctgcatacaagtctacacttttggcttctcagagggtgaggagtcaagcactgatggccagtggagcacactttccctctggtaaggagagttctttccacggatccagtattatctatttcaggtcagtgtgaagctccattgaccaaagagaaaaacaacaacaacaacaacaacaacaacaaacraaaacctccctccctcagtgtgttcaagtgtttttactggtccataaacaaaaatcacccacacttactcaaaccacgggctcttcctcatcactcattgttggcataacattagttgcttatcacacctgtttaaacttccagaggataagaaataatttgtatacacctaagtcaatttgtttgtaagattactctgcagaagggctgatataaacagaatgtgcatgaagctagtctagtctagttgcactgatgtggtggcacaaagctgatagctcaggaaccagcccaggccacgttcagatttgtaggcaccatcctctagtaagttctactaatctcttcctttt

SEQ ID NO: 723625 - DNA, 1197 bp, Homo sapiens
taaaagtgcatacctttgccaaagcctctcacctcatcaatttatatctggaaacaaaggctttgccacagtcaggctgcacacacttgtacggccgctccctggagtgggaataattgtgaatcgtgaacttctccagggtgaggaacgtcttgccacataactggcaggggaacgtggccatgggctttgcttctcacaccttccttttcagatgtgctgaccaaatgctgtgccatttaagcacaaacagaacgatggtgctgggcacatcagcagagtccctgcagctgaactccagaccacgggagaggcagcatcgtgggcctggttctacccagacatggacctctcagctgtcactagctttgcttcctgctttcacacatcccagtttacatgcagtctcaagctgaggggagaaagtctgaggcacaggtgcgattcaggagcagaaaggtaatctgcatcactatagctggggcatgtcctgggtcccccggattggctgtggagagaagaggaacagttttcttgcattagccatttgaaaacaatgcttttcctccctgaccgcttcagaatcaactacccacaatcaacacgttcctttaaatggtgctcatggaacacagttctccatgtgagagggccatctgcatacaagtctacacttttggcttctcagagggtgaggagtcaagcactgatggccagtggagcacactttccctctggtaaggagagttctttccacggatccagtattatctatttcaggtcagtgtgaagctccattgaccaaagagaaaaacaacaacaacaacaacaacaacaacaaacaaaaacctccctccctcagtgtgttcaagtgtttttactggtccataaacaaaaatcacccacacttaytcaaaccacgggctcttcctcatcactcattgttggcataacattagttgcttatcacacctgtttaaacttccagaggataagaaataatttgtatacacctaagtcaatttgtttgtaagattactctgcagaagggctgatataaacagaatgtgcatgaagctagtctagtctagttgcactgatgtggtggcacaaagctgatagctcaggaaccagcccaggccacgttcagatttgtaggcaccatcctctagtaagttctactaatctcttcctttt

SEQ ID NO: 723626 - DNA, 676 bp, Homo sapiens
aggggccaggtcacacaaagccttatagagcatgtgaaggagtttctgtttttatcctgggtctgattagaagtgacattgttaatttgcatatttgaaatatgtctccaggtgcttcatggagaatcggttggacagaggaaagattgggagaggagatggcttcaaactgcactgtccaactcagcaggcaccagccacagtgagcacttgaaaggtggccagtgcaattgaggaaatgaaattttttgctacaggcttcatttttwatttatattatttttgcatgtatgtaaagaggcacaagtgtaattttgttacatacatacattgcatcatggtgaagtcaaggcttttatggtgtctgtcacctgaataatgtatattatacccattaagtaatttctcatcatccaccccctcccacctcccaactcctttgaatcaccattgtctatcattccactctctacatccacgtgtacacatttagctcccacttataagtgaaaacatgaggtatttgactttctgtgtctgagttgtttcacttaaggtaatgacctccagttccatccatgttgctgcaaaagacatttattcttttgaatgactgaatggtggaactgaatattatattttatttaaattaattaaagttaaagtaaaatactta

SEQ ID NO: 723627 - DNA, 676 bp, Homo sapiens
aggggccaggtcacacaaagccttatagagcatgtgaaggagtttctgtttttatcctgggtctgattagaagtgacattgttaatttgcatatttgaaatatgtctccaggtgcttcatggagaatcggttggacagaggaaagattgggagaggagatggcttcaaactgcactgtccaactcagcaggcaccagccacagtgagcacttgaaaggtggccagtgcaattgaggaaatgaaattttttgctacaggcttcattttttatttatattatttttgcatgtatgtaaagaggcacaagtgtaattttgttacatacatacattgcatcatggtgaagtcaaggcttttatggtgtctgtcacctgaataatgtatattatacccattaagtaatttctcatcatccaccccctcccacctcccaactcctttgaatcaccattgtctatcattccactctctacatccacgtgtacacatttagctcccacttataagtgaaaacatgaggtatttgactttctgtgtctgagttgtttcacttaaggtaatgacctccagttycatccatgttgctgcaaaagacatttattcttttgaatgactgaatggtggaactgaatattatattttatttaaattaattaaagttaaagtaaaatactta

SEQ ID NO: 723628 - DNA, 667 bp, Homo sapiens
cagcatctcactctgtcgcccagtctggagttcagtggtgccatctcactgcagcctccttctccaggtgcaagtgattttcgtacctcagcctcctgagtagctgggattacaggcgcatgccaccacacccggctaatctttttgtatttttagtagagacagggttcaccatgttggccaggctggtctcgaactcccgacctcaggtaatccacccacctcggcctcccaaaatgctagattacaggcgtgagcctccgcacccagccaggaagattaaatattttatcacctacttttgtcaatgtttctcattggttacagtcaggaactagaagagagaattgttaaaaacttgtgattaggaattgtatgcaaccatttcaagggtaatatctgatatttttwaaatgtccatgaaaaccagatcaagtttctcattaaaatatgtgaagagattttatttgaaaatgatatataaattcaatatttagtacatttttttactttatctctcctaagaatgtgaaaatgattttcttcactaagctccaagtgcatgcgttcatccctctggagtgtccagtatgtggcacagatactcttttatttgtgctccatgactcagggagaatgctgactggccacctctgccatccagtca

SEQ ID NO: 723629 - DNA, 667 bp, Homo sapiens
cagcatctcactctgtcgcccagtctggagttcagtggtgccatctcactgcagcctccttctccaggtgcaagtgattttcgtacctcagcctcctgagtagctgggattacaggcgcatgccaccacacccggctaatctttttgtatttttagtagagacagggttcaccatgttggccaggctggtctcgaactcccgacctcaggtaatccacccacctcggcctcccaaaatgctagattacaggcgtgagcctccgcacccagccaggaagattaaatattttatcacctacttttgtcaatgtttctcattggttacagtcaggaactagaagagagaattgttaaaaacttgtgattaggaattgtatgcaaccatttcaagggtaatatctgatattttttaaatgtccatgaaaaccagatcaagtttctcattaaaatatgtgaagagattttatktgaaaatgatatataaattcaatatttagtacatttttttactttatctctcctaagaatgtgaaaatgattttcttcactaagctccaagtgcatgcgttcatccctctggagtgtccagtatgtggcacagatactcttttatttgtgctccatgactcagggagaatgctgactggccacctctgccatccagtca

SEQ ID NO: 723630 - DNA, 628 bp, Homo sapiens
atagtagtgcctttctcatggggaaccctcgaggctccgatgagcgaaaccatgcagagtgctcagccaggtgcctggcacgcagcaaggtgtccggtgcacagcagggccgcccagctgtgagcggtgygtgtattctctccagccttgaattcaggcctggctccttctgcttcctggtcagtgccgctctcttgtggcccatacagtgacaggacttagactgaatagagatctgccatggtccaaggtatctgatggcgcttcggaggagggaagggagggagtcacatgggggagataggatcaccagaggcagatgggatcacaggagggagatggggtcacaggaggaagagtgacttccgattggggaagagatggcggatcagataaggcctcctggagaaggaatgtctaggctgaaggacagattcgactgggggtcaaggggattgatgagcaaatgaaagaatgaatggagttagaatattgagcatgagcattacttagccctactgtgtgccaaggctttacatgcctcatatcatttcgtcctctaccacccctgggaaggcgacttattgcttctgtctcctttgcagctgcaaaaagggaggctcagtgg

SEQ ID NO: 723631 - DNA, 628 bp, Homo sapiens
atagtagtgcctttctcatggggaaccctcgaggctccgatgagcgaaaccatgcagagtgctcagccaggtgcctggcacgcagcaaggtgtccggtgcacagcagggccgcccagctgtgagcggtgcgygtattctctccagccttgaattcaggcctggctccttctgcttcctggtcagtgccgctctcttgtggcccatacagtgacaggacttagactgaatagagatctgccatggtccaaggtatctgatggcgcttcggaggagggaagggagggagtcacatgggggagataggatcaccagaggcagatgggatcacaggagggagatggggtcacaggaggaagagtgacttccgattggggaagagatggcggatcagataaggcctcctggagaaggaatgtctaggctgaaggacagattcgactgggggtcaaggggattgatgagcaaatgaaagaatgaatggagttagaatattgagcatgagcattacttagccctactgtgtgccaaggctttacatgcctcatatcatttcgtcctctaccacccctgggaaggcgacttattgcttctgtctcctttgcagctgcaaaaagggaggctcagtgg

SEQ ID NO: 723632 - DNA, 1419 bp, Homo sapiens
gtctttcatttctgatttaacacttgtttttattctatttcttggattcattttcatggtcatgaaactattatgtcagttctttattattactttactatacattgttattaaatgtgaacatattttcagctaatagagccctgcagtccgccagaagctctcttcatgctcccttctagccaacatccctttcctggagagacacctaacaccacagattaattttgtctcattttttattttatatatgtaattatgcagtatgtattttcctgcatctagtggctcttcctcaacattatgctcctataatgtctccctgttactgaatgtcacagtaattcattaattttcattgctgtacaatatgccattatattaatataactacaccacattttatttattcatcctacccttggtagacgtgagttaatttaattggggactgttataaataatgcctcatgaacatcatttacatgtgattttcatgcctatttacatgttacccttagagctacacctagaattagaattgccacattatagggtgtatttgtgagttcagttttagtaggaactgccaaataatttttcaaagtacttgcacagtgtgagttccagataccttatattctcaatatcttcaccagtacttgatgttgtcagaaatattttttgccacttgatatctataattattatcataatttaccttttagagaacaccagtagttttagacgacagatgccctgacacacacacggtgatcatcaaatatacctattcccagctctccatagacccgctgaaaaaaaaccctcgaaggctgtggcctctgacccagctcactttgggcagtataatttggaatttggtcctgcagtgaaacacytgggtaagggagaggacgatgcactgctgtgagcctgaaggcttttggtggggtaagaaacacttcaggagttaataccaccgagtttgtcaagtgctctcagagtgtgtttgttgaatttttataataaagtaacttcataaatagccctcaatttactcagttgaatacaacaaattgctttttggtaattacttcattctcagccttgaatgtagaaatgtaaaagggatgagaggtagtgactgagaaagattcaaaaagatgcactacctaattagtaatcagggaaatgcaaggtaaaacaatgagatgtccactttcacttagtatatcagcaaaaattaagatctgacagtatgacctgatgagagtgtggggtaagtgtacacacatatatgctgctaacaatgttaaaaactattgtccccaacaattctgaaagcaaactcagtgtaaatattaagattagaaacgcagatatgcaatgagccagccgtttaacatttataagccc

SEQ ID NO: 723633 - DNA, 1419 bp, Homo sapiens
gtctttcatttctgatttaacacttgtttttattctatttcttggattcattttcatggtcatgaaactattatgtcagttctttattattactttactatacattgttattaaatgtgaacatattttcagctaatagagccctgcagtccgccagaagctctcttcatgctcccttctagccaacatccctttcctggagagacacctaacaccacagattaattttgtctcattttttattttatatatgtaattatgcagtatgtattttcctgcatctagtggctcttcctcaacattatgctcctataatgtctccctgttactgaatgtcacagtaattcattaattttcattgctgtacaatatgccattatattaatataactacaccacattttatttattcatcctacccttggtagacgtgagttaatttaattggggactgttataaataatgcctcatgaacatcatttacatgtgattttcatgcctatttacatgttacccttagagctacacctagaattagaattgccacattatagggtgtatttgtgagttcagttttagtaggaactgccaaataatttttcaaagtacttgcacagtgtgagttccagataccttatattctcaatatcttcaccagtacttgatgttgtcagaaatattttttgccacttgatatctataattattatcataatttaccttttagagaacaccagtagttttagacgacagatgccctgacacacacacggtgatcatcaaatatacctattcccagctctccatagacccgctgaaaaaaaaccctcgaaggctgtggcctctgacccagctcactttgggcagtataatttggaatttggtcctgcagtgaaacacctgggtaagggagaggacgatgcactgctgtgagcctgaaggcttttggtggggtaagaaacacttcaggagttaataccaccgagtttgtcaagtgctctcagagtgtgtttgttgaatttttataataaagtaacttcataaatagccctcaatttactcagttgaatacaacaaattgctttttggtaattacttcattctcagccttgaatgtagaaatgtaaaagggatgagaggtagtgactgagaaagattcaaaaagatgcactacctaattagtaatcagggaaatgcaaggtaaaacaatgagatgtccactttcacttagtatatyagcaaaaattaagatctgacagtatgacctgatgagagtgtggggtaagtgtacacacatatatgctgctaacaatgttaaaaactattgtccccaacaattctgaaagcaaactcagtgtaaatattaagattagaaacgcagatatgcaatgagccagccgtttaacatttataagccc

SEQ ID NO: 723634 - DNA, 1570 bp, Homo sapiens
ggcagggtgcggtggctcatgcctgtaatcctagcactttgggaggccgaggctggyggatcacctgaggtcaggtggtcaagaccagcctggccaacagggcaaaaccccatctctactaaaaatacaaaaattagctgggtgtggtggcgggcacctgtaatcccaactacttgggaggctgaggcaagagaactgcttcatcctgggaggtggaggttagagtgagccgagattttgccacttagcctgggcaatagagcaagactccatctcaaaaaaaaaaaaaaaaaaaagaaagacaataaactttgtgagtgcatgtatagatattttcaatattttcaataaatgtcagtttataaaccaaaggaaacattcatcactccaagtataacaaattctacctctggattatctgtagacataatctgtaaacatgattatgtctaaggtctctataggtcttggcaacagctcttcaattaaatttgcaccagcagctactgaaaacaagaaaattcagtgattgttccttctaaaaaatgaaatttaatatatacaagtataccttgttttaggatctgactgcaggattgcaaagttgcatccacttggatctgtgctgacactaacagctctatgtgcaaaggtaagtttctcaagtcgaattctttcatacacactatttatatcagagacataagacacatctgatgaggaattgtgaaggtttgataaaatctctgttaaaaaaaaataaactaccattaatcaaggctttactgaaactactaaaatgattgagaagtaaatggaatagaaaaggagttagaaaaatatggaaatctttttcacatatattcagtgtttttgaagaactacatcctctcttcaacacattttccactgaatatattggctgtattatacaggaaatttttggtggatggattctcaattatccatgattccatctctttcaacaaacacatcctccatactgcaaccaaagttccctttctaaaaagcaaatctagtgtcatactagcttttaaaacttttcaacttatacttcctgttgcccaaagggaaaaaaattcttcaacttggattaaaaatatataaatctactgtcttcataatctgcttgtttatttgcttcctccctttctcttccccctttcttgcatgtattcagaaaatatgtgcgtaaccaaactgggctactatgatatcatcagtctggtgatatagtagtgaagaagacagacatgtgcctgctctcctcgagtacacaatctagcagggaagacagacattacacaaatgattatatcattacaagtaaaatcaaggctatgaaggtaaaggatatagtgcttccacaaagatatgaaatttacatgaatgaaatgattctggttgtagtgtgaagaatgtttaaggtaaacaaagaatagataaaaagaggccatttaaggaattactgtaaatccaggaaaagaattaaaagatgatatagactaggttgtagcaatgaatctggaaaaaagtggaaagatataag

SEQ ID NO: 723635 - DNA, 642 bp, Homo sapiens
aaaatatttattgaaagacttgaaatctagctttctagacacataataaggaagatagacggtatctatactcggtaatctacatggtgacagcagtttcattccatcacaattaaagcagaaccacaacatatattgagtataatttgatgttttaaaattattatttatttataataagtcttgaacttagctgtaatgacagacttctcttttaaaataatatctcattgtttatcctattctaaacgcaagggatataacagtattatagcccatgaactggatacaccaaagtgaaagttttcaaaattataaatttgtcttgtgctgttgaaaatcccttagagacaggaatggattcaggtattctggggtctgaaatttatayaatcttggtccatttaatgtttctataacagaacacctgaggctaggtaattgataaggaaaagaggtgtacttagccaatgttctgcagcctgggaagttacaagaaatgtgctgccagcatccacttggcttctggtgagagcttttcatgctgcatgagaacatgctagagaaggtcaatggggaaaacagatcgtgtgaagaggccaaactcaaggggcatcctggctttacaacaaccactctcat

SEQ ID NO: 723636 - DNA, 1049 bp, Homo sapiens
atttaacagcatattgtcaatgaaaaatattcatgagaagaaaatttatttatctgacaaaggcatatcaggtactgtgaacaactaacacaaaagtaaaagtctaaggtgtgggttctttcagccatctttctcaattaaaaaggcaaccattatcattgatgatgaaacattgttaggaatcttccaaaagcatatgacatttgggaaaagaaagcttccactcaaaaattttggataacgattactgtaaatagcttctatgccagacccaccaacaagacccatggctggtcacactctaatctgcatgtcttatttttaattttctcagcaattttctttccttttagctgttttaaggttctggatttttacctgccactttctagctctgaactttaatttgatatttaactttgactttggtgatttccctatactgctgtaagtctaataaatggagcttcgcttactggatgagtttatgtagtggttatgtggggagttggaagytgacagggccaagtcagaaaactacgatcccttgttaactttcctgcccctacagggaaatatttagaggttgaagaaacacttatcattattatttttattattattttttttgagaagcaccttcatccaatcagccaggaaatctgtgtgaggacccattgggttcccatgcaaactgaaccactgtcagtcatccttgacatgccagtgttccacaggagatctaaaattaggttcccaaaagtgtaaaagaaaattgaagggaagattgatttgaaataatattatcatataacatctcatatattacatcccatttatgtatacttaaatgtgtatataatgttttaaaacttaattttttatttttatcaggtgccaaaactgagagtgataatgaatatgataaactttctctattaaatctaaaatatatgcagctaacacatatagatcaacccaactcctcacaaagaatctgactttactaaaatatgtctcaatatttttagttcctgtaagaaagggca

SEQ ID NO: 723637 - DNA, 1161 bp, Homo sapiens
ttgctgcctgttccttcctctggaagctttgtttaggaggggcacctgctggatgccagctggagctctcctgtatgaggtgtctgtcgatccctgctgggaggtgtytttcagtcaggaggcatgggggtcagcgacccacttgaggaggcagtctgttccttagcagagctcgggcactgtgctgggtgatccactgctctcctcagagctggcagtcacgaatgtttaagtctcgaatttgttaattcttaataaaaatgatacacatttctcatgtgctcacatgatcacagctgtactgttaatataatatgtagctgaatgagaaaatagttaattgaaaaagtgattatgatgtgaataatgctttttagtaatttctttgtcaattaaatatttttcagtttttattgttaattaagaaattgatacacaactattgtacatgtttctgaggtgcttgtgatattttgataaatctctatgataacaataatttattgtttatttcaaaatagctagaagaaagacttagcatgttcccgacacaaataaatgctatatttcttttttcccccactaaatattatgtttaatgttttactggttcatgtaaaaatgtatttattttcacttctgacttgaacatgagttgctttcaaagttacgttatctctgttaccataattattattggacacattaatagtttagttttatgattactcttttatcatctgtgtattcagagatcagtttaccctacttttgagataagaataaatggaaaacatgaatcctacaaactggttatgacaatcaatggtagcagtacattttaaagaaatatcactgaccccaaaaatccatcagagactatttcgagcacctctatgcacaaaaactagaaaacctaaaagaaatggctgaattcctagaaacacactacctttcaagattcaaccaagaagacagtaaaaccctgaacagaccaataatgagttctgaaattgaatcagtaatttaaaaacttacaaatcagaaaaagccctgtaccaggcaaattcacagctgaattccactagacatataaagaagtgctggtaccaattctactgaaactattccaaaaaatagaggagaagttactcctccatg

SEQ ID NO: 723638 - DNA, 611 bp, Homo sapiens
tgatggcaggcgcctgtaaatcccagccttgggaggctgaggcaggagaattgcttgaatccaggaggcagaggttgcagtgagtcgagattgtgccattgcactccagcctgggtgacaagagtgaaactccatctcaaaaaaaaaaaaaaaaaaactggagatacgtctgttcctttacccaccctgcccccactcctcacctcccaaacatatcccacacattcccaccctgtgttcctttgccagcaatcaccagattgcctrtctggcatgtccctgtgctatcctccctttgtcgcatctgcctagccttaagcacctcaatcaaatcccacctctcccacagagaccttcccagggagccacacctgggaacaggtgtaagcctgtactgtttatatgagggttctcatctgggacacaggtttgccacacctgagaacaggtgtaagcctgtactgtttgtatgagggttttcatctgggacataggttctttctctccaactagacttttcctgaccttctgaagtccccttcccagcacctaagccagtgctttgcacatagcagttgtctgttattgttgatgacaatggactgtactca

SEQ ID NO: 723639 - DNA, 524 bp, Homo sapiens
gccactgcccccggccaaatgtgatattatatgtacagcactttgcacaatgccagaatgtgcatcgatggtgcaatcacagaatgtgcatcaatgttaattattgttgtttttcaaatacaatagttctcctttatcctcaggtgtacctgcaagtggatgcctgaaaacataaatagtactgaactttatatatactgtgttttttctatatatatacatctatgataaagtttaatttataaattaggcacagtaagagattaataacaactattaataaaatgggacaattataacaatatactgtattcagttttgtgaatgtggtctctctctcaaaatgtcttactgtactgtattcacccttcttcttgagattatgcktgatgtcaaaatccctatgtgatgagatgaagtaaggtgaatgacacaggcattatgaggtagtgttaggctactactgaccatctgagatgtcaggaggaccatctgctttgggtgatcctggatcattgagctat

SEQ ID NO: 723640 - DNA, 1560 bp, Homo sapiens
tgaccttgggtaagcccgtttccccttctgggcctcagtgtccccatctgtaggatggaggtattggagtagatgaaattgaggcaatttctagctctgccagcctgggatggcctcagccagtgtgagaagccagccttggaaggggacacggggcagctcgctcctgtctgccccaagagaggtaattaaggcattctcaattttcatttctgaaattgcaagggacatcctatcatgcagggaatacacattgtccttggagcctgacctcaggcctctgatagatacagacgtatttttaacgcacatttcacagaggaatagctcagaacctacctccctggttccccagctgctccatccagggttgtctaagcacatgctccggctccttccatgcaggccagccctggcgtggaccatgcagtttgctccagttgatcaataaaatctgccaaggaccagggcctgggggctgtaggacagcatgccctaggagtcaggactcgggtgtaggaaattcctccttggcttgcagcctcctgagcaacgggcctctgacctgtccccctgcactgctgggtttaccgtgggggtcacaagtctgctcccctagggaagctgtgctctccctcttcctatactttttgctagacaaggccccctagtattattattgattatcataaccaacataggtgaactcttgctgtgtgctaagcattttccacaccttaacttagaggggtaggcattaagactgtgggggactttggtttcagaagggtccggggtccaagtcccattttgaggctgtcataagtcttagatgaagtccctacatactttggaagtccccacatactttggaacacagaccctggaaccaagcagaactgcatccagaccacaacctctgtcgcttagctctttgttggatctctagaaaagaacttcacctttccgagcctctgtttcttcatctgtgaaatgggtatgtaaatggatgaggatgcattgcacattgagtgcttaagatgctgcctggctyacaggggacactcaaaaatacgccatctatgacaactgttctccttgttttgtttttggcacccccaccccctgcccaccagatggaatctctagccggacttctaacagtgccagtttttgaatttcccctgaaggactcaaggagtgcgagttctttcacgtccagcttcttttgctcacactgtatccacaagattcatccacatagctgtgagtatcaacagttcgttctttttccttgccaaggagttttgccttctgtgaatcttccatagtccgtatattcatttgcctattgataggcacctgggtagtgtctgatttagggctagtaggaagagtggtcctgctaacatcctcccgtgggtctctggtgcccacacacactttatgttgggtgtttgcctaggagcagggttgctggctcccatggcaggggcatgtctggcttcagcaggcaccgctaagcagacttcctgagtggtgcaccaagcattgctttca

SEQ ID NO: 723641 - DNA, 1095 bp, Homo sapiens
ttgggctctgggtttccagtggagatatggcagtgaactgggctcatgttttagttttcatggggaaaccaaaatggtctcgttaaaattcagcaaaccaaatatccacccacctccaccccaaccacacacaccccttccattgccctctataacacatggcacaggccagctaggaaatataaaatcaatcagtggtttaaatcaagttttttactttctctctccatctgcagcaacactttatgccagttggattatggtccattgggagaaagatcaattaaggtgaaaccccagtagagaaagcactggagaacaacattcattcttccttaataaatcttagttttaaatatttgctttgagttttgttccattaataaakaaaataagaaggaaaaccaaccaatattttgtttttccatatgccgtagtggaatcctgaagttgttgaattgaattaatgcttgattcaatgtgaggaatggacaaaagacatgcagagattcaagttccctccgtaatctggtatttattcatcaatccatccatccatctatctattcatccatccatccacccactcacccactcatccggccattcacccacccacctatcctcttaccattaggaaattcttttatgttaagtgctataagagccaattcctctttttcagtaaatggagaagaacaatttgtattataagaattagtgtgggttagattatttatatcatctttccctggtgagggttcatgtctaggtgtttcagactagcatttttccttgggtaatttccactttccctttgtaagctgatacttttactacatgtaaggtcataaactgttgttttgtaaaaaatattttgacatggatgaacaatttggagtgtagatatgaagacataaaagataacttgaaaaaatcagactgattctaacatttatgtagagaggtaaataatcaagaataattagtaacattctgaaaaagaagggtagcaagaagtgactatcctattattaaatcttataaaaactcattaagacagcatggtattggcataagaataaaaagacatca

SEQ ID NO: 723642 - DNA, 1095 bp, Homo sapiens
ttgggctctgggtttccagtggagatatggcagtgaactgggctcatgttttagttttcatggggaaaccaaaatggtctcgttaaaattcagcaaaccaaatatccacccacctccaccccaaccacacacaccccttccattgccctctataacacatggcacaggccagctaggaaatataaaatcaatcagtggtttaaatcaagttttttactttctctctccatctgcagcaacactttatgccagttggattatggtccattgggagaaagatcaattaaggtgaaaccccagtagagaaagcactggagaacaacattcattcttccttaataaatcttagttttaaatatttgctttgagttttgttccattaataaagaaaataagaaggaaaaccaaccaatattttgtttttccatatgccgtagtggaatcctgaagttgttgaattgaattaatgcttgattcaatgtgaggaatggacaaaagacatgcagagattcaagttccctccgtaatctggtatttattcatcaatccatccatccatctatctattcatccatccatccacccactcacccactcatccggccattcacccacccacctatcctcttaccattaggaaattcttttatgttaagygctataagagccaattcctctttttcagtaaatggagaagaacaatttgtattataagaattagtgtgggttagattatttatatcatctttccctggtgagggttcatgtctaggtgtttcagactagcatttttccttgggtaatttccactttccctttgtaagctgatacttttactacatgtaaggtcataaactgttgttttgtaaaaaatattttgacatggatgaacaatttggagtgtagatatgaagacataaaagataacttgaaaaaatcagactgattctaacatttatgtagagaggtaaataatcaagaataattagtaacattctgaaaaagaagggtagcaagaagtgactatcctattattaaatcttataaaaactcattaagacagcatggtattggcataagaataaaaagacatca

SEQ ID NO: 723643 - DNA, 1095 bp, Homo sapiens
ttgggctctgggtttccagtggagatatggcagtgaactgggctcatgttttagttttcatggggaaaccaaaatggtctcgttaaaattcagcaaaccaaatatccacccacctccaccccaaccacacacaccccttccattgccctctataacacatggcacaggccagctaggaaatataaaatcaatcagtggtttaaatcaagttttttactttctctctccatctgcagcaacactttatgccagttggattatggtccattgggagaaagatcaattaaggtgaaaccccagtagagaaagcactggagaacaacattcattcttccttaataaatcttagttttaaatatttgctttgagttttgttccattaataaagaaaataagaaggaaaaccaaccaatattttgtttttccatatgccgtagtggaatcctgaagttgttgaattgaattaatgcttgattcaatgtgaggaatggacaaaagacatgcagagattcaagttccctccgtaatctggtatttattcatcaatccatccatccatctatctattcatccatccatccacccactcacccactcatccggccattcacccacccacctatcctcttaccattaggaaattcttttatgttaagtgctataagagccaattcctctttttcagtaaatggagaagaacaatttgtattataagaattagtgtgggttagattatttatatcatctttccctggtgagggttcatgtctaggtgtttcagactagcatttttccttgggtaatttccactttccctttgtaagctgatacttttactacatgtaaggtcataaactgttgttttgtaaaaaatattttgacatggatgaacaatttggagtgtagatatgaagacataaaagataacttgaaaaaatcagactgattctaacatttatgtagagaggtaaataatcaagaataattagtaacattctgaaaaagaagggtagcaagaagtgactatcctattattaaatcttataaaaactcrttaagacagcatggtattggcataagaataaaaagacatca

SEQ ID NO: 723644 - DNA, 1098 bp, Homo sapiens
tcaaagttaatggtctaggtgtttttcaattggtattgatgaggaaaatgtaaaaatcaaagtgatttacaatgtctgccagattttccttcacagattcttttaggaagcaaaacatctttctctttccttctccccctcatccccccacccccatacaagtagacacacacacacattcagtaaaatttttgagtaatccatttgatgactgaagatttggcttcccaactaaattgataacctctcttcttcttcattaatatttgaaggctgcccacctaaagaattggaaaatatatagtacaaactgtaacaaaatttttgtatttgatctctaatttctgacagctgaacacttggcaaatgtatatataacgtgagcataaaacatgtcatatgaataaagttttcagcatgaatattttataagtgacttattggacttcattccttatttcaatcatattttgcatattgccattttatgaaggacataagtaaaagactattctgttcaacacaaatggtatcaaatttggaaaaccaaaaagggctaaaagaagttaatgagggtgaatggaatcacccctattaaaggtaaagtgatagagcaggtgtaagctattatgaggaggccattttgtatctcctcctcctcatagtttctccctaaatatgccaaaacgaaaatcttagctttggttatgtgcttagcatgtcttcattaataaaaatctctagtaatgtaatggaaagaggattgtgctctgctgtagaaggcagaaaaagtaatagtaaaggagtaccctctctatggaacctgggatttttaatttttatttttattgtttttttgagacagggtcttgctttgccacccaggctggagtgcaatggcacaatcacagcacactgcagccttgacctctgggattcaagagatcttcccacctcagcctccctagtagctgggaccataagcatgtgccaccacatccagctaatttttgtattttttgtagagacaggttttcaccatgttgcccaggctggtctagaattcctgagctcaagtsatctatccacctcggcctc

SEQ ID NO: 723645 - DNA, 577 bp, Homo sapiens
ggtaattatgttttaaaaaatcctgggctatgttgtttcatggaacaatttagaacttattggtcaaactctgaagcaaaggtatataaaaggtagttagagatgtttagggaatattcaaagcacatttttgggtcactcataattgatctttatattcatatatgtatatatatatatataacataatgtacccatcttaacatatcaaagctaaaccagtattaaaaacaactgactatggtctattgatacaatatatgatgcccaagtacactcttcattgctactgcatatctaaaatcatttatttatttatccatccatcaagagtgtattgagagcctgacaacataccrgcatcaagccctggaggtctttttaaggctgagccaatatagctatggataacattctaaaactgatagcatattttcatgttttatagtctttccacagactagttcaaaatgaacactgcctgagaggggctttaagatgactgactagaggtactggacacctgtttccccagcaaagaagagccaaaatagcaagtagataatcatactttgaa

SEQ ID NO: 723646 - DNA, 1024 bp, Homo sapiens
ctggttttccttttcagaaaattaacaaaattattacataaagctttggccctgatgatgctttttctttgttcacttgtctctctggcatgtaaggagccatacagtactctaaaacattattttggccttaaatttggcaatttttgtgttaggtttgtagaacgagttaatatagaggacagaattataaacttgtccagaattggcaggttatatccagaaccttcccaagtggaagtccagggctctagataacaattgttcatctgtttactctgcratactcagtaaattgatggatagcactcacagtgctttggcttggaggtgggtgccttacccagtgaggatttctgggtgccatgcttcatttctcatttcccaatggcctctgagtgtctgaccttagcccggtaggcccttaagcacaggcccaaggctcctggacttggcttcttttccaagagggtacagtggtttggctagagttatctgtcatgggcaatttcaaaggtttttcgtatactattggaatagattgagttttttttttttttctgtaggactgcactgccttataaatgttttgatagtctctatattagtaacacttatgtttttgaagttataatacgtttactgtagaaaaatatataagtacaaagcacaaagaaaataaaaactataattccatcaaacagatatcattgttcttaacgttttggtgtgtaacttgacttaacaatttgatgtatacatctttctgtgttttttattaaacgtacgtgtgtgtatttatttattttcaaaattggagttgtggtacattaatatagtactgctcttttaactaacatttccccatgttccttaatattctgagaatataatttttaacagctatgtagtattctgtaatatgtatgtaactactttgtgtaaccaattcccaaatggtcattaaggatatttgtaaatccaggtacacaagtctgattattattttagctaattttatttc

SEQ ID NO: 723647 - DNA, 902 bp, Homo sapiens
tttaactgaattctttctctcttccaaagactggatcaccctgtcttgctgattcccaaatggccttcttgcgtctcttccattctgctttacccatgtgtgagaagtcctcccaactcttcctccaaaaaggactcaacaatgacctaaggttctacatgaactgggcccatgcaaaacacaccaaagaaccttctgttaatttctgaacaaaggcatcttgagccatggagaagggaagccaacccttgcaacaccagatgctacatctgggcaaaatctttcctgagggaacaaacagctcccaaatatgtccaaaatgagtgagtgatgcactggtcccaggaagtcaggggttytccctcccgggagcttcatgtttcctggtactttccttctcaaggtcactccataagtcaatgaggaaccttctggtcttccacccttttccgatttgcaaccacaactataacattttccatggccaactgactctatgcttttcaacccaatgctatcctgtgagactggtgaatgactttgaactcaactccaggggaggaacccatccgcagtagtgatgtaactacagagatggcgcacattcaaatactgggcctgaagccgagaacacagactctacaataatttttctttaattaattgtgtaactaacctcccactgaaaggagtattgcaggttgaatgtctaccaaattcttaagatacctaggccctgctccctcacatcacttccaatagtgacacaactgataaccagccaaacaagaaagtttactttctatgtctacctccttgatattctgctaatttaatattagtgaaaataggagattgtcttattcttctctatctccagtactaaacccaattcctgatac

SEQ ID NO: 723648 - DNA, 601 bp, Homo sapiens
tctatctcctcttctaccaggctgtaccatatgaaattgccattttgccttacaaaaaaamccagcaatttcatatgtttcaccctaagagattgaaaacatttgggtttggggcttgttttagtcatctttgcatctctcacaataccttatacatgagagagtatcaataagaaattgctcttacagatcttctacttaaaacacttctagttccatcagacgccactttcccaccttaccttctaccctgtgccttaaaaaacaaaactattctctctctcttcaggtagcttttgcttctcctcatagtaacttttactaccaatgcaaaacttttattgtctaagcctggggtcctggatttagctctttgttctcctctttctcttccctgaattcatatactttcatctctcccacaatcacttttactccgaagattctgctagctatccccagtcataacctcttacctcagcagtatgccatctccacctggatacctgatggcctcgtactgctctacacccaaaatgttcaaagtaggatcaccattcaaaacagatcttccctcaacacccccacttctatcgtgaat

SEQ ID NO: 723649 - DNA, 601 bp, Homo sapiens
tctatctcctcttctaccaggctgtaccatatgaaattgccattttgccttacaaaaaaaaccagcaatttcatatgtttcaccctaagagattgaaaacatytgggtttggggcttgttttagtcatctttgcatctctcacaataccttatacatgagagagtatcaataagaaattgctcttacagatcttctacttaaaacacttctagttccatcagacgccactttcccaccttaccttctaccctgtgccttaaaaaacaaaactattctctctctcttcaggtagcttttgcttctcctcatagtaacttttactaccaatgcaaaacttttattgtctaagcctggggtcctggatttagctctttgttctcctctttctcttccctgaattcatatactttcatctctcccacaatcacttttactccgaagattctgctagctatccccagtcataacctcttacctcagcagtatgccatctccacctggatacctgatggcctcgtactgctctacacccaaaatgttcaaagtaggatcaccattcaaaacagatcttccctcaacacccccacttctatcgtgaat

SEQ ID NO: 723650 - DNA, 601 bp, Homo sapiens
tctatctcctcttctaccaggctgtaccatatgaaattgccattttgccttacaaaaaaaaccagcaatttcatatgtttcaccctaagagattgaaaacatttgggtttggggcttgttttagtcatctttgcatctctcacaataccttatacatgagagagtatcaataagaaattgctcttacagatcttctacttaaaacacttctagttccatcagacgccactttcccaccttaccttctaccctktgccttaaaaaacaaaactattctctctctcttcaggtagcttttgcttctcctcatagtaacttttactaccaatgcaaaacttttattgtctaagcctggggtcctggatttagctctttgttctcctctttctcttccctgaattcatatactttcatctctcccacaatcacttttactccgaagattctgctagctatccccagtcataacctcttacctcagcagtatgccatctccacctggatacctgatggcctcgtactgctctacacccaaaatgttcaaagtaggatcaccattcaaaacagatcttccctcaacacccccacttctatcgtgaat

SEQ ID NO: 723651 - DNA, 601 bp, Homo sapiens
tctatctcctcttctaccaggctgtaccatatgaaattgccattttgccttacaaaaaaaaccagcaatttcatatgtttcaccctaagagattgaaaacatttgggtttggggcttgttttagtcatctttgcatctctcacaataccttatacatgagagagtatcaataagaaattgctcttacagatcttctacttaaaacacttctagttccatcagacgccactttcccaccttaccttctaccctgtgccttaaaaaacaaaactattctctctctcttcaggtagcttttgcttctcctcatagtaacttttactaccaatgcaaaacttttattgtctaagcctggggtcctggatttagytctttgttctcctctttctcttccctgaattcatatactttcatctctcccacaatcacttttactccgaagattctgctagctatccccagtcataacctcttacctcagcagtatgccatctccacctggatacctgatggcctcgtactgctctacacccaaaatgttcaaagtaggatcaccattcaaaacagatcttccctcaacacccccacttctatcgtgaat

SEQ ID NO: 723652 - DNA, 601 bp, Homo sapiens
tctatctcctcttctaccaggctgtaccatatgaaattgccattttgccttacaaaaaaaaccagcaatttcatatgtttcaccctaagagattgaaaacatttgggtttggggcttgttttagtcatctttgcatctctcacaataccttatacatgagagagtatcaataagaaattgctcttacagatcttctacttaaaacacttctagttccatcagacgccactttcccaccttaccttctaccctgtgccttaaaaaacaaaactattctctctctcttcaggtagcttttgcttctcctcatagtaacttttactaccaatgcaaaacttttattgtctaagcctggggtcctggatttagctctttgttctcctctttctcttccctgaattcatatactttcatctctcccacaatcacttttactccgaagattctgctagctatccccagtcataacctcttacctcagcagtatgccrtctccacctggatacctgatggcctcgtactgctctacacccaaaatgttcaaagtaggatcaccattcaaaacagatcttccctcaacacccccacttctatcgtgaat

SEQ ID NO: 723653 - DNA, 601 bp, Homo sapiens
tctatctcctcttctaccaggctgtaccatatgaaattgccattttgccttacaaaaaaaaccagcaatttcatatgtttcaccctaagagattgaaaacatttgggtttggggcttgttttagtcatctttgcatctctcacaataccttatacatgagagagtatcaataagaaattgctcttacagatcttctacttaaaacacttctagttccatcagacgccactttcccaccttaccttctaccctgtgccttaaaaaacaaaactattctctctctcttcaggtagcttttgcttctcctcatagtaacttttactaccaatgcaaaacttttattgtctaagcctggggtcctggatttagctctttgttctcctctttctcttccctgaattcatatactttcatctctcccacaatcacttttactccgaagattctgctagctatccccagtcataacctcttacctcagcagtatgccatctccacctggatacctgatggcctcgtactgctctacacccaaaaygttcaaagtaggatcaccattcaaaacagatcttccctcaacacccccacttctatcgtgaat

SEQ ID NO: 723654 - DNA, 608 bp, Homo sapiens
aaaaatatagaaattagagaaataatttaagacttcaccaagaggatcgtcctttgcttctgagatggagctaagaaaactggccatccaatcaagatccttaacccagtcagggaatgagagggtatgaagctgggcctcagtctctatgagggctagtcaattttccgttcatactcgatcctaaagttcagcacctcagaatagcaacccaaagccaaagatatttgccacggcccactctccttggcaggtcctaaattttgagcctctagcaccatgaatgtttgaaagtggccgggctcggtggctcacgcctgtaatcccagcactttgggaggcagaggcaggcggatcacgaggtcaggagatcgagaccatcctggctaacacggtgaaaccccgtctctactaaaaatacaaaaaattagcccggmgtggtggtgggcgcctgtagtcccagctacttgggaggctgaggcaggagaatggcgtgaacccgggaggcggagcttgcagtgagccaagattgcgccactgcactccagcctgggcgacagagcaagactccgtctcaaaaaaaaaaaaaaaaaaaaagtaagttttgc

SEQ ID NO: 723655 - DNA, 608 bp, Homo sapiens
aaaaatatagaaattagagaaataatttaagacttcaccaagaggatcgtcctttgcttctgagatggagctaagaaaactggccatccaatcaagatccttaacccagtcagggaatgagagggtatgaagctgggcctcagtctctatgagggctagtcaattttccgttcatactcgatcctaaagttcagcacctcagaatagcaacccaaagccaaagatatttgccacggcccactctccttggcaggtcctaaattttgagcctctagcaccatgaatgtttgaaagtggccgggctcggtggctcacgcctgtaatcccagcactttgggaggcagaggcaggcggatcacgaggtcaggagatcgagaccatcctggctaacacggtgaaaccccgtctctactaaaaatacaaaaaattagcccggagtggtggtgggcgcctgtagtcccagctacttgggaggctgaggcaggagaatggcgtgaacccgggaggcggagcttgcagtgagmcaagattgcgccactgcactccagcctgggcgacagagcaagactccgtctcaaaaaaaaaaaaaaaaaaaaagtaagttttgc

SEQ ID NO: 723656 - DNA, 1946 bp, Homo sapiens
gcgagtactctcattcactgcaaataataactatctgtttctttccccctttcctctcttctccgctccagtcagactcctactacaaggaaagtgagttgagagtagcttggttattgagtcagtactgcctccattcagcactaaagaccaggcacttgtgatttgtaaaccatgaagttcaacttagaaggcttttccaattctatagtagtaactattaacaaataatcatgccatacttacttggacttcagaacacatcagacaaatcaaatatctgtctaacccaaccaagaagttacttcaaaccaattaatattagagtccaaattgaaactgttctaaacctgtatccgggtaccactcaccccctgccccaggcatcactcttctgtagccaaaatcactaactcttaagcgtgccaatcactgtgacaacacttacctttttagggaaactgaaagatttctatggaaatcaaaaatataccagctgagaggaagagagacacataattaatttactcctttcaaaatgtttagtatctggggaaaaaaaagtgaactggaaacaatcctaaattcaaaatggtaagatatttgaacacatgcattccatagcatctgatgtctccattgcaagaaaactttcaaaatgattccaattagatttcagttacaaaattctaaataacctaatttacattttaatcaagtggtgtctctcggcaagatacccatgtcctcagtaagcatgctttttaaaggggcagatctcatgagactttacattgacaattggtttcaatctatttcttaaggaagaagatggattgggggggrtctatactggttctttccctatagcactttacatacacacaaataatgccacaattcaattccacaaatgtacacacatttgtatcttaaatgaacaaggcatggtgttaggtgctttagtggttataaaagtgcaaatgctgcaatatagtaagggagacaaagaaagacctatagtaaagtagaactttaatggtggtacaaacaaaaggccagctagctcagaaaggtagaccgcagatcaaaagaggaagcagaggaggcaaaatcaacctaacaccatgggaaaggatgcagagcacatatccccaaggtgtcctcaaaagaaaagatgactgaacaaagatgggtcaataaacaggatggctggaagtagaaatcttttaaaataaaatgccttaccacttaatgctaataagttttattgagaacttgtaaggtgtggctcacgcctgcaatcccagcactttgggaggccaaggcaggtggatcacttgagaccaagagttcaagaccagcctggccagcatggcaaaaccccatctctactaaaaatacaaaattacctcagtgtggatggtgcacacctgtaatcccagctacttgggaggctgaggcaggagaatcacttgaaccccggaggcagaggttgcagtgagctgagatcatgccactgcactccagcctgggtgagagcaagactccatctcaaaacaaaagaaaaaaaagaaaaaagaacttgcaaggtgctataagtacttttcacatgtatttatttccatccttacagcattttgtgcgatagttacagtattagtattggtttcagagagcaggagcttttaaactgtgttctgagatactctggaattagcagaaaatcacatttcaatttaaaaaacggtgacacatccattcaaatgagcaaccctcactgacatgagcaagagacccaggacccagtttccctgcattagataccactgcaatgtctcgcaggctgctagcattgttttatgtaaaccctggaagaaagaatcactgtatgccttggaacttctgaacaatatgctattaattagaatacatgtagctttgca

SEQ ID NO: 723657 - DNA, 593 bp, Homo sapiens
gaagaaataaataaatgtaaaataaaataaaataaaaacagtaaaggagtgaagctctgagacaggctacaatgttcatgaatctgaaaagatagcattctgtgaaaaaaggcaagccccaaaaaaaccacagattgggccgggcgtggtggctcacgcctgtaatcccagcactttgggaggccgaggtgggcagatcacttgaggtcagtagttcgagaacagcctggccaacatggggaaacttcatctctattaaaaatacaaaaattagcctggcgtggtggctggtgcccgtcaacccagctactcrggaggctgaggcaggagaatcgcttgaacccgggaggcggaggttgcactgagccaagatcgtgccactgcactccagcctgggtgagagaccaagactccatctcaaaaataaataaataggccaggtgcagtggctcacacctgtaatcccagcactttgggagtccgaggtgggtgtatcacgaggtcaggagatcaagaccgacctggccaacatggtgaaaccccatctctactaaaaaaacaaatacaaaatattagccgggcgtggtggcagg

SEQ ID NO: 723658 - DNA, 651 bp, Homo sapiens
ttatagacagacgtgcgaaagaaggtgtttaagaagtgttgcaactttcattttcacattctcaatgttctcactctggtttttgtgtgaccccagactgatatgtcttccaaagcagtacccaatggctggaattcgtgtacattatcatttattattttaaatgttttcagagttattgtgatctcttctgccacaccaaatttatgcagagtccttggcaaagaatrtagtggacttgcccacattccactccattccctgtcctctgaccttcagcacagaccacagaacaatggttgagaacgcagactatgggagccagactgtctggtttccggtgtccgtgaccatgagcagactgtgtgctttgcattcttccatctgtctaatggggacaataatagttcctcccaggcttgttataaaaatgaatagttactgtcaactctaagcaaagctcttagatcagttcctggagcatcacaaggccctgtatgtgcttgcaaaataaataaatagctccactttgggcaggtaaagtgaagtgttgagtaaattgtttcttcatagtgaataaagaaacggttatggaatgcccagcataagccttaaacacatccactcttccccctgggtgaagccaacaat

SEQ ID NO: 723659 - DNA, 626 bp, Homo sapiens
gaagagatactaacgaaattacgaggaagaggtgagttgacaacctctcagccacctcttagaaattccctgagttttgctgcaaaagagatgtctgaggtttcatccacactcttctaaagctacatacacatcagcttggaaactatttctgaggctttctgagcaaacaagtagatggtgttgctcagtatcaaaactggctccaccttgagctgtggcaaaggactcatgtttattattttatatatatatatatattttattatactttaagttctagggtacacgtacacaacatgcaggtttgttacatgtgtatacatgtgccatgctggtgtgctgcacccattaactcgtcatttgctcagtatcaaagctagctccaccttgagctgtggcaaaggactcatgtttattattttatatrtatatatattttattatactttaagttctagggtacacgtgcacaacgtgcaggtttgttacatgtgtatacatgtgccatgttggtgtgctgcacccactaactcgtcatttactcagtatcaaagctagctccaccttgagctgtggcaaaggactcatgtttattattttatatatatatattttattatact

SEQ ID NO: 723660 - DNA, 626 bp, Homo sapiens
gaagagatactaacgaaattacgaggaagaggtgagttgacaacctctcagccacctcttagaaattccctgagttttgctgcaaaagagatgtctgaggtttcatccacactcttctaaagctacatacacatcagcttggaaactatttctgaggctttctgagcaaacaagtagatggtgttgctcagtatcaaaactggctccaccttgagctgtggcaaaggactcatgtttattattttatatatatatatatattttattatactttaagttctagggtacacgtacacaacatgcaggtttgttacatgtgtatacatgtgccatgctggtgtgctgcacccattaactcgtcatttgctcagtatcaaagctagctccaccttgagctgtggcaaaggactcatgtttattattttatatgtatatatattttattatactttaagttctagggtacacgtgcacaacgtgcaggtttgttacatgtgtatacatgtgccatgttggtgtgctgcacccactaactcgtcatttactcagtatcaaagctagctccaccttgagctgtggcaaaggactcatgtttattattttatatatatatattttatkatact

SEQ ID NO: 723661 - DNA, 2320 bp, Homo sapiens
gcaactttttagcttctactaaatcagcgatatcatccctgaaagagaagacattttattaacaaccctttagatgatacatgtctatgcagtcactcttgagaaccactggaagcacatgatgttgcactgctgacagaatggtgagcctctctctgagcccgggtgaactaatgcactgtgatgaggcccaccatgtcaaccagcagatatataaagagcacaaccttttcttcagttattggcggttgacagtttttagcctggatcacgagaacatagtctacaggcacactcttcagggttatgtgtcawctcattttaaactcctgctcttatggtcctcattccataatctccatgatttagaaacaatgagcccatgtattttaaaactaaaaaaaagcataaagaataaaaatcgtataaagcagagacaggctacaacatagctgctttgcctccagctttactaagaggtagatgccaaggttaaagagtatcacagagattactataaagtcatctccaaccactagaatacctactactactgctacatgtggcaatttctgttaaaaaaagtattttcattgtataaaatattaatgtccccaatattttttaatatcattcaaacccatacctaataatcattaaggttttaacagaaatataaaatacctaactttgtggaaaagttaacttttataactcattgtaatacattacagatctttgattacatgtaatattaatcaagttgagaaccactgctctaaaagaaaataaaagcaacatttctaggatgctatagataataagcaacacacatacatacaaatcattgccttggccaggtgcaaaggctcatgactgtaatcctagcactttgggaggctgaggcaggaggatcacttgaacccaggagctcaagaccagcctgatcaagactccatctctacaaaacattttttaaaattagctagatgtggtggtgtgcacctgtggtcctagctacttggaaagctgtggcaggaggatcacttgagtctaggagtttgagcctgcagtgagctatgatcgagccactgtcctccagcctgggcaataaagtgagaccctgtctctaaaaaacaaaaacaaaaacctcagactctcagacaaaaattggaataggctgaatgcagggaagtcatgctcacgctgcacatactccggttctgtcctcaagctctgctcttcagtacatgctcacatttgctccattttccattccgaatagcatcaccagcacccaattatttggttgtgatataacttaccatcgaacattgggattctgggaaattatatctctttccaaagcttctactaagtctttatcatatccggtactatcaaatttatttgtctctggttctgttactgcagcaggtgatttgttctacatgaagagaaaaaaacaagcgcttttgattcatttattttgtttctgtgagtcggaaacacagattggactcaagtgacgtcctttaaaaagctaatacatcatttggccaggcgcagtggctcacacctgtaatcccagcactttgggaggccaagatgggtggatcacgaggtcaggaaatcgagaccatcctggctaacagggtgaaaccccatctctactaaaaatacaaaaaattagccaggcatggtggcggcacctgtagtcccagctactcgggaggctgaggcaggagaacagtgtgaacccgggaggcagagcttgcagtgagccaagatcatgctactgcactccagcctgggtgacagaccgagacaccaactcaaaaaaaaaaaaggctaataataataatacaataacaaggataggaccaaagactctaagtcatccttctacatcaacattggtttgatacatcaaaagtatcaaagaaaaataaaaatgaccatgcaaatgaactggctagcataaaaaaattaatactgagataaatgtggtcgcaagtgaatatcagatatacacaaaatgtatttcaatcctttagaggagataagattaaagacagatggcttatttagccaagactatggctcaatctttaaacacctacttgtccctcatcaatgctcctaaaaatatcccttttcattattcccactaccctccaaaagacacatctcagtccttacatgggattcctctcatcctctgtgatgacagtcattagggccacggttcccaaactatgtactcaatacccaggacacaatggcaaactcacgaggtattgtgggatagtttaaattt

SEQ ID NO: 723662 - DNA, 333 bp, Homo sapiens
cattaagtgataatactgagcagaaatggttcggtccatagaagatatgaataccagttcaagaggcttagcttttagctaactgccaacaaggatccactgaaaacattttagaaagattagtctaatactgaacatgatatactgataaagaaaacacagaaagcagtgagatgtttgtgattacaaatatcactgagacatgagatgagggcctagtttaagggagtaacaatgagaagagtctcagagacactctaktagtaaagacacttcaggccgggcacggtggctcacaatcccagcaatttgggaggctgaagtgggtagatc

SEQ ID NO: 723663 - DNA, 927 bp, Homo sapiens
gtagtgctggggagtagagaaagacaaactgtataaaacacaaggaaataccatgctaagacatttaggcactaaatacatcaacataccttaaattataaatgtctggaaagagaattccttatcgtaacaaagcaccttatctttagggtctggcatctgagtctcttaattctctctccctgtacaaactcataaagaaaagttagtaaaaaactataccacagctgacataaacaaatattgcattatgctcgtggactctgtgggtcaggcatataagcagaacataggagctggcttgcctttgttgcaaaattactgggttatcatctggaacgacctgtaggttgagataacttgacctctggggactggtatgatctgggcgtcatcacagtagatgttggctgtcttctgaggcctcagctgagactctgggctggcacacctgcagcgacccttccatgtggcttgggcttcctcacaacatggtggctgacttccaagttgggtcctgtcaaggaaacaaggtggaagtgcatgacatgtttatgaccttagccttcaaagtcacatagtgtcactgtaccctgttggttgagacactcacagtgttctgcctgagcttggggagagacaacattgtccctaccactcagtggyggagtgtcaacctgacattgtgagaagaacattcaaatgataaatatgtgacagccatctttggaagatacagttggccatactttgggtctggcattttagtcatttaattcattctttctgattaaaagccttgaaatatattacttcagaaggtgagaaataaaacacaaaagtctcttatgtccttttcataggaaataggtccatgaactacgtctctaaaccattctgaacctggtttatataaacagcttaaga

SEQ ID NO: 723664 - DNA, 927 bp, Homo sapiens
gtagtgctggggagtagagaaagacaaactgtataaaacacaaggaaataccatgctaagacatttaggcactaaatacatcaacataccttaaattataaatgtctggaaagagaattccttatcgtaacaaagcaccttatctttagggtctggcatctgagtctcttaattctctctccctgtacaaactcataaagaaaagttagtaaaaaactataccacagctgacataaacaaatattgcattatgctcgtggactctgtgggtcaggcatataagcagaacataggagctggcttgcctttgttgcaaaattactgggttatcatctggaacgacctgtaggttgagataacttgacctctggggactggtatgatctgggcgtcatcacagtagatgttggctgtcttctgaggcctcagctgagactctgggctggcacacctgcagcgacccttccatgtggcttgggcttcctcacaacatggtggctgacttccaagttgggtcctgtcaaggaaacaaggtggaagtgcatgacatgtttatgaccttagccttcaaagtcacatagtgtcactgtaccctgttggttgagacactcacagtgttctgcctgagcttggggagagacaacattgtccctaccactcagtggcggagtgtcaacctgacaytgtgagaagaacattcaaatgataaatatgtgacagccatctttggaagatacagttggccatactttgggtctggcattttagtcatttaattcattctttctgattaaaagccttgaaatatattacttcagaaggtgagaaataaaacacaaaagtctcttatgtccttttcataggaaataggtccatgaactacgtctctaaaccattctgaacctggtttatataaacagcttaaga

SEQ ID NO: 723665 - DNA, 735 bp, Homo sapiens
cataagacttgtttggctgagtccgttcttcaaccacacactggcttaaaaagttctcatgagaggagaatgggatacagttcagttattaaaagaggccattttcagtgctgctgaagttcaaacacyttgttttatggtataaaaaataatcacagttcctatagcacccatagtgctgcctccttcgtaattcaccatcccacttatttacaactgtcctcatcgccaggctctacaaggcaggtttcacaactactgggcttacctccggcccttagcagagtgcctggcacctgggttgcactcaattacttcttgaaataatagctattattactacttggggtcttttttgttttgttttgttttggttgttgttgttgttgttgttgtttgacacccaggctggaggcgcagtgacgtaatctcggctcactgcaacctccgcctcttgggttgaagtgatcctcccaccttaccctcctgagtagctgggattacaggcacctgccaccacgcccggctaattttttgcatttttaatagagacagcgtttcgccattttggccaggctggtctcaaactcctggcctcaagtgatccacccacctcggcctcccaaagtgctgggattataggcatgagccaccatgcccggccattaggggtgtattcaatttaaaatttatatgtgaggggggaaaataccctgacttgtattaaacgatttc

SEQ ID NO: 723666 - DNA, 2730 bp, Homo sapiens
tcctaaataatacaaggaaatgaaaagttgaagttttcctagcatattgttagtacatacagaatttgggtccaggcacggtagctcatgcttgttatcccaacactttgggaagccaaggcgggaggaacgcttgaggccaggagttcgagaccagcctgagcaacaaagtgagacccaccccccgtctgtgtttttaaaaaatataaaaaattaatataaataatttggaatctagaacttttactccaatttttaaaaaatataatcagtaaaatcagggagggaaaagaggctcaaaggagtaaccaccatgagaagttaagagttcttagaccagatcaagtacatattatgttgcaaatttcttctattctcatgaatctgtgaggacttgtgtgattgaagaggtggttctaatgtctacactattttaaatgattttgttcaactctacatattatacctcactgtttcaagaaatcagcccaagaaaactcaacatagtcctaggaggtgcagctagacattcatagctgctgtctttttcttttgtaggaaatgtgctcaaatgtatactgttgtccttttcaaaggcttagagattcaaggctttatcaatgttaaaaatttttatgttctactgatgttaggatataaattgcctgcatctatgtggaacccctgtgtcagggctttcagagctggtgaatgcgcttgaccatcctcagtggctgcaaatatctctcctggaaaacaacagtgaacaaatgcaggggcttctgccaagacctcatgttccgtaaaaatccttcaattagaggatatgaggatagtgcactgattatactatgatactatgagcacacaggaaatgagctggctttaaaaacaatttgagaaaagcttatcacagcctcaagaactcttcttaaggccgggcgtggtggctcacacctgtaatccccagcactttgggaggctgaggcgggtggatcacccaaggtcaggagttcaagaccagcttggccaacgtggcgagaccctgtctctactaaaaatacaaaaattagctgggcgtggtggtgggtgcctgtaatcccagctactcaggaggctgaggcaggagaatcgcttgaaccagggaggaggaagttgcggtgagccgagatcgtgccactgcactccagcctgggcaaaagagcgaaactctgtctcaaaaacaaaacaaaactcttcttaaatatcaattttatttgtttagacagcgaggcaggtattttttaacacatatgccactgctatgttttatattcgtaccatttattttaaattttttttaatgaccatgaatttacatgcccttcaataggtaggacgggagagctcaaagcaagtgaaaactttagagatcccaaggggcagggaggactgcatgcaatgctagaaacagactgtaaataaatgtcagctcttaaatgtactcttactggtatttaaaataacccaagtttttattcttttaaagcaaaataacccaagtttttattcttttaaagtaaaacatccagtagaattttgtagggatgatcattatttccacagataatgtgcaaatgtgggctaaatcattctgttaagatgggtaaccttttgaaggataatgtttaaatgcagatattcctttttttattgtagggtgtactgtatgacctagacaaggtaagttgccattccgtgttggggtgctaataagaaaaaaattctgcatccttgctgggcacggtggctcacgcctgtcatcccagcactttgggaggccgaggtgggtggatcacttgagcttaggagtttgagacctgcctgggcaatgtggcaaaatcccatctctaccaaaaaatgaaatacaaaacattatccaggcatggtagtgtgtgcctgtggtcccagctacccaggaggctgaggtgggaggatcacctgaagccaggaggtcgaggcagcagtgagccgtgattgcacccactgcactccagcctgggttgagagagcaaaaccctgtctcaaaaaataaaacaaaactctgcatctttgagaagtcaatgggagaccctcttagagacagtaaaatcctagagaactaatagttttttgaatcctggaaaaatgcatacttttgtctgatgaggataatgaacaagtactgtgatctatagattaaataaagtgtttaaggtcacttccattaaaatgccactgggttgtagtgtttttataagtttaagaacttcccaggcgtttggaggcctttacctgtgttgtctctgaatataaattactatacttcatcaaatctgagtcattgttrattagaaaatgcaccattatttcatgtgccatgaagagaaaaaaaggattccagttaaaatctgacagttgtttcattttacctaaaatttgcattttatagttatcaagaaaactgttaggtctgtttagacacagattttttttctctttctttttaaaaaaatttatatacggtgctgctccatgcctttctatgtgcacaataattttatttcaatgctgaatcatagtgtgttctttttgaagacattttaaaaggcaaataaatgcatataataataattacaactcaaagagatgacacatgaacaactatgattatctttgagcttgtacaggcagctgtctgccggtagcaat

SEQ ID NO: 723667 - DNA, 2730 bp, Homo sapiens
tcctaaataatacaaggaaatgaaaagttgaagttttcctagcatattgttagtacatacagaatttgggtccaggcacggtagctcatgcttgttatcccaacactttgggaagccaaggcgggaggaacgcttgaggccaggagttcgagaccagcctgagcaacaaagtgagacccaccccccgtctgtgtttttaaaaaatataaaaaattaatataaataatttggaatctagaacttttactccaatttttaaaaaatataatcagtaaaatcagggagggaaaagaggctcaaaggagtaaccaccatgagaagttaagagttcttagaccagatcaagtacatattatgttgcaaatttcttctattctcatgaatctgtgaggacttgtgtgattgaagaggtggttctaatgtctacactattttaaatgattttgttcaactctacatattatacctcactgtttcaagaaatcagcccaagaaaactcaacatagtcctaggaggtgcagctagacattcatagctgctgtctttttcttttgtaggaaatgtgctcaaatgtatactgttgtccttttcaaaggcttagagattcaaggctttatcaatgttaaaaatttttatgttctactgatgttaggatataaattgcctgcatctatgtggaacccctgtgtcagggctttcagagctggtgaatgcgcttgaccatcctcagtggctgcaaatatctctcctggaaaacaacagtgaacaaatgcaggggcttctgccaagacctcatgttccgtaaaaatccttcaattagaggatatgaggatagtgcactgattatactatgatactatgagcacacaggaaatgagctggctttaaaaacaatttgagaaaagcttatcacagcctcaagaactcttcttaaggccgggcgtggtggctcacacctgtaatccccagcactttgggaggctgaggcgggtggatcacccaaggtcaggagttcaagaccagcttggccaacgtggcgagaccctgtctctactaaaaatacaaaaattagctgggcgtggtggtgggtgcctgtaatcccagctactcaggaggctgaggcaggagaatcgcttgaaccagggaggaggaagttgcggtgagccgagatcgtgccactgcactccagcctgggcaaaagagcgaaactctgtctcaaaaacaaaacaaaactcttcttaaatatcaattttatttgtttagacagcgaggcaggtattttttaacacatatgccactgctatgttttatattcgtaccatttattttaaattttttttaatgaccatgaatttacatgcccttcaataggtaggacgggagagctcaaagcaagtgaaaactttagagatcccaaggggcagggaggactgcatgcaatgctagaaacagactgtaaataaatgtcagctcttaaatgtactcttactggtatttaaaataacccaagtttttattcttttaaagcaaaataacccaagtttttattcttttaaagtaaaacatccagtagaattttgtagggatgatcattatttccacagataatgtgcaaatgtgggctaaatcattctgttaagatgggtaaccttttgaaggataatgtttaaatgcagatattcctttttttattgtagggtgtactgtatgacctagacaaggtaagttgccattccgtgttggggtgctaataagaaaaaaattctgcatccttgctgggcacggtggctcacgcctgtcatcccagcactttgggaggccgaggtgggtggatcacttgagcttaggagtttgagacctgcctgggcaatgtggcaaaatcccatctctaccaaaaaatgaaatacaaaacattatccaggcatggtagtgtgtgcctgtggtcccagctacccaggaggctgaggtgggaggatcacctgaagccaggaggtcgaggcagcagtgagccgtgattgcacccactgcactccagcctgggttgagagagcaaaaccctgtctcaaaaaataaaacaaaactctgcatctttgagaagtcaatgggagaccctcttagagacagtaaaatcctagagaactaatagttttttgaatcctggaaaaatgcatacttttgtctgatgaggataatgaacaagtactgtgatctatagattaaataaagtgtttaaggtcacttccattaaaatgccactgggttgtagtgtttttataagtttaagaacttcccaggcgtttggaggcctttacctgtgttgtctctgaatataaattactatacttcatcaaatctgagtcattgttgattagaaaatgcaccattatttcatgtgccatgaagagaaaaaaaggattccagttaaaatctgacagttgtttcattttacctaaaatttgcattttatagttatcaagaaaactgttaggtctgtttagacacagattttttttctctttctttttaaaamaatttatatacggtgctgctccatgcctttctatgtgcacaataattttatttcaatgctgaatcatagtgtgttctttttgaagacattttaaaaggcaaataaatgcatataataataattacaactcaaagagatgacacatgaacaactatgattatctttgagcttgtacaggcagctgtctgccggtagcaat

SEQ ID NO: 723668 - DNA, 2730 bp, Homo sapiens
tcctaaataatacaaggaaatgaaaagttgaagttttcctagcatattgttagtacatacagaatttgggtccaggcacggtagctcatgcttgttatcccaacactttgggaagccaaggcgggaggaacgcttgaggccaggagttcgagaccagcctgagcaacaaagtgagacccaccccccgtctgtgtttttaaaaaatataaaaaattaatataaataatttggaatctagaacttttactccaatttttaaaaaatataatcagtaaaatcagggagggaaaagaggctcaaaggagtaaccaccatgagaagttaagagttcttagaccagatcaagtacatattatgttgcaaatttcttctattctcatgaatctgtgaggacttgtgtgattgaagaggtggttctaatgtctacactattttaaatgattttgttcaactctacatattatacctcactgtttcaagaaatcagcccaagaaaactcaacatagtcctaggaggtgcagctagacattcatagctgctgtctttttcttttgtaggaaatgtgctcaaatgtatactgttgtccttttcaaaggcttagagattcaaggctttatcaatgttaaaaatttttatgttctactgatgttaggatataaattgcctgcatctatgtggaacccctgtgtcagggctttcagagctggtgaatgcgcttgaccatcctcagtggctgcaaatatctctcctggaaaacaacagtgaacaaatgcaggggcttctgccaagacctcatgttccgtaaaaatccttcaattagaggatatgaggatagtgcactgattatactatgatactatgagcacacaggaaatgagctggctttaaaaacaatttgagaaaagcttatcacagcctcaagaactcttcttaaggccgggcgtggtggctcacacctgtaatccccagcactttgggaggctgaggcgggtggatcacccaaggtcaggagttcaagaccagcttggccaacgtggcgagaccctgtctctactaaaaatacaaaaattagctgggcgtggtggtgggtgcctgtaatcccagctactcaggaggctgaggcaggagaatcgcttgaaccagggaggaggaagttgcggtgagccgagatcgtgccactgcactccagcctgggcaaaagagcgaaactctgtctcaaaaacaaaacaaaactcttcttaaatatcaattttatttgtttagacagcgaggcaggtattttttaacacatatgccactgctatgttttatattcgtaccatttattttaaattttttttaatgaccatgaatttacatgcccttcaataggtaggacgggagagctcaaagcaagtgaaaactttagagatcccaaggggcagggaggactgcatgcaatgctagaaacagactgtaaataaatgtcagctcttaaatgtactcttactggtatttaaaataacccaagtttttattcttttaaagcaaaataacccaagtttttattcttttaaagtaaaacatccagtagaattttgtagggatgatcattatttccacagataatgtgcaaatgtgggctaaatcattctgttaagatgggtaaccttttgaaggataatgtttaaatgcagatattcctttttttattgtagggtgtactgtatgacctagacaaggtaagttgccattccgtgttggggtgctaataagaaaaaaattctgcatccttgctgggcacggtggctcacgcctgtcatcccagcactttgggaggccgaggtgggtggatcacttgagcttaggagtttgagacctgcctgggcaatgtggcaaaatcccatctctaccaaaaaatgaaatacaaaacattatccaggcatggtagtgtgtgcctgtggtcccagctacccaggaggctgaggtgggaggatcacctgaagccaggaggtcgaggcagcagtgagccgtgattgcacccactgcactccagcctgggttgagagagcaaaaccctgtctcaaaaaataaaacaaaactctgcatctttgagaagtcaatgggagaccctcttagagacagtaaaatcctagagaactaatagttttttgaatcctggaaaaatgcatacttttgtctgatgaggataatgaacaagtactgtgatctatagattaaataaagtgtttaaggtcacttccattaaaatgccactgggttgtagtgtttttataagtttaagaacttcccaggcgtttggaggcctttacctgtgttgtctctgaatataaattactatacttcatcaaatctgagtcattgttgattagaaaatgcaccattatttcatgtgccatgaagagaaaaaaaggattccagttaaaatctgacagttgtttcattttacctaaaatttgcattttatagttatcaagaaaactgttaggtctgtttagacacagattttttttctctttctttttaaaaaaatttatatacggtgctgctccatgcctttctatgtgcacaataattttatttcaatgctgaatcatagtgtgttctttttgaagacattttaaaaggcaawtaaatgcatataataataattacaactcaaagagatgacacatgaacaactatgattatctttgagcttgtacaggcagctgtctgccggtagcaat

SEQ ID NO: 723669 - DNA, 1539 bp, Homo sapiens
agaacaaacgagagcaggtgttcacatttatcttcctcaagcagccccttgaggctttttgggggagggtcaggaaaggaagaggctgaaatacagccttccatcccccaactctcactcctgccagcagacagctgtttcagtctcttcttgctgctgctaatgaaaacatagccgggattccataaaagatatttaatatgggattgcttggagaagccactttctttggagatttgcttaaaccaaagctcttggatttgttaccattgctgtgaaattttcatctccagcagccttagcatgaatgacctattttgaatgtgacagcgattacacttcggtggcgtgaataatttattaggtgcaagagcactgtcaacgtagtgatattacagcagtcttgctagcctggctaattatggaggatgacagcactctatcctgttgtcacagctcctctccaaagctgccagggatgtggattctatgtgagcagagaaggaaagaggggcagtggggccaggttcctgctaccaaagaaggctttgtgggttgagcaagctgtgctgcaggagttggatttccactttcacctctgcaaagtgaaactgtgctgggcccatggggatgaatcttgtatccagtatcctgattttgcataaaatgtgtgttagttgggggaggtgcaggctgtgaaagagtgacttaggaaggaaagaggcattagaccctggagctagctagggtatctaatggtttccaggyttacagaggaggcacaggcctttttagcatgcagctggattcagagcctaggagcaggagtatgagagaaaggaatagagcacagccaggaggagcctcagttatggcttcggtgtgtgttcccttgtgttttaagctaccttgagactctagagctttctctagctttgcctgagtagtagtgacagctcatttaaccttactgagacctcagttccagatataaatcaggctccaaaataatgtccatgaagattttgaagtttaacagtcagtgacaaagttttaagcaatagggcttctgggcctgtaattcctcctaaaagtagctcctgaagttaatggtcccaactttatgaattagggaggaactaaactttgggaagatctttgcataggtgggggcagggagttggaaaagaattaaacaggattacatgcaataacatcactggcctacaatggaaagagaaatgaaaattaaattaaattaaaggagctacctgaagaagaaatatttttaaaatatgaatgactggataaaagcagatactttaaatttttcaataataggtaatgattaatgattatcaatcaagccaatgtcaggaagctgacggctccctcatgttagaataattcaaggaagcttatttacaatgagacgagttacaagggggatggggatgcaggggatactggggcccaaggtgacctcatagggaggagccagggaatgcatattcccacctcactttcatctcctgttgg

SEQ ID NO: 723670 - DNA, 576 bp, Homo sapiens
aaagctatttttaatcctatttaccacgtatagcaaagaccagtttctccaagtgtaagcctcaacctgactctctcagcatccctcctggtgcccccagccttacacgctacactccaatgaagcccgaatgcctagcatggccagatttaacaaactawatcacagaatgctcagttaaatttgaatttccaataacccacaaataacgggttcgtacatgttccagttattgcataggatatactaagccattatttgttgtttaatgggaagttcaactttaactgtgtgtcctgcactttatctgacaatactgcaatcatatcctccatgccactgtttcaagccattctgggcaggcttttccctccatctcaggtgacctactgtgccttctctacaaggaagacccagctcaaatggctttttctcctcctccataaaatcttggctgacctgctccactcagtccaagcagagctgatcattcccctctttgtgccacaacagtgcctggtacgtactccattatgccccaagtcacaagctgtatctcacccatttgtgtgtgtc

SEQ ID NO: 723671 - DNA, 1549 bp, Homo sapiens
agggcaatctgattcaacttaactatgagattagaagaaaggaaaagtgaaaaaaaaaaaacaactattaagcaccaaggcaatataacctgagagtgtataaaaattatttttggggaattgtaaaacattaattcctcaatttcaaaggtcctgattttatagatttgagatagaattcagaaaaatgtattttaagaaggctttattatattttattttaatatagctgagcattgccttgggccttggtaaactaagttaacttttccttaaattacttagaggaaaaggaaagaagattaaatatgaatgttatttttactctattaaggccaattttctggaaaacaatatcagaaactgtctctgcaacattttaatttcaagattgaattgaatttaccagagccgctgagctgtacaacttctgaagtttggagcatccaggtatcagctggctgctagccagagcttcagagcaagtgttcattaagcatgattaaagtgagctgtcattttatatatattttggcagatttttcaagacaaaaatatgccacaaaaaatacctagaaaatatgccttaaagtggagacatagcccctgcataattggggatgagaagtggcttatttagtttttttcgggggaatagtaaagccaaagatgtttctattacaaattattcagaacttccccagatgtagactcagatgtagaccttgagacaaagattcaagaagaaattgtttcagaggtgattttaggaaatactagtaggagaggtgggaagtcacactagcaagggaagataatgaacaggggtgctttgtcaagcaagtcatcactgtggacaactggagctcagtcttactggggaactctggaagcctgtggaacacgtgcatctggattagcttccccaagggagagagagctggggtttttatacactgacttcttcagtcattgactaaatcctgctccaaaggatcattaatttcctgggacttccagccttcctcctgcatgggcaaacaggcttcgggatccagggcaagtcctcaggcaaagaagtaagctctctggcagttgggattcgggcaaacatataccaaaatggtaaagaccaaggatgtgggagaagccctgaaaacatcaagtaggggatttgggaaacttaagtctttgaaaccagctactcttccagtataaagaataatggaagaaaaaactcgctaggcaagagccaaggcttattacatttaaaatgtctcttctatgaggaaactaagccaggttaaaggagagaaaactagtcggctgccctgatcaccaatccatagagtatattaaattatcacagtgataaattggattaatggaaccacttcacttagatttcaacttgagagtccatccataaycggtaaaatgtaaaactttccttaatccccaaagtagagaatgccctcagtggaagttttaaaagcacttcttgctcacatgccttagccctattgaagttttctgctccatctaagtg

SEQ ID NO: 723672 - DNA, 2289 bp, Homo sapiens
ttggccaggctggtctcgaactcctgacctcaagccatctgcccacctcggcctyccaaagttctgggattatagatgtgagccactgagcccggcctagtgaacatttcttatgttaaaccaaatgctattcaataagttttagcttcaagtgggctgagtttcacatcattatgaatgagaaatttaaggggtaaaccctatgctgccctcacaatcatcccttcattccctcttcctttaagatgttttctgcctaggaggttactcaggcccttgcacatgtggtctcctggcagcagatccatctctgacatttgcagccggtgcaagaatacagatggaggcctccacccttccaactcatagtttgccccttttatgttcttagctgctgctcagtcctgcaacttgacccccatgcacactcatgtgtatgtgaacattgcagctgcaacccgggagcctgcaaagagttgccttttggactttctcaggttaggagtgcagttaacagctgtaatgctgtgacttgaagagtagcccacacaggctgtggaagggctagggtatttgggagagaaagttcagagttcaaggtacccaaagcaaggactagaagggggtgccttggttccaggtgggcatgtctctttggcttcatgggtctctctcctcttaaaacaaaagcaggcacctcaggctaggataccatttgcctgggtccaagggaagaactgtctggaaatcttattccaccagtctttcagccagatccagccacggagctgtgtcttaaccctgagaggaagcagagctatgccttaagccagctccttaatctacaccattttctttgcaactggacacattttattaatatctgtatctatactaaataggaaagaggaccctggctaattctcttgttagagtaagacaagaagtccatgagatttggggaaaccaggccaaggtttgggtccaaaagaggcctccttcaaacacatacacacccgtttttccacatgtgagtaattactaaactctctttggccctcaccaagacaaccagcaggactcaggagtttaatgaattgttctcacttccacggagcagtaaaattgagtttttatttattagaaacttaaaatggtttttaactctgtgggagtaatttagaaattggtgtgaagtgtaattgatttttataaacatgcatattgtagatttttcattaataagcatttgcattgtaatttgtttgtgcatgagtgccctggactttccagatgctaatgaacaaagtgctggagtgtgctttctacaaagcgaaattcattattttcatttttatttttaactcttttctcaaagtgagaacaagagaaagctattggaaagataatttctagaaagaaaggtgaactcagctctttttgataattatgttttccccctcaatcttgtttaacaaaagctgaagaacttgtctgtcacactcctgatactttctctaattagtcctggcttcatatatatgtgtatatacacacatatgaaatactctttcatgtatatatgaaaagactatttagaatgattatttatactgcatataattaagtagggctgtgtcctggtctataatcactagagacacccttctgagaaaatactcctgacttaaccacacaatttattctacattgtagtgccttcagggatacacccttctggagtacattagttttctcagacagaccagaaatgattaccaagggaggaacctcttccaataagccctcttttcatttctttgatatgtgtgcatcgatccctaagtcctcatctggactgctaccttaatttgcagagcccaagtgaaaacacacacacaaaaaaccctcaaagtcccttcaaaaagcaggggtggtggtgggggggaggtgtggaagatttcctttctttctcttttggcctgtcatggggtctcttacttgctatttaatttcatgctctctttgatacaggggtattcacagggtgagtgcagatggtctcaggtagctcaggcctgcccagccacttggtgcatggggtgtgtgcacccagcttccacgccccctgcaggcccaggcccctgcctgcccaaatggctgtagtcactggaagggggttggggagcagagagtggaggggtgggagataatgagagtggatgaggaagctcctcaccccctgttccattgtccttctggacttcacttacaaaacacaaactccaa

SEQ ID NO: 723673 - DNA, 1831 bp, Homo sapiens
agcgccgtgtcaatacgtagcttctcaggtcactgctagaggggaagagaagaatggaaagttgcaccagctcttaacagcctcaactcagagatgacacgtgtctcttctgctcccaatccctcagccagaattagtaatgtgggctgctgaaaaatgtcaggagtgcatggatatttggagagtgctgtttctgccaccttatttcataccaaaccacagaaacaaaattggtgactcttcttagtaaattagaacagagtatcaaaaggattattaggatcagagcatctggaatgaccaatgagtccattaagtcaggagaattagaacagaaccattatgaggaatcataatggtcagaatgggaacaaactgaccaaagggcttactggatgaagctaaccagatagagtgagaccagagagaagaagtggcccaggaagtcataacctcctgttcctgacttggactttctgtaagtgtgattcccaacctggttactcatcagaatcatacaaggaacattagaaaaggtagggttttagcctcatctgaggcctattgaatcaaaatctcctgaagaatataatattcatatcatatatatactatatgtatatatatatactatatatatactatatgtatatatatatactatatatatactatatgtatatatatatactatatatatactatatgtgtatatatatactatatatatactatatgtgtatatatatactatatatatactatatgtgtatatatatactatatatactatatgtatatatatacatatatatgtatagatgtatatatacatatatatgtatatatatatgtgtatatatatatatatatactttaagtctttaagttctggggtacatgtgcagaacgtgcaggtttgttacataggtatgcacgtgccatggtggtttgctgcagccatcaaccctgtcatctacattagttatttctcctaatgtcttccctcccccagcccccmacccgccgacaggcttcagtgtgtgatgcccctaccccgtgtccatgtattctcattgttcaactcccacttatgagtgaggacatgtggtgtttggttttctgttcttatgttagtttgctgagaatgacggtttccagcttcatccatgtccctgcagagggacatggctgcatagtattccaaaagcccttcctcattattctgatgcaggcactggtctgtagggtttgaaaagcattgcttagaggacaaggaggtagaaggtgtccttaggatgagatgctaatgagggagtgaaccttagaaaggtggaaagactcacaccagtggtcccatggttgggtgatggttaacatcacaaagagaagtaaattccagacctgcatcatagtaccctgagtagaactacctcaacaatctatctggtcagatacttagtacctagatgtggagaccatatctcacagttctgtcaggcaggagcagtccaaacactttgattatcagctgtctcttgctcgggaaattactaggtaccaacactgttatatatgcagaggtgtctgaaaaatgaatgcagatcaatttccagttccacacagagcacatctgtaaaatatgacctttggataatggctggagtgtttacctgcagtattcgtttttgcatgtggctttccctagatatgtcaggatacagcaggaccaaaacctaggtaagaactaaagtagtaggtaaatattggatcctaaattaagagtggagggcaaagcttggggtgatgtcaaagtcaattaatggatatt

SEQ ID NO: 723674 - DNA, 638 bp, Homo sapiens
gagacactaataaaagtggagaattgcttgtggagtaaggctgaggttcaagtctaatagttgggaggcggggtgagagtgagaatttacactgtatccttttataatttgaactctgtgagaatgtactaccattttaaaaatacccatttaaaattaactttaaaaagtgttctgctgtctgctttcttaagaaaaatcagaaagcagcgtacctctggtgggaaagttggaatctttacaattatgaactcagattggagaatacaaagcaggagtcttttggttacacacacctgggttcaaccaggttcctactgtgtgactggaaaatgtatttagtctctgtaagtctcaatacccttatctgaggaggaaaataaaaataattgcttagctgagcgcagtggctcacgcctgtmatcccagcactttggaggctgaggcaggcggatcacttgaggtcaggagttcgagaccagcctggccaacatggcgaaaacccatctctactaaaaatgcaaaaattagccgggcatggtggcgcatgcctgtaatcccagctactcaggaggctgaggcaggagaatgagtcaggagttcaagaccagcctggccaacatggggaaaccccatct

SEQ ID NO: 723675 - DNA, 628 bp, Homo sapiens
catttgcatcttcccagacaacagaaaacatcactaccacacctgtgagtcagcagccctcagatggctccagcccagctttcaagccactgtgacaaagcaaagacaagctgaccctctgagtcctgcccaaattgcaactatgtgagaaaatgaaatattgatattgttttaagctaccagtttgggggatggtttgttacatagcaatagacaagcctaatacagaccttatccctatcaagagagaaaatcaagcttcacatagaaaagtgactaaatcaatagtctctataattttttgatcacacaatcacaataaatgtttgtttacttatttattgatttaatacatgtatgactacactaatgtactaygcacagacataaactttcaaaaggaggagctaaaaacagaaattctgatatttcccccggtcccaaaaggtttattatgctcacccaacttcaaaaacttctgaaggcagcatgcaaattgtttatataatagttctgaaattccaggtgatttgacaaactactagttaggaacagattacaagtgccaaatttgaaggaaacatgtggattttacgtagtctttaaaaaaaaatcactttagcaaaca

SEQ ID NO: 723676 - DNA, 2243 bp, Homo sapiens
ggaagtccatagaggcatctaatcgctaagcaagagtttcaagcgcccagtttctttattctacagagaaattgccaaaatgtttgtgtacagattgtagacatgactagctaatattagtgatcaatatttataggtgactttccaatataggaggcagggttattagtatttaggggagggagaatttgccagtgctctctgcagatttagttcctggtcagtcaagtaggacagacggttagaggacacagcacttgcttttgaatccgtggctgagtactggaggaaaaacaggaattgctttatgggtcagggcaataatgtcttgraattgctggacgtaaccattattacgcttgcttgtttccccaaaataagacatagaaagaagtctgggccgggcgtggtggctcacgcttgtaatcctagcactttgggaggctgaggcgaacaggtcacttggggtcaggagttcgagaccagcctgaccaacgtggtgaaaccccatctctactaaaaatacaaaaattagctggttgcggtggtgtgtgcctgtaatcccagctactcaggaggctgaggcaggagaatcccttgaacccaggaggcggaggttgtagtgagcggagatcttgacattacactccagcctggatgatggaatgagactgtgtctcaaaaagcaaaaacaaaaacaaaacaaaaacaaaaacaaacaaaaagaaaagaaaagaaaaaagaaagtagactgaatagacattactcctttttattttttgataacaagtttacactggaaataacaatagttaccttttttttttttggataaccttaatttgtcctcatttgaagcattaaaatttatgaaaagccttttagtctaactatgcagtcgccatctcttcaacttctcacccccacctccacaagggaaaattcatcttgcaaagcttttcgaggagcgtatatttcatgtgaatatgcctttcccatttcgtatgccttcccccgtagttttacatgacttcttttggccactgtttcattaatagcattaggatttttattttcctgatctgagggcaggagaattggacccattctatctggtaattcatcaaacagtttctctaccacaaagaacattttttcttccctctctctgggtttctggcagctcatctcaccctgccagggggagattgaacactttactcttttgaagagttcacatcagaagatttcaccacatgcctctaagatttcacctcatgagaaattccccttcaaatctgtggttttgcctcttcccaggaccttttgaattccgtaatggcgtcatgtgctggctgtgcagtttgccccctttgaagcatttacagatgcttttaggagtctctttagaaagaaaatggttggtggtcatggtgggggaggggttggaaatccctcagcagccagaagatggtctctgaataattcaggacacaccgcggggcactgctaataccagctctcccagggccggggtaaatattaacactcttatttctggtctctggggaaaataacagtaatagaagagggtgtctcttggccacacgtgatttcaagtgggttaggctttctcgaaactctggctgtacatcagcctttcctgggggaatttaaaccaagcccaatgtccaggcccctcaccaggcctgtggaatgagaggtcctggtagtgggaccaggtatggtcgtcttagaagttttgcagccggctccgatgcacacccggcgctgagaagctgagagccgctgctgcaggcctgtgcccaggctgggtcacgctacggaggagaagattttggaaagaagtagaagtcctcacgggcaactccctgccatccacaccaacctccccttcttgttctctccttctcatcttaaactttcgagaggaagaagggttggtcaagggtgaacgttcctgggcatggtgagaggctgctctgtggtgcccactcacactgagagggaccagctggggacgcctgatggtgccactgaggctttggggtcccctttcagaggggggcatcttaacgcgagtcttacggtctttcctgggttcccatgctcggcggcggctcctccacaggcctgtcttccctttgttctggagaatgttctgcctgggcggagcattcggtgcggttacgtgggtgcggttctccagggagagcgcgggg

SEQ ID NO: 723677 - DNA, 2243 bp, Homo sapiens
ggaagtccatagaggcatctaatcgctaagcaagagtttcaagcgcccagtttctttattctacagagaaattgccaaaatgtttgtgtacagattgtagacatgactagctaatattagtgatcaatatttataggtgactttccaatataggaggcagggttattagtatttaggggagggagaatttgccagtgctctctgcagatttagttcctggtcagtcaagtaggacagacggttagaggacacagcacttgcttttgaatccgtggctgagtactggaggaaaaacaggaattgctttatgggtcagggcaataatgtcttgaaattgctggamgtaaccattattacgcttgcttgtttccccaaaataagacatagaaagaagtctgggccgggcgtggtggctcacgcttgtaatcctagcactttgggaggctgaggcgaacaggtcacttggggtcaggagttcgagaccagcctgaccaacgtggtgaaaccccatctctactaaaaatacaaaaattagctggttgcggtggtgtgtgcctgtaatcccagctactcaggaggctgaggcaggagaatcccttgaacccaggaggcggaggttgtagtgagcggagatcttgacattacactccagcctggatgatggaatgagactgtgtctcaaaaagcaaaaacaaaaacaaaacaaaaacaaaaacaaacaaaaagaaaagaaaagaaaaaagaaagtagactgaatagacattactcctttttattttttgataacaagtttacactggaaataacaatagttaccttttttttttttggataaccttaatttgtcctcatttgaagcattaaaatttatgaaaagccttttagtctaactatgcagtcgccatctcttcaacttctcacccccacctccacaagggaaaattcatcttgcaaagcttttcgaggagcgtatatttcatgtgaatatgcctttcccatttcgtatgccttcccccgtagttttacatgacttcttttggccactgtttcattaatagcattaggatttttattttcctgatctgagggcaggagaattggacccattctatctggtaattcatcaaacagtttctctaccacaaagaacattttttcttccctctctctgggtttctggcagctcatctcaccctgccagggggagattgaacactttactcttttgaagagttcacatcagaagatttcaccacatgcctctaagatttcacctcatgagaaattccccttcaaatctgtggttttgcctcttcccaggaccttttgaattccgtaatggcgtcatgtgctggctgtgcagtttgccccctttgaagcatttacagatgcttttaggagtctctttagaaagaaaatggttggtggtcatggtgggggaggggttggaaatccctcagcagccagaagatggtctctgaataattcaggacacaccgcggggcactgctaataccagctctcccagggccggggtaaatattaacactcttatttctggtctctggggaaaataacagtaatagaagagggtgtctcttggccacacgtgatttcaagtgggttaggctttctcgaaactctggctgtacatcagcctttcctgggggaatttaaaccaagcccaatgtccaggcccctcaccaggcctgtggaatgagaggtcctggtagtgggaccaggtatggtcgtcttagaagttttgcagccggctccgatgcacacccggcgctgagaagctgagagccgctgctgcaggcctgtgcccaggctgggtcacgctacggaggagaagattttggaaagaagtagaagtcctcacgggcaactccctgccatccacaccaacctccccttcttgttctctccttctcatcttaaactttcgagaggaagaagggttggtcaagggtgaacgttcctgggcatggtgagaggctgctctgtggtgcccactcacactgagagggaccagctggggacgcctgatggtgccactgaggctttggggtcccctttcagaggggggcatcttaacgcgagtcttacggtctttcctgggttcccatgctcggcggcggctcctccacaggcctgtcttccctttgttctggagaatgttctgcctgggcggagcattcggtgcggttacgtgggtgcggttctccagggagagcgcgggg

SEQ ID NO: 723678 - DNA, 2243 bp, Homo sapiens
ggaagtccatagaggcatctaatcgctaagcaagagtttcaagcgcccagtttctttattctacagagaaattgccaaaatgtttgtgtacagattgtagacatgactagctaatattagtgatcaatatttataggtgactttccaatataggaggcagggttattagtatttaggggagggagaatttgccagtgctctctgcagatttagttcctggtcagtcaagtaggacagacggttagaggacacagcacttgcttttgaatccgtggctgagtactggaggaaaaacaggaattgctttatgggtcagggcaataatgtcttgaaattgctggacgtaaccattattacgcttgcttgtttccccaaaataagacatagaaagaagtctgggccgggcgtggtggctcacgcttgtaatcctagcactttgggaggctgaggcgaacaggtcacttggggtcaggagttcgagaccagcctgaccaacgtggtgaaaccccatctctactaaaaatacaaaaattagctggttgcggtggtgtgtgcctgtaatcccagctactcaggaggctgaggcaggagaatcccttgaacccaggaggcggaggttgtagtgagcggagatcttgacattacactccagcctggatgatggaatgagactgtgtctcaaaaagcaaaaacaaaaacaaaacaaaaacaaaaacaaacaaaaagaaaagaaaagaaaaaagaaagtagactgaatagacattactcctttttattttttgataacaagtttacactggaaataacaatagttaccttttttttttttggataaccttaatttgtcctcatttgaagcattaaaatttatgaaaagccttttagtctaactatgcagtcgccatctcttcaacttctcacccccacctccacaagggaaaattcatcttgcaaagcttttcgaggagcgtatatttcatgtgaatatgcctttcccatttcgtatgccttccccygtagttttacatgacttcttttggccactgtttcattaatagcattaggatttttattttcctgatctgagggcaggagaattggacccattctatctggtaattcatcaaacagtttctctaccacaaagaacattttttcttccctctctctgggtttctggcagctcatctcaccctgccagggggagattgaacactttactcttttgaagagttcacatcagaagatttcaccacatgcctctaagatttcacctcatgagaaattccccttcaaatctgtggttttgcctcttcccaggaccttttgaattccgtaatggcgtcatgtgctggctgtgcagtttgccccctttgaagcatttacagatgcttttaggagtctctttagaaagaaaatggttggtggtcatggtgggggaggggttggaaatccctcagcagccagaagatggtctctgaataattcaggacacaccgcggggcactgctaataccagctctcccagggccggggtaaatattaacactcttatttctggtctctggggaaaataacagtaatagaagagggtgtctcttggccacacgtgatttcaagtgggttaggctttctcgaaactctggctgtacatcagcctttcctgggggaatttaaaccaagcccaatgtccaggcccctcaccaggcctgtggaatgagaggtcctggtagtgggaccaggtatggtcgtcttagaagttttgcagccggctccgatgcacacccggcgctgagaagctgagagccgctgctgcaggcctgtgcccaggctgggtcacgctacggaggagaagattttggaaagaagtagaagtcctcacgggcaactccctgccatccacaccaacctccccttcttgttctctccttctcatcttaaactttcgagaggaagaagggttggtcaagggtgaacgttcctgggcatggtgagaggctgctctgtggtgcccactcacactgagagggaccagctggggacgcctgatggtgccactgaggctttggggtcccctttcagaggggggcatcttaacgcgagtcttacggtctttcctgggttcccatgctcggcggcggctcctccacaggcctgtcttccctttgttctggagaatgttctgcctgggcggagcattcggtgcggttacgtgggtgcggttctccagggagagcgcgggg

SEQ ID NO: 723679 - DNA, 1932 bp, Homo sapiens
tgtgttctagcaacctgtttgaaatttaaatacaactgaatttctccttaaaaacaggatagtaaccttcaaatagaaaaagtcaatgcctttcatcatatgccagttttttaaggmcctcagaaatgtaactgaccctgaaattcatgacatcaagttgccatgttctctttcctttggactaccaatttcaaactttctattccccctcctcctcctctctccaaacgtctaccagtcttatcttctgcagtatctcactgttctgtctccttgataacctcccagtaaccaggtgctcactacttctcaccagtattgctatgaaagggtcttaatcccctagaccagtttctcccctttccaacccatccttcacaccattgccatactgtctttgaaaactttgctaccctattcaaaacatttgaatggctaccacaaatccttcaccataacatttgaggcccctctataaagcctcaatctcctttttctagccttgcacaccatttcaccctcatagaaatagccataattcagtctcaacagaacatcttcattgctcctcaagagtactcaatcctcttctacctttacttgtgccccataagaacttaccctacccagaatctttctcttccagtctttcccagcctcccactttacaatcctcttttccctttaaggtttgctgatgtcaccctctcctcctcccttagacaggaccaacatccagcttgccttatggagctcatatcctattttccctgtaacgcagctgtctggtctgcctcccttattaaactgtaagctgcttagtgttagaagccgtactatattcattcactcatttgttgagaaattgtttactgagtgaaaaaccatgtgccaggcacaggtgcttctcctctgtaatgtcaagacagtgctggctcatggtaggtgatgagatacatgatttaaattaattccactttctcattaagtaagtagttaaaatcagaagggctatcatagcctgaatatataggttttaccttccagtgaagaacattcttattactgtgagaataagttcatctagattactattcaaaatttaaatccagtctactactaaaggcattaaaatgtgatgctagaataacctggataccaaaaactctgaatcctaagagtgtctcatttatatgtatttaaatagtcctagttatgttgattcattattcataggcttcagtcttaatctctctgttccttaccttcttcctatagaaaatgggttgaataaaaacgtgcccggctcccaggactactgtgaggattaaatgagtcaatataagaaaagcacttgtcctgaggtgtggcttgcagctcactgccaatgcatgttctataagattataagactatccggccaggaacggtggctcatgcctgtaatcccagcactttgggaggtcgaggtggatcacttgaggtcaggagttcaaggccagcctgggcaacatggcgaaaccccatctttactaaaaaatacaaaaattagctgggcgtggtggagtgcacctgtagtcccagctactcaggaggctgaggcaggagaattgcttgaacctgggaggcagaggatatagtgccactgcactgcaacctgggtgacagtgagaccctgactcaaagaaacaaacagtaactcaactgatcttccaaaatgctgacatagagaagacacagatataaggctgtggttatgcgtgtatccaatgtaactgttgtgcccacagcctttctacctgagcatttttccagggtgactatgtatggttaaaatacacgtttgaattttagttgcctgttagggtttgaagatgacattgcaaaaaaattttatagagaaaatgtaagggcaatgtaagaaacttcaaa

SEQ ID NO: 723680 - DNA, 1932 bp, Homo sapiens
tgtgttctagcaacctgtttgaaatttaaatacaactgaatttctccttaaaaacaggatagtaaccttcaaatagaaaaagtcaatgcctttcatcatatgccagttttttaaggccctcagaaatgtaactgaccctgaaattcatgacatcaagttgccatgttctctttcctttggactaccaatttcaaactttctattccccctcctcctcctctctccaaacgtctaccagtcttatcttctgcagtatctcactgttctgtctccttgataacctcccagtaaccaggtgctcactacttctcaccagtattgctatgaaagggtcttaatcccctagaccagtttctcccctttccaacccatccttcacaccattgccatactgtctttgaaaactttgctaccctattcaaaacatttgaatggctaccacaaatccttcaccataacatttgaggcccctctataaagcctcaatctcctttttctagccttgcacaccatttcaccctcatagaaatagccataattcagtctcaacagaacatcttcattgctcctcaagagtactcaatcctcttctacctttacttgtgccccataagaacttaccctacccagaatctttctcttccagtctttcccagcctcccactttacaatcctcttttccctttaaggtttgctgatgtcaccctctcctcctcccttagacaggaccaacatccagcttgccttatggagctcatatcctattttccctgtaacgcagctgtctggtctgcctcccttattaaactgtaagctgcttagtgttagaagccgtactatattcattcactcatttgttgagaaattgtttactgagtgaaaaaccatgtgccaggcacaggtgcttctcctctgtaatgtcaagacagtgctggctcatggtaggtgatgagatacatgatttaaattaattccactttctcattaagtaagtagttaaaatcagaagggctatcatagcctgaatatataggttttaccttccagtgaagaacattcttattactgtgagaataagttcatctagattactattcaaaatttaaatccagtctactactaaaggcattaaaatgtgatgctagaataacctggataccaraaactctgaatcctaagagtgtctcatttatatgtatttaaatagtcctagttatgttgattcattattcataggcttcagtcttaatctctctgttccttaccttcttcctatagaaaatgggttgaataaaaacgtgcccggctcccaggactactgtgaggattaaatgagtcaatataagaaaagcacttgtcctgaggtgtggcttgcagctcactgccaatgcatgttctataagattataagactatccggccaggaacggtggctcatgcctgtaatcccagcactttgggaggtcgaggtggatcacttgaggtcaggagttcaaggccagcctgggcaacatggcgaaaccccatctttactaaaaaatacaaaaattagctgggcgtggtggagtgcacctgtagtcccagctactcaggaggctgaggcaggagaattgcttgaacctgggaggcagaggatatagtgccactgcactgcaacctgggtgacagtgagaccctgactcaaagaaacaaacagtaactcaactgatcttccaaaatgctgacatagagaagacacagatataaggctgtggttatgcgtgtatccaatgtaactgttgtgcccacagcctttctacctgagcatttttccagggtgactatgtatggttaaaatacacgtttgaattttagttgcctgttagggtttgaagatgacattgcaaaaaaattttatagagaaaatgtaagggcaatgtaagaaacttcaaa

SEQ ID NO: 723681 - DNA, 1583 bp, Homo sapiens
tgggtcggccgcacggaggcagagagaatcatcggcctggtaacgtgcatttatttaacttcatgtggtttgaacactttgtattctatttattgggacttgtgtttcctttgctgagaaccaccttcttcattgatttttccacaagggtcagttgttggtgttttggatatttttatacagttttatcaagaatgtattttaaatcattaaaaattgctgttttcacacttacaggtataatttgttaattacattccaaatattgaatcatttctggttccttgaaagaaccacacttagcatagtgtattttttcatgaacttttgagcctatttgttaatatattctgtagaatttttgcacctgtattcaaaaatgagatacatttttatgtgtgtgtatgtaatattttgcttacacttggtgaaaacttgaaagagaaaaatttctgaaagtttaaataacttccatattatttattttttgaagctttgctagaattcagtaaagaatttgccatttgtatggcaatagtgacttagaagtaaccaatgggcaactttctcagttctgtatatggcaattggttgacttagattttcaatcgcatccaaataaaatttgggtctccttctggatctgtacatatatgtgtgtaggcatatatatacacacacacatctacacatatacgtttatattcttacataatcagctatttcttmtagcttttcagagcatttatatagtgctgagaaaaatatatttaatctgtctgtattttttatttccttctcttaattcctcattttgtgtttgtatatttctcctatgtgtctgcctcgtgtaattaactttgatactgtatatttcataggatttttgtaaagaagcatctctggaaattattaactaacatgactttttaatcttttacatgtcattagtttatactttccctccttctgctttccacatctttattttgttttcatttttctgctttttaatttcataattaatttacttactgactatttttgttgagaatttgtgacactgatggtggataattttgctctgagccttgtgctgatagtatgctgtggctagaagagcgccacacttttgcttctgttctctttcctccgggacttctgcagtctcaggtgacctcctgagaacaccttgagctgtgttttgtgtctaagcccacggtcattttctgtaggtaattcacagggtgcgagaagaagctgtgtttcttgttttcagggtggagttgggctatgcagctgcacatcctcctgagaacgtgtcactctgtcctccacaggctcacatgcttctgctcacttggcctcctgggtgagaagagacagggagattcccctttaaagcaggtgtctccgggtgcctgcagccacactcctgcctctgccctcctgcctgaggcgttctccaaaaccctggcaagcaggagtggggagcaaccctccagccctggaaaatggggttggacgccaatgctgcagcctcccacctcaaaggcacaacttcagtgctggagaggctgagc

SEQ ID NO: 723682 - DNA, 1182 bp, Homo sapiens
tgagcagattttgtatcctctctctcacatttgcaaatcagtaattatgtgagccaaagggagagtgtcagattggcatagtggaaaaataatcacaaagatcctggattcaaggaaatctgatgtttttctctgtttttttttccaattgtaatgtcggcaaagtcactgaactctctcggccttgtctcctcctctgtgacctggtaggcatgaaataaaccttgagaaccctgcagtcttttctactattactttgattttcatttctctagtactgttttttaactcactcaaaaacagtgcaacttccacttgcttttaataaatagaagcacaaagtaactttgtgacttttgctaatgttcttctaactccattttactatcagytctcatcttaggaggactggggagaaaaaaacttggtgatttttcccaacgctgacagatcttgaggtgtgaacttcacagagagaaacctgtgcatatttaatagaaataaaccaagaagttaattttaaaaacatgtttaattctccctgtggaaatcaacacctgccccttcgctgcttaatatcgttattatgatgagtttggaagttctgaatagatgcagccatgcttattactaggaaaaatgtgatagccatgttcaatagagaataaagttgtcgaccccaaatgacagacctgcatgtagatttcccataagaccatctttatgtccagtaaaagacagccaagtccccctttaacaggcagcactcttggcagagacagtagactattgcctggtttgtcactccaagggcatatttgaattgcattctgttgactgattgtttaaatataactcataaaagtttatcctccttgagacattcagtactttgaccctgacctcagttccctatcactttcctagcttcagctttttctgtgtccaaacaaaatgacctcagtaacagacatcctcacagccacttttgattcttgcttcttttggacattttacagatcctctatgttaagtccaatcatttcttctgtcactactgctcccatgtttaaagcatatctaggactatggtcctagagttatgcccgattgctgtacttcacatttatggtttccagcctcagctaagccttcatctctataccttttaagacatggctc

SEQ ID NO: 723683 - DNA, 1182 bp, Homo sapiens
tgagcagattttgtatcctctctctcacatttgcaaatcagtaattatgtgagccaaagggagagtgtcagattggcatagtggaaaaataatcacaaagatcctggattcaaggaaatctgatgtttttctctgtttttttttccaattgtaatgtcggcaaagtcactgaactctctcggccttgtctcctcctctgtgacctggtaggcatgaaataaaccttgagaaccctgcagtcttttctactattactttgattttcatttctctagtactgttttttaactcactcaaaaacagtgcaacttccacttgcttttaataaatagaagcacaaagtaactttgtgacttttgctaatgttcttctaactccattttactatcagctctcatcttaggaggactggggagaaaaaaacttggtgatttttcccaacgctgacagatcttgaggtgtgaacttcacagagagaaacctgtgcatatttratagaaataaaccaagaagttaattttaaaaacatgtttaattctccctgtggaaatcaacacctgccccttcgctgcttaatatcgttattatgatgagtttggaagttctgaatagatgcagccatgcttattactaggaaaaatgtgatagccatgttcaatagagaataaagttgtcgaccccaaatgacagacctgcatgtagatttcccataagaccatctttatgtccagtaaaagacagccaagtccccctttaacaggcagcactcttggcagagacagtagactattgcctggtttgtcactccaagggcatatttgaattgcattctgttgactgattgtttaaatataactcataaaagtttatcctccttgagacattcagtactttgaccctgacctcagttccctatcactttcctagcttcagctttttctgtgtccaaacaaaatgacctcagtaacagacatcctcacagccacttttgattcttgcttcttttggacattttacagatcctctatgttaagtccaatcatttcttctgtcactactgctcccatgtttaaagcatatctaggactatggtcctagagttatgcccgattgctgtacttcacatttatggtttccagcctcagctaagccttcatctctataccttttaagacatggctc

SEQ ID NO: 723684 - DNA, 1182 bp, Homo sapiens
tgagcagattttgtatcctctctctcacatttgcaaatcagtaattatgtgagccaaagggagagtgtcagattggcatagtggaaaaataatcacaaagatcctggattcaaggaaatctgatgtttttctctgtttttttttccaattgtaatgtcggcaaagtcactgaactctctcggccttgtctcctcctctgtgacctggtaggcatgaaataaaccttgagaaccctgcagtcttttctactattactttgattttcatttctctagtactgttttttaactcactcaaaaacagtgcaacttccacttgcttttaataaatagaagcacaaagtaactttgtgacttttgctaatgttcttctaactccattttactatcagctctcatcttaggaggactggggagaaaaaaacttggtgatttttcccaacgctgacagatcttgaggtgtgaacttcacagagagaaacctgtgcatatttaatagaaataaaccaagaagttaattttaaaaacatgtttaattctccctgtggaaatcaacacctgcccyttcgctgcttaatatcgttattatgatgagtttggaagttctgaatagatgcagccatgcttattactaggaaaaatgtgatagccatgttcaatagagaataaagttgtcgaccccaaatgacagacctgcatgtagatttcccataagaccatctttatgtccagtaaaagacagccaagtccccctttaacaggcagcactcttggcagagacagtagactattgcctggtttgtcactccaagggcatatttgaattgcattctgttgactgattgtttaaatataactcataaaagtttatcctccttgagacattcagtactttgaccctgacctcagttccctatcactttcctagcttcagctttttctgtgtccaaacaaaatgacctcagtaacagacatcctcacagccacttttgattcttgcttcttttggacattttacagatcctctatgttaagtccaatcatttcttctgtcactactgctcccatgtttaaagcatatctaggactatggtcctagagttatgcccgattgctgtacttcacatttatggtttccagcctcagctaagccttcatctctataccttttaagacatggctc

SEQ ID NO: 723685 - DNA, 1182 bp, Homo sapiens
tgagcagattttgtatcctctctctcacatttgcaaatcagtaattatgtgagccaaagggagagtgtcagattggcatagtggaaaaataatcacaaagatcctggattcaaggaaatctgatgtttttctctgtttttttttccaattgtaatgtcggcaaagtcactgaactctctcggccttgtctcctcctctgtgacctggtaggcatgaaataaaccttgagaaccctgcagtcttttctactattactttgattttcatttctctagtactgttttttaactcactcaaaaacagtgcaacttccacttgcttttaataaatagaagcacaaagtaactttgtgacttttgctaatgttcttctaactccattttactatcagctctcatcttaggaggactggggagaaaaaaacttggtgatttttcccaacgctgacagatcttgaggtgtgaacttcacagagagaaacctgtgcatatttaatagaaataaaccaagaagttaattttaaaaacatgtttaattctccctgtggaaatcaacacctgccccttcgctgcttaatatcgttattatgatgagtttggaagttctgaatagatgcagccatgcttattactaggaaaaatgtgatagccatgttcaatagagaataaagttgtcgaccccaaatgacagacctgcatgtagatttcccataagaccatctttatgtccagtaaaagacagccaagtccccctttaacaggcagcactcttggcagagacagtagactattgcctggtttgtcactccaagggcatatttgaattgcattctgttgactgattgtttaaatataactcataaaagtttatcctccttgagacattcagtactttgaccctgacctcagttccctatcactttcctagcttcagctttttctgtgtccaaacaaaatgacctcagtaacagacatcctcacagccacttttgattcttgcttcttttggacattttacagatcctctatgttaagtccaatcatttcttctgtcactactgctcccatgtttaaagcatatctaggactatggycctagagttatgcccgattgctgtacttcacatttatggtttccagcctcagctaagccttcatctctataccttttaagacatggctc

SEQ ID NO: 723686 - DNA, 1182 bp, Homo sapiens
tgagcagattttgtatcctctctctcacatttgcaaatcagtaattatgtgagccaaagggagagtgtcagattggcatagtggaaaaataatcacaaagatcctggattcaaggaaatctgatgtttttctctgtttttttttccaattgtaatgtcggcaaagtcactgaactctctcggccttgtctcctcctctgtgacctggtaggcatgaaataaaccttgagaaccctgcagtcttttctactattactttgattttcatttctctagtactgttttttaactcactcaaaaacagtgcaacttccacttgcttttaataaatagaagcacaaagtaactttgtgacttttgctaatgttcttctaactccattttactatcagctctcatcttaggaggactggggagaaaaaaacttggtgatttttcccaacgctgacagatcttgaggtgtgaacttcacagagagaaacctgtgcatatttaatagaaataaaccaagaagttaattttaaaaacatgtttaattctccctgtggaaatcaacacctgccccttcgctgcttaatatcgttattatgatgagtttggaagttctgaatagatgcagccatgcttattactaggaaaaatgtgatagccatgttcaatagagaataaagttgtcgaccccaaatgacagacctgcatgtagatttcccataagaccatctttatgtccagtaaaagacagccaagtccccctttaacaggcagcactcttggcagagacagtagactattgcctggtttgtcactccaagggcatatttgaattgcattctgttgactgattgtttaaatataactcataaaagtttatcctccttgagacattcagtactttgaccctgacctcagttccctatcactttcctagcttcagctttttctgtgtccaaacaaaatgacctcagtaacagacatcctcacagccacttttgattcttgcttcttttggacattttacagatcctctatgttaagtccaatcatttcttctgtcactactgctcccatgtttaaagcatatctaggactatggtcctagagttatgcccgattgctgtacttcacatttatggtttccagcytcagctaagccttcatctctataccttttaagacatggctc

SEQ ID NO: 723687 - DNA, 881 bp, Homo sapiens
gggtttatgtttgatatgtaatgtaattttctaatgctaaatcaagtggtaattttgttggtcaagttgatttagtggcttgggaagaaagcttttaatgttcccctaatttttcttacctttgacatgatccttcacatgtcttattttgcttagtgatttttctttttttttttttttttgagacagggtcttactctaccacccaggcttgagtgcagtggtgcgatcacagctcattgcagccttgacctcccagactcaagctattcttccacctcagcctcccaagtagctggtactacgggcacatgccaccaaacttggctaatttttgtattttttgtagagacagagttttgccaaattctcaggctggtctggaatttctgggctcaagtaatcctgccttggcctcccaacatgctgatattacagacataagccacagtacctggccagttttctttttwaaaaaatctattggttattaatttgaagccttccttttcataactgtgctccttaattgggagcaaacatgaatggaccacaacttagccaattttctatatacgatctttgccatcctaatttaaaggaatattaattctttcttttcctctttcattccacaaacctgtattgactacatctaagttctaaatggtgcactggatgttgaaaaagttgatgatgagcaagaacaaaattcctcctttcaggagacttacagttcaatatgggaaatgtaatttgttaaaatataaaagtgcaattgtgttacatgctgtacgaagtacatgttgacatgtgagtatataataaatgggctggaggccagaggattgccaaagagaatgggcctcctgctgagatga

SEQ ID NO: 723688 - DNA, 574 bp, Homo sapiens
tgactggctattttattttatttttgtagagatggaatctcacaatattgcccaggctgatctcaaactcttgggctcaagcagtcctctcgcgtcagcctaccaaagtgctgggattacaggcaygagccaccacgcccagccagattacaaaatactttgacatcttttctctacagccctcaaaaggaggcagggcaagcacaattaaatcccattacaaatggggtgactgaagctccattcatggcttgcccagggtcacacaaagaatgaatagcagagccctgagcctgtgtgcttccctctgtgccaggctgctttacccaggcatgggtgcaccttgtgcatgggacatttctcctttgttgtgtcctgagtaccttaagccactcagatattgctcaggtggagtgaggggaaaatgttttcaggttgtattagtcaaaacaaaataccacacactgggcgactttaaaatcatacatttatccctcacagttctggaggcttggaagtccaagttcaaggtggcagctggacgggttcctggtgagggctctcttcctggttt

SEQ ID NO: 723689 - DNA, 574 bp, Homo sapiens
tgactggctattttattttatttttgtagagatggaatctcacaatattgcccaggctgatctcaaactcttgggctcaagcagtcctctcgcgtcagcctaccaaagtgctgggattacaggcatgagccaccacgcccagccagattacaaaatactttgacatcttttctctacagccctcaaaaggargcagggcaagcacaattaaatcccattacaaatggggtgactgaagctccattcatggcttgcccagggtcacacaaagaatgaatagcagagccctgagcctgtgtgcttccctctgtgccaggctgctttacccaggcatgggtgcaccttgtgcatgggacatttctcctttgttgtgtcctgagtaccttaagccactcagatattgctcaggtggagtgaggggaaaatgttttcaggttgtattagtcaaaacaaaataccacacactgggcgactttaaaatcatacatttatccctcacagttctggaggcttggaagtccaagttcaaggtggcagctggacgggttcctggtgagggctctcttcctggttt

SEQ ID NO: 723690 - DNA, 1575 bp, Homo sapiens
ttatgcctgattcatggctgaaatttcaggatgaaagctatgaaatctctatttgtgtttgtgtatctawtaatgtatgttatgtatatgtgatattttcttaactccagagagcattgcaaaattcatttatgaaatcctctaaaagtgctctattctaacttggcttggaaaaaaataagcatttataaataaatattcaccaaactcctagaaatataggaactgatcaaatgtttcttaagttaacatgatttggataaaacttagttaaataagattaatatagtatttttggtgtaataaaacaactatatcttcaaaattatcattattgaatataaaacaagcataaattcctattctgcttgagttctagtcaaataagctaatattatacttactagaaacgtaaaatcttaaagcttatagatttgattctaattaagttgtcattcttatgaaaaacattatttttttatgctgaaaagatacacatatatttagagttagccagctggactcagtttaggtgatcccaattttgttacaacatcgaaagcatcataatcaggagcaagtcgaacatatgccttcttctctttatcaggacaaatcagggtggtgaccttggccacatcactgtcatagagcttcttcacagcctgtctgatctggtgcttgttggctttaacatccacagtgaacacaagcgtgttgttttcttctatcttcttcacggccgactcagtggtcagcggaaacttgatgatagcatagtggccaagcttgtttctcctgggggtgctcttctgaggctatctgggctgcctccggagtcacagtgtcttgggccgcctgaaggtgagtgacatgcggatcctcttttttgcgtgtggctgcggacacctttcaacactgccttcttggcctttaaagccttcgctttggcttcggctttaggaggagcaggagcttccttcgctttcggtgccatcttgtgaaaagcgaaaaacattatttcaaaaataatttgtttacagtaaatctgcctaagaatagtttccaaagtacttttggtaatttttaaccttaaagttaatttaattaaaagatttgcattaaatatctagaccatttataaataagatacaatactaaaacattaattactgaacataaataattcaagtttatatacttttggcttcctatttttacagagagactaaagatattttggcccgttaataaacatgtttttttctgccacactgaggaattgtattatgaggaaacacatccctctagatgttgggagatggtatattcatacattttctaacctactatagaatgctaatatatgacagtttataactgtctacttcctagttttctctggaaaataaaagattactaagtattaaaattataatcaatatatgtaaataaaactactagaaataatagaataactagaaacaactctatgcaaagcatgcaagaaaagtagggcatgtttcgcaagtaaagtaggttgcattttttataaggaaaaccatacagaagata

SEQ ID NO: 723691 - DNA, 2763 bp, Homo sapiens
tgccacaggctccccagaaacaaggtccccaaatgccactgtcggctgctgaggtacagggaagtgcttggtggagaccacgctcgccaggctgccctgcagccaaaaggcagaggctgagcaggaacgcagcctccgctgagggccacgtggtgaaatcaagtatctgggcctgggaaagacatttctggggagtctgtgtgctgcggtctggcagcaccgagtccgctgtgtgcggggggctggtaggactggcctcctgaaaggaggggagagatcagcgtgcttggagggagaccaactcccaaaaggaacaaggttggagggggcaaggcagcttcagagcctggctccagccctggagacagaaagaccagtttaaattcccacccggcccgcaccctctggggggccgtgggactttggggagcctctttggtccttagttttatcttctgtggaacagacgcaataatccgtatttagttgggggtaattagtcgacgtatgtggataggtggacacgcagtacacttggtgatggtggccgtcttcacccctctctccctggtttccctaagagaggcatctctttccgcccttctcccctgaaacttggggtgtgaagtgtaagatgctggatctcacagacaggagcccaccaccgacccagagacatcgtggccagttttgaaatcttcagtctcagaggacactcatgggctctgcgatgctgggtgggtcgtgtgcccaccctgagctccttcctttgctcctaaagacaggagtgatgcttcctgcctccgcgttacacaggcatcgtgaggctgcacatgacagcagctgcccagctccaggtcagtggtggcatggaagagctccagctccaagctgcacacaccctacttgagacgccgttgttctgagtccaccgtgccaggtggagtccttccgtccccaacccttgccctagggccctcagtgctggtggctccatgaggtacttctttctgtagtgggtgtgagattcatgagtgagatgcccccagccctgctccagggcagccttgccagtttctggaatgttctccatttccagtctgcagcttccttctgcccaggagtggcttccctgtctggctgtcattcagctcaattctgtacttaacttcaaaatgtgcataaaatcctaaaatgggacgtttctcagttgacgtcctccacctccagctcctctcacatggaagcaggtgggggcctcacggtgttctagagtttgcagggggcagagagcagcatcctcaccgcagatatcctgttacaggactatgggattaagagcttgaagtttcatttaaatcacaatgaaaacaactatggcctggtgcggtggctcatgcctgtaatcctagcactttgggaggcaaaggaaggcagatcgtgaggtcaagagatcgagaccatcctggccaacatggtgaaaccccatctctactaaaaatacaaaactcagctgtgcatgtgacatgcacctgtagtcccagctactcaggaggctgaggcaggagaaccacttgaacctgggaggcagaggttgtagtgagccaagattgggccactgcactccagcctgggcaatagagcgagtctcaaaaaaaaaaaaaaaaaaaaaaaaaaaaaaaaaaaaaaacaattacaagccccaattcagcgtgctcccaggagactgtctgacttggggctctggagtttctgaggcccacagggtgagcagggaacccggccaatctctccctcctgggtccctctcaggcaggccatggtgacctggccccaggcagacgctggcagctcagaggmgtgtgggacctgcagacctcaggggttgctggacagtcctgagataggccttgcttttggccaaggcacctgaagagtgaaaacactctgtgcatagaggaacaggatggggagagcatggcaggcccttctccagttcagggccatcccctccagatccagagcaagctcgggaggggaggagtcgatgtcccaggatttgtgactcggacatcggggttgggggatgtgggtgatgttcacctgccgtggaagaacccggaggattagggtggcaggcggcagggccctgagtcaggcttgaagacgtcgggtttagaggcagcgggcaacttggatggaaatggtacagacagacgctggggtgccgagatcagcaccccactcggccccccacacctccatgactaatcaaaaggttcacttctcccaatcttccagaagaagtcccggcccctgggaggctcctggtatggacccagctatgggactcaccttctggcgggcacaagggctgtgtcccagcaggcaggaccctagttcaactccttcctagtcacagggggcctggggtggccagatcagggtcttctcctccccacgcctgccctcctcagcagcccgctgccccatggcctttccctgctcctgagtggatgccacgccctctcctaggtggttctacctggacagtgacttctaacgtcagatattgcgaaggccgcctgcagggaggatggagccaacagtcctggcggtctgtccgcccagctccctcgaaggcctcctcctggcttcctgggtgaggcttgctggggagcaacgtgacatagaggccactctttggggactgctgcttgggggcctggctcctgggtacgggtgggaggcagtgacctcaca

SEQ ID NO: 723692 - DNA, 2763 bp, Homo sapiens
tgccacaggctccccagaaacaaggtccccaaatgccactgtcggctgctgaggtacagggaagtgcttggtggagaccacgctcgccaggctgccctgcagccaaaaggcagaggctgagcaggaacgcagcctccgctgagggccacgtggtgaaatcaagtatctgggcctgggaaagacatttctggggagtctgtgtgctgcggtctggcagcaccgagtccgctgtgtgcggggggctggtaggactggcctcctgaaaggaggggagagatcagcgtgcttggagggagaccaactcccaaaaggaacaaggttggagggggcaaggcagcttcagagcctggctccagccctggagacagaaagaccagtttaaattcccacccggcccgcaccctctggggggccgtgggactttggggagcctctttggtccttagttttatcttctgtggaacagacgcaataatccgtatttagttgggggtaattagtcgacgtatgtggataggtggacacgcagtacacttggtgatggtggccgtcttcacccctctctccctggtttccctaagagaggcatctctttccgcccttctcccctgaaacttggggtgtgaagtgtaagatgctggatctcacagacaggagcccaccaccgacccagagacatcgtggccagttttgaaatcttcagtctcagaggacactcatgggctctgcgatgctgggtgggtcgtgtgcccaccctgagctccttcctttgctcctaaagacaggagtgatgcttcctgcctccgcgttacacaggcatcgtgaggctgcacatgacagcagctgcccagctccaggtcagtggtggcatggaagagctccagctccaagctgcacacaccctacttgagacgccgttgttctgagtccaccgtgccaggtggagtccttccgtccccaacccttgccctagggccctcagtgctggtggctccatgaggtacttctttctgtagtgggtgtgagattcatgagtgagatgcccccagccctgctccagggcagccttgccagtttctggaatgttctccatttccagtctgcagcttccttctgcccaggagtggcttccctgtctggctgtcattcagctcaattctgtacttaacttcaaaatgtgcataaaatcctaaaatgggacgtttctcagttgacgtcctccacctccagctcctctcacatggaagcaggtgggggcctcacggtgttctagagtttgcagggggcagagagcagcatcctcaccgcagatatcctgttacaggactatgggattaagagcttgaagtttcatttaaatcacaatgaaaacaactatggcctggtgcggtggctcatgcctgtaatcctagcactttgggaggcaaaggaaggcagatcgtgaggtcaagagatcgagaccatcctggccaacatggtgaaaccccatctctactaaaaatacaaaactcagctgtgcatgtgacatgcacctgtagtcccagctactcaggaggctgaggcaggagaaccacttgaacctgggaggcagaggttgtagtgagccaagattgggccactgcactccagcctgggcaatagagcgagtctcaaaaaaaaaaaaaaaaaaaaaaaaaaaaaaaaaaaaaaacaattacaagccccaattcagcgtgctcccaggagactgtctgacttggggctctggagtttctgaggcccacagggtgagcagggaacccggccaatctctccctcctgggtccctctcaggcaggccatggtgacctggccccaggcagacgctggcagctcagaggcgtgtgggacctgcagacctcaggggttgctggacagtcctgagataggccttgcttttggccaaggcacctgaagagtgaaaacactctgtgcatagaggaacaggatggggagagcrtggcaggcccttctccagttcagggccatcccctccagatccagagcaagctcgggaggggaggagtcgatgtcccaggatttgtgactcggacatcggggttgggggatgtgggtgatgttcacctgccgtggaagaacccggaggattagggtggcaggcggcagggccctgagtcaggcttgaagacgtcgggtttagaggcagcgggcaacttggatggaaatggtacagacagacgctggggtgccgagatcagcaccccactcggccccccacacctccatgactaatcaaaaggttcacttctcccaatcttccagaagaagtcccggcccctgggaggctcctggtatggacccagctatgggactcaccttctggcgggcacaagggctgtgtcccagcaggcaggaccctagttcaactccttcctagtcacagggggcctggggtggccagatcagggtcttctcctccccacgcctgccctcctcagcagcccgctgccccatggcctttccctgctcctgagtggatgccacgccctctcctaggtggttctacctggacagtgacttctaacgtcagatattgcgaaggccgcctgcagggaggatggagccaacagtcctggcggtctgtccgcccagctccctcgaaggcctcctcctggcttcctgggtgaggcttgctggggagcaacgtgacatagaggccactctttggggactgctgcttgggggcctggctcctgggtacgggtgggaggcagtgacctcaca

SEQ ID NO: 723693 - DNA, 2763 bp, Homo sapiens
tgccacaggctccccagaaacaaggtccccaaatgccactgtcggctgctgaggtacagggaagtgcttggtggagaccacgctcgccaggctgccctgcagccaaaaggcagaggctgagcaggaacgcagcctccgctgagggccacgtggtgaaatcaagtatctgggcctgggaaagacatttctggggagtctgtgtgctgcggtctggcagcaccgagtccgctgtgtgcggggggctggtaggactggcctcctgaaaggaggggagagatcagcgtgcttggagggagaccaactcccaaaaggaacaaggttggagggggcaaggcagcttcagagcctggctccagccctggagacagaaagaccagtttaaattcccacccggcccgcaccctctggggggccgtgggactttggggagcctctttggtccttagttttatcttctgtggaacagacgcaataatccgtatttagttgggggtaattagtcgacgtatgtggataggtggacacgcagtacacttggtgatggtggccgtcttcacccctctctccctggtttccctaagagaggcatctctttccgcccttctcccctgaaacttggggtgtgaagtgtaagatgctggatctcacagacaggagcccaccaccgacccagagacatcgtggccagttttgaaatcttcagtctcagaggacactcatgggctctgcgatgctgggtgggtcgtgtgcccaccctgagctccttcctttgctcctaaagacaggagtgatgcttcctgcctccgcgttacacaggcatcgtgaggctgcacatgacagcagctgcccagctccaggtcagtggtggcatggaagagctccagctccaagctgcacacaccctacttgagacgccgttgttctgagtccaccgtgccaggtggagtccttccgtccccaacccttgccctagggccctcagtgctggtggctccatgaggtacttctttctgtagtgggtgtgagattcatgagtgagatgcccccagccctgctccagggcagccttgccagtttctggaatgttctccatttccagtctgcagcttccttctgcccaggagtggcttccctgtctggctgtcattcagctcaattctgtacttaacttcaaaatgtgcataaaatcctaaaatgggacgtttctcagttgacgtcctccacctccagctcctctcacatggaagcaggtgggggcctcacggtgttctagagtttgcagggggcagagagcagcatcctcaccgcagatatcctgttacaggactatgggattaagagcttgaagtttcatttaaatcacaatgaaaacaactatggcctggtgcggtggctcatgcctgtaatcctagcactttgggaggcaaaggaaggcagatcgtgaggtcaagagatcgagaccatcctggccaacatggtgaaaccccatctctactaaaaatacaaaactcagctgtgcatgtgacatgcacctgtagtcccagctactcaggaggctgaggcaggagaaccacttgaacctgggaggcagaggttgtagtgagccaagattgggccactgcactccagcctgggcaatagagcgagtctcaaaaaaaaaaaaaaaaaaaaaaaaaaaaaaaaaaaaaaacaattacaagccccaattcagcgtgctcccaggagactgtctgacttggggctctggagtttctgaggcccacagggtgagcagggaacccggccaatctctccctcctgggtccctctcaggcaggccatggtgacctggccccaggcagacgctggcagctcagaggcgtgtgggacctgcagacctcaggggttgctggacagtcctgagataggccttgcttttggccaaggcacctgaagagtgaaaacactctgtgcatagaggaacaggatggggagagcatggcaggcccttctccagttcagggccatcccctccagatccagagcaagctcgggaggggaggagtcgatgtcccaggatttgtgactcggacatcggggttgggggatgtgggtgatgttcacctgccgtggaagaacccggaggattagggtggcaggcggcagggccctgagtcaggcttgaagacktcgggtttagaggcagcgggcaacttggatggaaatggtacagacagacgctggggtgccgagatcagcaccccactcggccccccacacctccatgactaatcaaaaggttcacttctcccaatcttccagaagaagtcccggcccctgggaggctcctggtatggacccagctatgggactcaccttctggcgggcacaagggctgtgtcccagcaggcaggaccctagttcaactccttcctagtcacagggggcctggggtggccagatcagggtcttctcctccccacgcctgccctcctcagcagcccgctgccccatggcctttccctgctcctgagtggatgccacgccctctcctaggtggttctacctggacagtgacttctaacgtcagatattgcgaaggccgcctgcagggaggatggagccaacagtcctggcggtctgtccgcccagctccctcgaaggcctcctcctggcttcctgggtgaggcttgctggggagcaacgtgacatagaggccactctttggggactgctgcttgggggcctggctcctgggtacgggtgggaggcagtgacctcaca

SEQ ID NO: 723694 - DNA, 655 bp, Homo sapiens
atcagactcttttttcttggatgtattttatcaagtcactgtttctttaaaaataaaaactcaacaacaatgatcaatggtatttttctttacactagttatttttacctaaaatgggtgttggacatcttcatcattgtgcctttgcatcattatttcaatcagcttgtaaatcagctgacagcagagtagcctttgagtcacactcagcagctggactgggaaaatggcttgagtccaattgcatccagctgtggtctatacctaggttgttggtttgccctgatttgccttggacagttctagtttacacctgtggttttgctgtaattataaacaattacattcattctcaaaagtgtctctatttggataataaattatattgtcaccccagttatacctcactaataataccaggtgctaaagagattgtttktttactttgtgtaagataagaaataagtttctaaatggaaacaccatggcaaaattttctgcaataaatcaagacttggtaattcttaatgttctgagattttaataaattactctatatagaagcgatttactataaactgagtaggatagggtattttcattaccaaccatcttgatgtaaaacacttattttttttacatctttgtgaccttt

SEQ ID NO: 723695 - DNA, 655 bp, Homo sapiens
atcagactcttttttcttggatgtattttatcaagtcactgtttctttaaaaataaaaactcaacaacaatgatcaatggtatttttctttacactagttatttttacctaaaatgggtgttggacatcttcatcattgtgcctttgcatcattatttcaatcagcttgtaaatcagctgacagcagagtagcctttgagtcacactcagcagctggactgggaaaatggcttgagtccaattgcatccagctgtggtctatacctaggttgttggtttgccctgatttgccttggacagttctagtttacacctgtggttttgctgtaattataaacaattacattcattctcaaaagtgtctctatttggataataaattatattgtcaccccagttatacctcactaataataccaggtgctaaagagattgtttttttactttgtgtaagataagaaataagtttctaaatggaaacaccatggcaaaattttctgcaataaatcaagacttggtaattcttaatgttctgagattttaataaattactctatatagaagcgatttactataaactgagtaggatagggtattttcattaccraccatcttgatgtaaaacacttattttttttacatctttgtgaccttt

SEQ ID NO: 723696 - DNA, 620 bp, Homo sapiens
tcccatccccaccccatccagagtcaccactgcaaccagagtcatcaggctgttcctctgcttaaaatcatttgtcagcttccaaatgatgaagataagaatctyagatgaagataagaatccttagtgtggcctacaagggccagtatgatctgatccccttgtgtctctctagcaacattcttgccttcacctttttgcttccatcacttgggctgtttttcattttatccaaggtacccagctctctctctcctagagcctttgcgctagatgctccagtgtctggaatgtttttgcccatttgctgtcccttgctaatttctaactcattcttcagctcaaatgtcacttcctcagggaagccttccctgaccatcaggtttatactgggggaatttctcctttacgctcctaaatgtgagtttgtttgtttacttgtttttgtctgttacctccattgccttgtaagtgctgggacagcttctcattattgcatctcctggtgcttggcacatgttagacactcaataaatatgggttcaatgatgactgaaagccaggagtcatactcagacctgttgaccccacattttacgcacagcattcctcccagcccc

SEQ ID NO: 723697 - DNA, 620 bp, Homo sapiens
tcccatccccaccccatccagagtcaccactgcaaccagagtcatcaggctgttcctctgcttaaaatcatttgtcagcttccaaatgatgaagataagaatcttagatgaagataagaatccttagtgtggcctacaagggccagtatgatctgatccccttgtgtctctctagcaacattcttgccttcacctttttgcttccatcacttgggctgtttttcattttatccaaggtacccagctctctctctcctagagcctttgcgctagatgytccagtgtctggaatgtttttgcccatttgctgtcccttgctaatttctaactcattcttcagctcaaatgtcacttcctcagggaagccttccctgaccatcaggtttatactgggggaatttctcctttacgctcctaaatgtgagtttgtttgtttacttgtttttgtctgttacctccattgccttgtaagtgctgggacagcttctcattattgcatctcctggtgcttggcacatgttagacactcaataaatatgggttcaatgatgactgaaagccaggagtcatactcagacctgttgaccccacattttacgcacagcattcctcccagcccc

SEQ ID NO: 723698 - DNA, 3842 bp, Homo sapiens
tataaggaagctgtgagaactattgttaagaaatggtctcagattgtttatgctggggagcccatcacacataaaaccccatcccattagtgtgattgtctgtgaaagaaccccttaccacagatggaatacagagaagctagcagaccaaagtcacacagcaaatatgaggagggggtaccaggactccaaagccactagattgtgatggtttatagactaatgagaggtatttttcacaaacctaagcagatacacagtgctacaatattggatcacatttgtttttaattgtactacttatgtacatctgtaaaatgaagatcaaaaactacatcacgtgttcttctcaaagacagctcacacatagcttatttgaagtacagatttctgccaaaccctacaaaataattttatccctcattcaacccccccacccccatcttaaaagtgtgaagctatctaacatatgggtggctacgaggtcacagagcaaccaatgaaaagatgctgactgtatggaagcaaggaaatgtgaaatttcctatgagttccagcttgtgtccagtctctgtggttcatgtagagcaaggcaaaccctcaaagatgccttcttattgtctctcattagtagggtccagttttaggttaccctgtttttaagtctaaattttagacacctatagagaccagtcagccagacagagccttaattaaacattgtgtacctgatatctttagtcagtttgaacgactaaaaaaagttccttgctttaagttagctactgaaatctgaagactttgtggtaaatagtgggtagacaggggaaggcttaacattctgaaaatttgactcaggtaaagaaactaaaaaggagtggaaaaatcacatgtcctgtctgcccctccttttacccctctgagtcacccccattgttggttttgctggtatttttctaatttagtatgtagaaaatatgtgtttgggaatcatttgtaccatagagttgaactcctctttcaagcaggctgggaaatttcctaagttactaggctactaggtttttggtgttaggagcaagaacatggaatattttcttatttgcagctcccagtgagaaagaaaaacagtgtagctgcttcacaactgacttttagaaagagtcaaccttgttgtctatcagaaatgttaccataaaactaaactgatacattaaagagaaaatgcatataaagaaatctgtgaacaagacatttttcctcctaaaagaggagaagatcaatgtgtaaatttgctgctcatggaagctggggctttccctggttgtcagggatgaagtgttttgggatccaaactgctgatattcataatcaaagtccagcaaccatcacactgggaaagccaggatagagatgcacattatctgagcctgaaaatatcaattacagaaatgatctccaagttgaaaagccattttccaagccacctgtaacacactcacacacagcatgagaaggatgctttcacctggatcccacttctttgccaaaaacctggcattcagtaagcatccagagcagcaataatactcaccagtgaagcatgaaataggagcgacagggaaagtgacaccagatccccagttggggaaattggaaagcattaacacgtctgtatacctaacagagtacaattactacattttattttgtttcaacagccagaacccaaatgaacatcaccattcagctctgttctgggcaatgattcaagctcatctttggtacagttgattttgaagccttacagtcaatcatatctttacaatttgttcttctttcaggcttcaggcatcctcctgatttccatttcttgtatggaagccttgagtcatctgttctggcaacatgaccaacccaaatcagtcattttctccaaattatactgaaatacagatcttgctagtttgttgttttcttcctctttcttttttcacaaaatttttcctttaaggatctcctaatacaaagctgattgaaggcatacaatatcctctttcttcttctgctgtcagatccaagttttttacccacatgctgtggttctgtaattaaaacaacgaagtccacgctcaaccctgggttatgagtgcacggcttccattgtttgatggatcgtgtatcccagaccagaattctggtcctgacactacacactacacactacacctttagggcattattctgacatcatttgcactccacaagtgtcagcagttcacagaatccaaatgaaagagtggggtttcatggctctgtgatttgaattatgtagaatctataatctcaagttcacaaaattgcatgcatcttggggccattttcattgaggcaaaagagggagggaaaaccacatatcttttagagggaggaaaaacagttcaaaagagagcaagtgacacagattcttcttttaaaagcagcaaataaatttcaaggaagtgcacataagctttagctaacattctaacataaaactaacaaaagttttgcctacccaactcatatcaggtcttcaggcaatgacaatatagttttcattattcattactgagaattaattcaattaagtttctgcatatggtctttggattgatttgttaccccaaaccataccactttcattatacgctgtatggaggaattctttcaagttttcctgaacacacttttcaaactgtatgtttagtatgattttaccacaacaatgaaatttttttgggtgcaactgaaataaactacaactttgattttctaaaatacaaaaatttattgtagctgtcagtatcatttaggaggtaagtccatggctccattccctggaaagttggcagagtgctcaatgcactaaacatgttgctcagttcagcccaagaaaggccttagtgtgatatgagaaccagaaccctgatggaaaacactaaggaaagaaaaagtgaaaaagatacttgagaagcaaccaaagaggtgaatagtattggtaaaatgtgggtgttcattgccccattaatctgtaagtgaagaaacttatttataactgactatatggtaagtgtattaattttcagtgacagcagatcactttgcttataaagatgaacactttccactaggaaataataatcatcaaagggcagtttttcacttaggtgggtggcactatgaggaaaaggactccaagaaaaaaaaacaactctatttcttggactcggactgaaaaccaggaaagacaacccaatcatggagcaaaaaaagtccttcaccagaatatacctcaaaataataaaagccatccatatatgacacacccacagccaacagcatactggatggggaaaagctgaaagcatttcccctaagaacaagacaaggaacaagacaaggatggaacaagacaaggatgcccactttcaccaatcatattcaacgtagtactggaagtcctagctagagcaatcaggcaagagaaagaaataaaaggatcaaaattggaaaaggaagtcaaatgatctctcactgataawgtgattttatacctagaaaccacaaaatactcctagatttgatacatgatttcaggaatcaaaatcaacataccaaaatcagtagcatttctatataccaataataatcaacctgataaccaaatcgagaactgaatctcatttaaaatagctacataaaatacctaggaatatacttaaccaaggaggtgaaaaattctacaaggagtatttgtactttgacaaggagaattgcaaaagattgagaaaagaatcata

SEQ ID NO: 723699 - DNA, 3842 bp, Homo sapiens
tataaggaagctgtgagaactattgttaagaaatggtctcagattgtttatgctggggagcccatcacacataaaaccccatcccattagtgtgattgtctgtgaaagaaccccttaccacagatggaatacagagaagctagcagaccaaagtcacacagcaaatatgaggagggggtaccaggactccaaagccactagattgtgatggtttatagactaatgagaggtatttttcacaaacctaagcagatacacagtgctacaatattggatcacatttgtttttaattgtactacttatgtacatctgtaaaatgaagatcaaaaactacatcacgtgttcttctcaaagacagctcacacatagcttatttgaagtacagatttctgccaaaccctacaaaataattttatccctcattcaacccccccacccccatcttaaaagtgtgaagctatctaacatatgggtggctacgaggtcacagagcaaccaatgaaaagatgctgactgtatggaagcaaggaaatgtgaaatttcctatgagttccagcttgtgtccagtctctgtggttcatgtagagcaaggcaaaccctcaaagatgccttcttattgtctctcattagtagggtccagttttaggttaccctgtttttaagtctaaattttagacacctatagagaccagtcagccagacagagccttaattaaacattgtgtacctgatatctttagtcagtttgaacgactaaaaaaagttccttgctttaagttagctactgaaatctgaagactttgtggtaaatagtgggtagacaggggaaggcttaacattctgaaaatttgactcaggtaaagaaactaaaaaggagtggaaaaatcacatgtcctgtctgcccctccttttacccctctgagtcacccccattgttggttttgctggtatttttctaatttagtatgtagaaaatatgtgtttgggaatcatttgtaccatagagttgaactcctctttcaagcaggctgggaaatttcctaagttactaggctactaggtttttggtgttaggagcaagaacatggaatattttcttatttgcagctcccagtgagaaagaaaaacagtgtagctgcttcacaactgacttttagaaagagtcaaccttgttgtctatcagaaatgttaccataaaactaaactgatacattaaagagaaaatgcatataaagaaatctgtgaacaagacatttttcctcctaaaagaggagaagatcaatgtgtaaatttgctgctcatggaagctggggctttccctggttgtcagggatgaagtgttttgggatccaaactgctgatattcataatcaaagtccagcaaccatcacactgggaaagccaggatagagatgcacattatctgagcctgaaaatatcaattacagaaatgatctccaagttgaaaagccattttccaagccacctgtaacacactcacacacagcatgagaaggatgctttcacctggatcccacttctttgccaaaaacctggcattcagtaagcatccagagcagcaataatactcaccagtgaagcatgaaataggagcgacagggaaagtgacaccagatccccagttggggaaattggaaagcattaacacgtctgtatacctaacagagtacaattactacattttattttgtttcaacagccagaacccaaatgaacatcaccattcagctctgttctgggcaatgattcaagctcatctttggtacagttgattttgaagccttacagtcaatcatatctttacaatttgttcttctttcaggcttcaggcatcctcctgatttccatttcttgtatggaagccttgagtcatctgttctggcaacatgaccaacccaaatcagtcattttctccaaattatactgaaatacagatcttgctagtttgttgttttcttcctctttcttttttcacaaaatttttcctttaaggatctcctaatacaaagctgattgaaggcatacaatatcctctttcttcttctgctgtcagatccaagttttttacccacatgctgtggttctgtaattaaaacaacgaagtccacgctcaaccctgggttatgagtgcacggcttccattgtttgatggatcgtgtatcccagaccagaattctggtcctgacactacacactacacactacacctttagggcattattctgacatcatttgcactccacaagtgtcagcagttcacagaatccaaatgaaagagtggggtttcatggctctgtgatttgaattatgtagaatctataatctcaagttcacaaaattgcatgcatcttggggccattttcattgaggcaaaagagggagggaaaaccacatatcttttagagggaggaaaaacagttcaaaagagagcaagtgacacagattcttcttttaaaagcagcaaataaatttcaaggaagtgcacataagctttagctaacattctaacataaaactaacaaaagttttgcctacccaactcatatcaggtcttcaggcaatgacaatatagttttcattattcattactgagaattaattcaattaagtttctgcatatggtctttggattgatttgttaccccaaaccataccactttcattatacgctgtatggaggaattctttcaagttttcctgaacacacttttcaaactgtatgtttagtatgattttaccacaacaatgaaatttttttgggtgcaactgaaataaactacaactttgattttctaaaatacaaaaatttattgtagctgtcagtatcatttaggaggtaagtccatggctccattccctggaaagttggcagagtgctcaatgcactaaacatgttgctcagttcagcccaagaaaggccttagtgtgatatgagaaccagaaccctgatggaaaacactaaggaaagaaaaagtgaaaaagatacttgagaagcaaccaaagaggtgaatagtattggtaaaatgtgggtgttcattgccccattaatctgtaagtgaagaaacttatttataactgactatatggtaagtgtattaattttcagtgacagcagatcactttgcttataaagatgaacactttccactaggaaataataatcatcaaagggcagtttttcacttaggtgggtggcactatgaggaaaaggactccaagaaaaaaaaacaactctatttcttggactcggactgaaaaccaggaaagacaacccaatcatggagcaaaaaaagtccttcaccagaatatacctcaaaataataaaagccatccatatatgacacacccacagccaacagcatactggatggggaaaagctgaaagcatttcccctaagaacaagacaaggaacaagacaaggatggaacaagacaaggatgcccactttcaccaatcatattcaacgtagtactggaagtcctagctagagcaatcaggcaagagaaagaaataaaaggatcaaaattggaaaaggaagtcaaatgatctctcactgataaagtgattttatacctagaaaccacaaaatactcctagatttgatacatgatttcaggaatcaaaatcaacatacmaaaatcagtagcatttctatataccaataataatcaacctgataaccaaatcgagaactgaatctcatttaaaatagctacataaaatacctaggaatatacttaaccaaggaggtgaaaaattctacaaggagtatttgtactttgacaaggagaattgcaaaagattgagaaaagaatcata

SEQ ID NO: 723700 - DNA, 1284 bp, Homo sapiens
tgctgagtgcacactcagggtgctgatgaattcacattgtgggtgagaaagggcagggccgaggcctggctctgccacctgacacttgcctgtccctcaggcacatccatccagcgygccccctcttgtctgcagagtcccccagcagaaggaggtccccagtccgacacccggcacagctgcccgctcagccgggtgaaagagggcacagcccttggctgcagagatggtgaatggcatggcagggcggggtgggagtgatcagcaggacatggaaacgaagccagctctccaagagcgacctctaggggcagcaccatggtgggagatccaccaacctgcaggggcggattggaggtccctgaaaaggagagtgggaacttcccagggacgtggtgtcaagaagtcagcatcgtcaaatttattcaaaagggagaggcaacactgacagaacctgaggcttctcccatgaccactgagggactcgtgttagcccaacggacctcaagatgctcataaaaaaggcgaccctcactgaccgcagagacgcccaggctgcgcagtgtcagccctggaggagccatccagggaagcttggcgggcagtgcctgcagtagggaaggggcctcgggtactccgaccacacttccatggaggaccccgccatgtggggtgccccgcagccagtccctcgggtgcgtcagcaagcctggcctctgggacgcgtggagaagagggtgagaaacacgatgagatctggcctgtggctaaggcacagacggcaaagtccccgttctacaggaaaactggtcccagggtcgggtgggaggtgggggctccctctgcacatcctccccacacgcgattctggaaaggggtatctccacaccttactgccggcaccgcaggggtcgtcactccctgtttcggccactcaggtcccttttgtttcaggagggggtgtggctctggctgaaaggcgagtgctgaggccacagatagcaggagccatagtacggaaggagggaggagcatgctctgctgaggtcctgggctgggggttttggggggtgcatgacctctggagcagcccctgaggtgacagtggccgggggggtggggtcccagtagggagcaggggtggcaggggctggtgttggaggcaggcatgggaagcaggcaggccggtgggtgggaggggcttggagaggtcccagcagccaattcctggaaggtgctagaaggaaaacatcccagcaattcagcagatcagagggcagtggg

SEQ ID NO: 723701 - DNA, 1284 bp, Homo sapiens
tgctgagtgcacactcagggtgctgatgaattcacattgtgggtgagaaagggcagggccgaggcctggctctgccacctgacacttgcctgtccctcaggcacatccatccagcgtgccccctcttgtctgcagagtcccccagcagaaggaggtccccagtccgacacccggcacagctgcccgctcagccgggtgaaagagggcacagcccttggctgcagagatggtgaatggcatggcagggcggggtgggagtgatcagcaggacatggaaacgaagccagctctccaagagcgacctctaggggcagcaccatggtgggmgatccaccaacctgcaggggcggattggaggtccctgaaaaggagagtgggaacttcccagggacgtggtgtcaagaagtcagcatcgtcaaatttattcaaaagggagaggcaacactgacagaacctgaggcttctcccatgaccactgagggactcgtgttagcccaacggacctcaagatgctcataaaaaaggcgaccctcactgaccgcagagacgcccaggctgcgcagtgtcagccctggaggagccatccagggaagcttggcgggcagtgcctgcagtagggaaggggcctcgggtactccgaccacacttccatggaggaccccgccatgtggggtgccccgcagccagtccctcgggtgcgtcagcaagcctggcctctgggacgcgtggagaagagggtgagaaacacgatgagatctggcctgtggctaaggcacagacggcaaagtccccgttctacaggaaaactggtcccagggtcgggtgggaggtgggggctccctctgcacatcctccccacacgcgattctggaaaggggtatctccacaccttactgccggcaccgcaggggtcgtcactccctgtttcggccactcaggtcccttttgtttcaggagggggtgtggctctggctgaaaggcgagtgctgaggccacagatagcaggagccatagtacggaaggagggaggagcatgctctgctgaggtcctgggctgggggttttggggggtgcatgacctctggagcagcccctgaggtgacagtggccgggggggtggggtcccagtagggagcaggggtggcaggggctggtgttggaggcaggcatgggaagcaggcaggccggtgggtgggaggggcttggagaggtcccagcagccaattcctggaaggtgctagaaggaaaacatcccagcaattcagcagatcagagggcagtggg

SEQ ID NO: 723702 - DNA, 1284 bp, Homo sapiens
tgctgagtgcacactcagggtgctgatgaattcacattgtgggtgagaaagggcagggccgaggcctggctctgccacctgacacttgcctgtccctcaggcacatccatccagcgtgccccctcttgtctgcagagtcccccagcagaaggaggtccccagtccgacacccggcacagctgcccgctcagccgggtgaaagagggcacagcccttggctgcagagatggtgaatggcatggcagggcggggtgggagtgatcagcaggacatggaaacgaagccagctctccaagagcgacctctaggggcagcaccatggtgggagatccaccaacctgcaggggcggattggaggtccctgaaaaggagagtgggaacttcccagggaygtggtgtcaagaagtcagcatcgtcaaatttattcaaaagggagaggcaacactgacagaacctgaggcttctcccatgaccactgagggactcgtgttagcccaacggacctcaagatgctcataaaaaaggcgaccctcactgaccgcagagacgcccaggctgcgcagtgtcagccctggaggagccatccagggaagcttggcgggcagtgcctgcagtagggaaggggcctcgggtactccgaccacacttccatggaggaccccgccatgtggggtgccccgcagccagtccctcgggtgcgtcagcaagcctggcctctgggacgcgtggagaagagggtgagaaacacgatgagatctggcctgtggctaaggcacagacggcaaagtccccgttctacaggaaaactggtcccagggtcgggtgggaggtgggggctccctctgcacatcctccccacacgcgattctggaaaggggtatctccacaccttactgccggcaccgcaggggtcgtcactccctgtttcggccactcaggtcccttttgtttcaggagggggtgtggctctggctgaaaggcgagtgctgaggccacagatagcaggagccatagtacggaaggagggaggagcatgctctgctgaggtcctgggctgggggttttggggggtgcatgacctctggagcagcccctgaggtgacagtggccgggggggtggggtcccagtagggagcaggggtggcaggggctggtgttggaggcaggcatgggaagcaggcaggccggtgggtgggaggggcttggagaggtcccagcagccaattcctggaaggtgctagaaggaaaacatcccagcaattcagcagatcagagggcagtggg

SEQ ID NO: 723703 - DNA, 932 bp, Homo sapiens
actcaggatatttgcccgaaataaaggtggagaatatacctgctttaagtaaactgaagattttaaagtatagattcatatacttgacttctttaagatttttcaagaagatttagcagttcctctaatacatttaaaatatgatttgactacagaaattttgttwatattttgacatatcttttagccttctatgtgtaatcatacacaaacatgttatttacaaaaatggtattatgtagtatatgctgttttgaaaccttacacatatatctttatatttattgtggttgttattctatatcaataaaatctactttccccttaaaattttttttatctttaatttttttttagtcaagtgcagtagtgagaagtggacaaagagtagaataaggatttcgatctgtaactgactgtgaacaatcgagataactcactacttcagaccaacctactttatccttttaaacaatagcaaagtgttctaaatgtattgttgcttgttgcttacctgaccagtcccctattaagggacctttaggatgtttccagttttgcaattacagaacaatgtagtctttgcccatttgtctgattatctctaaacaagcaaggtcaaagtattataatcatctcaaagtgtgaaacattttactaaatgctatccacaaatattatacgtttattcctctccatgaatgatagtttccattttcccacattgttatcaacaatgggcattatcattattttgaatctttgtttgaactgacaagcaaatcatggtctcatttgttttatgcagatttttcattatttgtaaaaattaaacaactgtgcacttgttgttgatagatatcacaatttcatagaaaagatgaaagtcgagttagcctcaaaggatagagttttgatcagatggttttata

SEQ ID NO: 723704 - DNA, 932 bp, Homo sapiens
actcaggatatttgcccgaaataaaggtggagaatatacctgctttaagtaaactgaagattttaaagtatagattcatatacttgacttctttaagatttttcaagaagatttagcagttcctctaatacatttaaaatatgatttgactacagaaattttgttawtattttgacatatcttttagccttctatgtgtaatcatacacaaacatgttatttacaaaaatggtattatgtagtatatgctgttttgaaaccttacacatatatctttatatttattgtggttgttattctatatcaataaaatctactttccccttaaaattttttttatctttaatttttttttagtcaagtgcagtagtgagaagtggacaaagagtagaataaggatttcgatctgtaactgactgtgaacaatcgagataactcactacttcagaccaacctactttatccttttaaacaatagcaaagtgttctaaatgtattgttgcttgttgcttacctgaccagtcccctattaagggacctttaggatgtttccagttttgcaattacagaacaatgtagtctttgcccatttgtctgattatctctaaacaagcaaggtcaaagtattataatcatctcaaagtgtgaaacattttactaaatgctatccacaaatattatacgtttattcctctccatgaatgatagtttccattttcccacattgttatcaacaatgggcattatcattattttgaatctttgtttgaactgacaagcaaatcatggtctcatttgttttatgcagatttttcattatttgtaaaaattaaacaactgtgcacttgttgttgatagatatcacaatttcatagaaaagatgaaagtcgagttagcctcaaaggatagagttttgatcagatggttttata

SEQ ID NO: 723705 - DNA, 581 bp, Homo sapiens
acgggtgatgtttagaaaggcaagaagatttttgttcagaagtgtgcccagtgcaacaccatggaaaagggaggcaaacctgtaatctcagcactttgggaggctgagacaggagaattgcgtaagcccgggagatcaagaccagcctggggagcatagtggggccttatctctacacaaaacaataaaatatagctggccatggtggtgcatgcctgtgagaggctgcggtgggagaattgcttgagcccaagagttagaggctgcagtgagctgtgttcataccactgcactccagcctgggtgacagagtgagaccatgtctcaaataaataaataaatgaragaaccagcaatatttcaagcagaaaagttatagaaaaattatttcagctgggtgcagtggcttatgcctataatcacagcactttgggaggctgaggcaggaggattgcttgagcccaggagtttgagaccagcctgggcaacatagcgagaccttgcctgtactaaaaataaaaaattagccagtcatggtggtacatgcctgtggtcccagctgctctagaagctgaggtggg

SEQ ID NO: 723706 - DNA, 1681 bp, Homo sapiens
tcaagctggtcaccatgggtcatggcattgactgacaccctgggaggccaaggtaggagaatcacttgagtctacaagtttcagaccagcctgggcaacatggtgagaccctgtctttaacaaaagtaaaaaaagattagctgggcatggtggcgcatgctcatagtcctagctactcaggagactgagatgggaggattgaacccaggggtttgaggttacagggagttgtgattgtgccattacacttcagcctgggagaaggagtaagagcctgtctcttaataaataaataaataagaaatgataattaaaatattaaaaaatctgctctttgatagagaggagactcagtttttcaaacaatctgaaaactaggaaagacattataatgcaaattcctctatctcttttttttttaacaatttactcaaaaggtgaacaactcttttactatttcttgttaacactacaggaaaatattattcataagaaagctgcacaacaagaattcctgaggacaaaaagaaaaaagagaaaaccaaattctatctttgtatcaatgtattactaatgctaaaggatattttggataaaaccttataaacagattaatccaatctcaatcagctttgaccacacaagatttccatagccttttatttatttaaaaaaaaaaaatagaaactaggtcttgctgtgttgatcagggtggtctcgaactcctggcctcaagcaatcttcttgccttggcctcccaaagtgctaagattacaggtgtgagccggcgcacctggtcccataaaygtttcataacctcttacaaatctttttcactcttttttccccaactttctgtacccattcagttttatctttttttcttttcttcccttattttttcaccaatctttctgtttttattactttaatttaaaagaacctttaaataaccactaaactacacaaaattacttttccttgaacaaaaaaacacatcttcacgtttttaaaataactttccttaccaaaaacacttgctacttttcttacgtactttgtatacagaattatttctcttacatgtagtagttttaatgacgtatattaactacaactttcttagtaatgctaatttccagtgaaaaacctagtaagtaaacattttttttttgagacagatcactctgttgcccaggctcactgcaacctccgcctcctgggttcaagcgattcttgtgcctgggccacccgagtagctgggattacagatgtgcgtcactatgcctggttaatttttgtattttcagtagagacgaggtttcgccatgttggctaggctggtcttgaacttccggcctcaagtgatttgcccaccttggccttccaaagtattgggattgcgggtgtgagccactgcacttggccaagcaattttgattgtttggtatcaggtgcagagcctggcacagaggatagagcagtcaagacaatgcctggaggatttgactctttctagcatggccaggagatacagctgggtcagggaggacatactggacttggctctaccctgtagttggtggcctaagtgctgtggatatgcatatgtcttcaggcctcatcatcgccacctgtttaggccacagaatctaacaactcaaaaccaaagatgtaagct

SEQ ID NO: 723707 - DNA, 1681 bp, Homo sapiens
tcaagctggtcaccatgggtcatggcattgactgacaccctgggaggccaaggtaggagaatcacttgagtctacaagtttcagaccagcctgggcaacatggtgagaccctgtctttaacaaaagtaaaaaaagattagctgggcatggtggcgcatgctcatagtcctagctactcaggagactgagatgggaggattgaacccaggggtttgaggttacagggagttgtgattgtgccattacacttcagcctgggagaaggagtaagagcctgtctcttaataaataaataaataagaaatgataattaaaatattaaaaaatctgctctttgatagagaggagactcagtttttcaaacaatctgaaaactaggaaagacattataatgcaaattcctctatctcttttttttttaacaatttactcaaaaggtgaacaactcttttactatttcttgttaacactacaggaaaatattattcataagaaagctgcacaacaagaattcctgaggacaaaaagaaaaaagagaaaaccaaattctatctttgtatcaatgtattactaatgctaaaggatattttggataaaaccttataaacagattaatccaatctcaatcagctttgaccacacaagatttccatagccttttatttatttaaaaaaaaaaaatagaaactaggtcttgctgtgttgatcagggtggtctcgaactcctggcctcaagcaatcttcttgccttggcctcccaaagtgctaagattacaggtgtgagccggcgcacctggtcccataaacgtttcataacctcttacaaatctttttcactcttttttccccaactttctgtacccattcagttttatctttttttcttttcttcccttattttttcaccaatctttctgtttttattactttaatttaaaagaacctttaaataaccactaaactacacaaaattacttttccttgaacaaaaaaacacatcttcacgtttttaaaataactttccttaccaaaaacacttgctacttttcttacgtactttgtatacagaattatttctcttacatgtagtagttttaatgacgtatattaactacaactttcttagtaatgctaatttccagtgaaaaacctagtaagtaaacattttttttttgagacagatcactctgttgcccaggctcactgcaacctccgcctcctgggttcaagcgattcttgtgcctgggccacccgagtagctgggattacagatgtgcgtcactatgcctggttaatttttgtattttcagtagagacgaggtttcgccatgtkggctaggctggtcttgaacttccggcctcaagtgatttgcccaccttggccttccaaagtattgggattgcgggtgtgagccactgcacttggccaagcaattttgattgtttggtatcaggtgcagagcctggcacagaggatagagcagtcaagacaatgcctggaggatttgactctttctagcatggccaggagatacagctgggtcagggaggacatactggacttggctctaccctgtagttggtggcctaagtgctgtggatatgcatatgtcttcaggcctcatcatcgccacctgtttaggccacagaatctaacaactcaaaaccaaagatgtaagct

SEQ ID NO: 723708 - DNA, 635 bp, Homo sapiens
aaattcctctatctagcctctccgttaattaattcatctctttaatgtctgtaaagttttttattgaaatatcacatcttccttcccagggcactgctgtacagatttaagtaaaaatttgtggaagcttttgaattttaaacagacaaaaacagagcttctttgattataaatgatacaggggacctggcatgttcatcatatgttttatttttgtttttatataatttttaatttgttttttgagacagagtcttgctttgttgcccaggctgsagtgcagtggcacgatctcaactcactgcaacctccacctcccaggttcaagcgatccttgtgcctcagcctcctgaatagctgggactacaggcctgcaccaccacacctggctaatttttgtatttttagtagagatgaggttgggccatggttggcccaggctggtcttgaactcctggcctcgagcaatcttcctgcctgggccccccaaagtgttgggattacaggcgtgagccaccgagcctggcctattatgtactttaatatgtagtcctatttgattacataatacatatttaagtaaaccattttagctgggactgtttctgaataagaggaaacaatacattagacca

SEQ ID NO: 723709 - DNA, 1065 bp, Homo sapiens
tgcggtgtttagttttcttttcctatgttttctgagaatgatggtttccaggcttcatccttgtccctgcaaaggacatgaactcatccttttttatggctgcatagtattccatggtgtatatgtgccacattttctttatccagtctrtcattgatggggggtgttgtactttcaatcccttttttccttggtcttattttaggtatagttcttaagtgtttaagtttgttgatataaccaaatatcccctcaatttaaaaaatctataaaatggttttagtatgacctaaaaaactaccatacaaatagtatatatatagggctgtgtgtggtggctcacacctgtaatcccagcactttggaaggccaatgcagacagatagcttcagctcaggagtgtaagaccagccaggtcaacatggcaagctccgcctctactaaaaatacaaaatttagctcggtgtggtggtgcgcacttgtagtcacagctacttgggaggctgagatggtagaatcacttgaacctgtggatagaggttacagtaagccaagatcgcgcaccactgcactccagcctgtgcaacagagtaagaccctgtctcaaataaatagaaaaacatggagtgaggttgggaaatgacatttaatgcttattgagaacaatatagagcagttttttattttggttttgtcatactttgacctttgtcttttccctttgcttttagattttggctctctatttgacttggagcacgacttaccagatgaattaatcaactctacagaattgggactaaccaatggtggtgatattaatcagcttcagacaagtcttggcatggtacaagatgcagcttctaaacataaacagctgtcagaattgctgcgatctggtagttcccctaacctcaatatgggagttggtggcccaggtcaagtcatggccagccaggcccaacagagcagtcctggattaggtttgataaatagcatggtcaaaagcccaatgacacaggcaggcttgacttctcccaacatggggatgggcactagtggacc

SEQ ID NO: 723710 - DNA, 1452 bp, Homo sapiens
tgaaacatatagaaatgagtgtagttggtaatgatttcctcatgtctggcaggaggaatagtgtgccttttcaaatagtttttttgtgacttgtttgcctcacttcctgttttatgactgagagggaagagggagaagtgttccagtatcctaatttggggatatatatgtttctctgattgcatatgataacattggaagaattgttctaatatcttaattttgggatatgtatgtttctctaattgcatatgataaaatcaaacagcttttttctgtgtctatccctctgctgtcaagcagttcaaatatctaagctattttgtttgagtagttagacatccagcattgtagagaccaggtcttgtccaggttggtcttgaactcctggkcttaagcaatcctcctgccttggcctcccagagtgctgggattacaggcatgagccaccgcacctggcctaagattatccccccccccacccccaccccggaaacagagtctcgctgtgtcaccgaggctggagtacagtggcacgatcttggctcactgcaacttccgcctcctgggttcaagcagttcttcctgcctcagcctcccaaatagctgggattagaggcacctgccaccacacccagctaattttttttttggaacgaagttttgccatgttggccaggctggtcttgaactcctgacctcaggtgatctgcctgcctcaacctcccaaagtgctgtgattacagacatgaaccactgtgcctgaccctctaagattattttttaatacagattgagtatcccttttcctaaatgcttgaaagcagagtactttagatttttttcggagtttggaatgtttatatttgctggttgagttgagaatcccaaatccaaaaatcaaaatgctgcattgagcatttcccttgaatatcattcacaaagttttggatttctgtatttgggatgccaaccaacccatactgctattttttactttcttcctattttccactgctgtgttctgttgctcccatttttggtttttgaattaatcttcaggacatttttttctttctgtttttctttactatataataacagtattttcaaaccagtgatctgcttttaagcacatgttgagccactgtgcagtaaagtttaatgctcctgttttcaaaactgttgaacaactgttttgtcagaaactgaaagttatgagagtgaaatgcaaacatttttagacccatcaattttgattttgacttttaataatttaagatctaaaatgctagatagtgacatggagcttcttgtattcaagtttgtaagtcagattttgcagtcactggcatgactattttagacagttgtgctaatgctcattgtaccagaccatttctattttaatattctttagattcttcattcctgccctgttgttattgttta

SEQ ID NO: 723711 - DNA, 1452 bp, Homo sapiens
tgaaacatatagaaatgagtgtagttggtaatgatttcctcatgtctggcaggaggaatagtgtgccttttcaaatagtttttttgtgacttgtttgcctcacttcctgttttatgactgagagggaagagggagaagtgttccagtatcctaatttggggatatatatgtttctctgattgcatatgataacattggaagaattgttctaatatcttaattttgggatatgtatgtttctctaattgcatatgataaaatcaaacagcttttttctgtgtctatccctctgctgtcaagcagttcaaatatctaagctattttgtttgagtagttagacatccagcattgtagagaccaggtcttgtccaggttggtcttgaactcctggtcttaagcaatcctcctgccttggcctcccagagtgctgggattacaggcatgagccaccgcacctggcctaagattatccccccccccacccccaccccggaaacagagtctcgctgtgtcaccgaggctggagtacagtggcacgatcttggctcactgcaacttccgcctcctgggttcaagcagttcttcctgcctcagcctcccaaatagctgggattagaggcacctgccaccacacccagctaattttttttttggaacgaagttttgccatgttggccaggctggtcttgaactcctgacctcaggtgatctgcctgcctcaacctcccaaagtgctgtgattacagacatgaaccactgtgcctgaccctctaagattattttttaatacagattgagtatcccttttcctaaatgcttgaaagcagagtactttagatttttttcggagtttggaatgtttatatttgctggttgagttgagaatcccaaatccaaaaatcaaaatgctgcattgagcatttcccttgaatatcattcacaaagttttggatttctgtatttgggatgccaaccaacccatactgctattttttactttcttcctattttccactgctgtgttctgttgctcccatttttggtttttgaattaatcttcaggacatttttttctttctgtttttctttactatataataacagtattttcaaaccagtgatctgcttttaagcacatgttgagccactgtgcagtaaagtttaatgctcctgttttcaaaactgttgaacaactgttttgtcagaaactgaaagttatgagagtgaaatgcaaacatttttagacccatcaattttgattttgacttttaataatttaagatctaaaatgctagatagtgacatggagcttcttgtattcaagtttgtaagtcagattttgcagtcactggcrtgactattttagacagttgtgctaatgctcattgtaccagaccatttctattttaatattctttagattcttcattcctgccctgttgttattgttta

SEQ ID NO: 723712 - DNA, 1931 bp, Homo sapiens
gcagagtagcaagaagggttgcagagtagcaagacctaatctcaggataagtcttcagacatatttgctccacaattgcaggagatgatgaattcttttatagctgccatcaaggctttctgattgttcaccaacattctcagttgtacattcatgtatttcaatttcctcttctctttgtgccgtctaggaccataaaaagaagccaggtgacctataatctccatcatcactatagttgtcatagtaagtgcttcagtcacttgaggtctcaacactttgcctccacctgcactttatttcacctgaccaccagcaaccatctgagaaattgtgatgctactaaccaagatgtgaacaaacagaatgcacaaatgataaattggtcaaatatatgtaaccaatggagagcatggattcagttagatatgatttatgggcaaaagcaatgagaagtttactggcagaatgtaatgtaaatgcaataatccttaaaggaaacttttataatgtaagctcaagagcctcaacgttagaacttaggttttcaggtcttttctgagtatgcacacagtcctgtgsatacacatagacttctgtatgtggttgtccttcaggattcccaggaacatatcagagcttttcaaaattatgaattgaggcaaaaatccagcagccaatttgaaaaattatttatagatattatcttatttttaagttatgaaatcaagactatttacagttttagattatttacagtcatacaatcaaatgcatgaaaaataaataaagaataaaagcattctaagttttgactgtggcagaggaagaaggagatgtaggaagggaagaaagccaatgtagcaacgtgagaagacagagaaaatagtgaaggataccattttaaataaaagaatattaaaataaacactgctagcatgttcctaaatttaccattgatataagtgactgaaactaagtcaacgatcacatttcactgtatcttaaatatgacactcttaaaaaaaagtaagtataaatgtagaaagtaaagtgcaaaaatatagataaatgcaaaaaaattattttaaaaagaaaaacaacaacaacaacaacaaataacactgcagttccaacgttagtactggatgattggaactcaatccaaacctgtttaataagaccaaaaggctcaaattataatggaaaggatataaacacctatacagtggaaatatccttcatgatatttttaatgcattaaataacattgtattcaaatacactaaactaaaatctagaaatgaagggagaaattgacagaaacaaaaattatagatggaaacttgatttgtctgctaatgggaaataagtagagaaaacaagtaaatcatagataagatctgaatatggataaagtcgattcattaaagacacataaaagtttataccctgaactatcaaactagcaatgcacataaagaaaagataaaaaagaagttatatatttatgaaagggggactaaatttggtattactctccagtcataagattatttgcctaggaaacatagaaaaataaatgaaaaactatttttaaatataaaaaaatcattagcatttttagaataatttacagattaatgttaaaagaacagccaggaaaatattcacagaaaaaacataccatttacaatagaaagaagaataataagaaaggtgacataactagaaatgattactagatatctattaaagctatcaaaataaaactttaaaatttaaaattcttctagtctatattctttgttatgtgtgtccattgaagtctctgctcagttatcttaatggtcgtttaatgattggacagagatttccttaactacctgaaactaatgtcttccacagtctttgttgaggggttttgtgtg

SEQ ID NO: 723713 - DNA, 1931 bp, Homo sapiens
gcagagtagcaagaagggttgcagagtagcaagacctaatctcaggataagtcttcagacatatttgctccacaattgcaggagatgatgaattcttttatagctgccatcaaggctttctgattgttcaccaacattctcagttgtacattcatgtatttcaatttcctcttctctttgtgccgtctaggaccataaaaagaagccaggtgacctataatctccatcatcactatagttgtcatagtaagtgcttcagtcacttgaggtctcaacactttgcctccacctgcactttatttcacctgaccaccagcaaccatctgagaaattgtgatgctactaaccaagatgtgaacaaacagaatgcacaaatgataaattggtcaaatatatgtaaccaatggagagcatggattcagttagatatgatttatgggcaaaagcaatgagaagtttactggcagaatgtaatgtaaatgcaataatccttaaaggaaacttttataatgtaagctcaagagcctcaacgttagaacttaggttttcaggtcttttctgagtatgcacacagtcctgtgcatacacatagacttctgtatgtggttgtccttcaggattcccaggaacatatcagagcttttcaaaattatgaattgaggcaaaaatccagcagccaayttgaaaaattatttatagatattatcttatttttaagttatgaaatcaagactatttacagttttagattatttacagtcatacaatcaaatgcatgaaaaataaataaagaataaaagcattctaagttttgactgtggcagaggaagaaggagatgtaggaagggaagaaagccaatgtagcaacgtgagaagacagagaaaatagtgaaggataccattttaaataaaagaatattaaaataaacactgctagcatgttcctaaatttaccattgatataagtgactgaaactaagtcaacgatcacatttcactgtatcttaaatatgacactcttaaaaaaaagtaagtataaatgtagaaagtaaagtgcaaaaatatagataaatgcaaaaaaattattttaaaaagaaaaacaacaacaacaacaacaaataacactgcagttccaacgttagtactggatgattggaactcaatccaaacctgtttaataagaccaaaaggctcaaattataatggaaaggatataaacacctatacagtggaaatatccttcatgatatttttaatgcattaaataacattgtattcaaatacactaaactaaaatctagaaatgaagggagaaattgacagaaacaaaaattatagatggaaacttgatttgtctgctaatgggaaataagtagagaaaacaagtaaatcatagataagatctgaatatggataaagtcgattcattaaagacacataaaagtttataccctgaactatcaaactagcaatgcacataaagaaaagataaaaaagaagttatatatttatgaaagggggactaaatttggtattactctccagtcataagattatttgcctaggaaacatagaaaaataaatgaaaaactatttttaaatataaaaaaatcattagcatttttagaataatttacagattaatgttaaaagaacagccaggaaaatattcacagaaaaaacataccatttacaatagaaagaagaataataagaaaggtgacataactagaaatgattactagatatctattaaagctatcaaaataaaactttaaaatttaaaattcttctagtctatattctttgttatgtgtgtccattgaagtctctgctcagttatcttaatggtcgtttaatgattggacagagatttccttaactacctgaaactaatgtcttccacagtctttgttgaggggttttgtgtg

SEQ ID NO: 723714 - DNA, 1931 bp, Homo sapiens
gcagagtagcaagaagggttgcagagtagcaagacctaatctcaggataagtcttcagacatatttgctccacaattgcaggagatgatgaattcttttatagctgccatcaaggctttctgattgttcaccaacattctcagttgtacattcatgtatttcaatttcctcttctctttgtgccgtctaggaccataaaaagaagccaggtgacctataatctccatcatcactatagttgtcatagtaagtgcttcagtcacttgaggtctcaacactttgcctccacctgcactttatttcacctgaccaccagcaaccatctgagaaattgtgatgctactaaccaagatgtgaacaaacagaatgcacaaatgataaattggtcaaatatatgtaaccaatggagagcatggattcagttagatatgatttatgggcaaaagcaatgagaagtttactggcagaatgtaatgtaaatgcaataatccttaaaggaaacttttataatgtaagctcaagagcctcaacgttagaacttaggttttcaggtcttttctgagtatgcacacagtcctgtgcatacacatagacttctgtatgtggttgtccttcaggattcccaggaacatatcagagcttttcaaaattatgaattgaggcaaaaatccagcagccaatttgaaaaattatttatagatattatcttatttttaagttatgaaatcaagactatttacagttttagattatttacagtcatacaatcaaatgcatgaaaaataaataaagaataaaagcattctaagttttgactgtggcagaggaagaaggagatgtaggaagggaagaaagccaatgtagcaacgtgagaagacagagaaaatagtgaaggataccattttaaataaaagaatattaaaataaacactgctagcatgttcctaaatttaccattgatataagtgactgaaactaagtcaacgatcacatttcactgtatcttaaatatgacactcttaaaaaaaagtaagtataaatgtagaaagtaaagtgcaaaaatatagataaatgcaaaaaaattattttaaaaagaaaaacaacaacaacaacaacaaataacactgcagttccaacrttagtactggatgattggaactcaatccaaacctgtttaataagaccaaaaggctcaaattataatggaaaggatataaacacctatacagtggaaatatccttcatgatatttttaatgcattaaataacattgtattcaaatacactaaactaaaatctagaaatgaagggagaaattgacagaaacaaaaattatagatggaaacttgatttgtctgctaatgggaaataagtagagaaaacaagtaaatcatagataagatctgaatatggataaagtcgattcattaaagacacataaaagtttataccctgaactatcaaactagcaatgcacataaagaaaagataaaaaagaagttatatatttatgaaagggggactaaatttggtattactctccagtcataagattatttgcctaggaaacatagaaaaataaatgaaaaactatttttaaatataaaaaaatcattagcatttttagaataatttacagattaatgttaaaagaacagccaggaaaatattcacagaaaaaacataccatttacaatagaaagaagaataataagaaaggtgacataactagaaatgattactagatatctattaaagctatcaaaataaaactttaaaatttaaaattcttctagtctatattctttgttatgtgtgtccattgaagtctctgctcagttatcttaatggtcgtttaatgattggacagagatttccttaactacctgaaactaatgtcttccacagtctttgttgaggggttttgtgtg

SEQ ID NO: 723715 - DNA, 583 bp, Homo sapiens
tcagttcacacaagtatggaaatcttaatggcataatctaatagcagggagcagtctaggaattcaccccatgtgacggttaattttacatgtcaacctgactaagctatggtgcccaggtgtttggtcaaacaccaatctagatgttgctgtgaaagcatttccttgaatgtgattaacatttaaataattagaacctgaatcaggcaaactaccttctgcaatgagtgggccttacccaatcatttgaaggcctcatgagcaaawgaaagagatcctttggaggcagaagaaaactggcctgcagactgccagactgccttcagacttgagccaaaactgcaactctccaggatttctagactttccatctgtgcaaactttataataaatctctctctctctctctctctgtctatatatatataaatatatatacacacacacatatatacctatatgtatatatttatgtgtgtatataaaccaagaaatgtaaaaaataacaaattttattgattagatatctgctatactcactctgacagaagctttagctgctttattgaaatttcaagattat

SEQ ID NO: 723716 - DNA, 540 bp, Homo sapiens
gacatcagatttgggaggggccaggggcagaatgatatggtttggctgtgtccccacccaaatctcatcttgaatagtagctcccacaattcccacatgttgtgggagggacccactgggaggtaattgaatcatgttkgtggtttcccccatactgttctcataatactgaataagtctcatgggatctgatggtttcataacgggtttccccttttgcttggttctcattttttctcttgtctgcccccatgtatgacttggctttcaccttccacaatgattgtgaggcctccccagccatgtggaactgtgagtctattaaacctctttttgtttacaaattacccagtcttgggtatgtctttatcagcagcatgagaacagattaatacagtgccatttagaagtataatgttttctactctgtatttttatttcaatgttatcagaaaataaattacaaattatttataaattccaccatttaatttttttgttttcattatataaagtatgtggaggaagtattgtgttctg

SEQ ID NO: 723717 - DNA, 610 bp, Homo sapiens
ctttacaagcccttatagaaattcaaagtaagagcaatgacaacatctagaactttaaaagaaactgtatttattagaaaaaaagaaaggagatacaaactgagcagggggtaggaagaggagcaagaagaactaaggggaggagcaatgagctyttctgaaagggcagactccagaaaaggaacaaaactgctgcagacttgaaagcaccactgtctatattattgtctgagtcttggaaatcttatgttgagtacaataagcttcatttatataaaattctaaaataaatctatggtgaaaaacatcagaagattgctcttagggaacttcctgggatgatggtaattttctctaccttgatagaggtttgggttacacaggtctatgtatttaaaatatgcttactattccattccacttcaaaagacatattgaaatgtagttgataatatgcttgctaaagtgtttaggggaaagcatcctgacatctgcaatttactttaaaatgtacaaaaaactaagatgaagtatagaaaaatggagggatcgataaatggataggtttgtgaaaaagcaatatagaaaaatgttcatgttagagtctagg

SEQ ID NO: 723718 - DNA, 610 bp, Homo sapiens
ctttacaagcccttatagaaattcaaagtaagagcaatgacaacatctagaactttaaaagaaactgtatttattagaaaaaaagaaaggagatacaaactgagcagggggtaggaagaggagcaagaagaactaaggggaggagcaatgagctcttctgaaagggcagactccagaaaaggaacaaaactgctgcagacttgaaagcaccactgtctatattattgtctgagtcttggaaatcttatgttgagtacaataagcttcatttatataaaattctaaaataaatctatggtgaaaaacatcagaagattgctcttagggaacttcctgggatgatggtaattttctctaccttgatagaggtttgggttacacaggtctatgtatttaaaatatgcttactattccattccacttcaaaagacatattgaaatgtagttgataatatgcttgctraagtgtttaggggaaagcatcctgacatctgcaatttactttaaaatgtacaaaaaactaagatgaagtatagaaaaatggagggatcgataaatggataggtttgtgaaaaagcaatatagaaaaatgttcatgttagagtctagg

SEQ ID NO: 723719 - DNA, 610 bp, Homo sapiens
ctttacaagcccttatagaaattcaaagtaagagcaatgacaacatctagaactttaaaagaaactgtatttattagaaaaaaagaaaggagatacaaactgagcagggggtaggaagaggagcaagaagaactaaggggaggagcaatgagctcttctgaaagggcagactccagaaaaggaacaaaactgctgcagacttgaaagcaccactgtctatattattgtctgagtcttggaaatcttatgttgagtacaataagcttcatttatataaaattctaaaataaatctatggtgaaaaacatcagaagattgctcttagggaacttcctgggatgatggtaattttctctaccttgatagaggtttgggttacacaggtctatgtatttaaaatatgcttactattccattccacttcaaaagacatattgaaatgtagttgataatatgcttgctaaagtgtttrggggaaagcatcctgacatctgcaatttactttaaaatgtacaaaaaactaagatgaagtatagaaaaatggagggatcgataaatggataggtttgtgaaaaagcaatatagaaaaatgttcatgttagagtctagg

SEQ ID NO: 723720 - DNA, 773 bp, Homo sapiens
aaaaaatataacagtactaactaaaacacttttctaattgaaaatgtcattacagtcaacattttcagaaaacaaaacccagtaacaattctaaaaaatcacacatacacactccagttttcttagtaaccaaaattctggaagtttatgtgatgttttcacaatcattcaagctatggcaagcctactgtaacatttcttttactttaaaaaattaaaaataattttaacatcatataatttataatacatgttgaaaatgatttgccaattccccaaggtgtaacttaaaaccttccaaggttacataggggaggaagtccatcattaatttttctattccagagactcagtttggatgcccgtgtgtgggcttctaaagctgagcacaacctgtgaactagagaaatgggccagcagtcctccttgtgtggcttttagttatccttgtgacactcagaagcattctctctttaatttcagtaaagttacatgataaatgacttccacattcagaaactgatgtgtcaactcttaatttatctttaaagttatctttaaagaccttactaaaaacatgtccatattaacagtctttaaaaaaaaragtatattaccagggtttcaagtagactttagatgcacattttcacataaacctaaattcaacagtagctctgacgttgagatttgagtaatgcacgttgtgctttttatcttcaaagaatatattctctgacctacctgtagttacgaaaatctttcaaaatcaa

SEQ ID NO: 723721 - DNA, 671 bp, Homo sapiens
ccctttactaaatatatatatatactacatcctatactagcaacatcagactatcagtttcttagttaataatctcttaatggtgcttttcaatggtaagtacttaaactttcttcaacacacacctatgaaaaattgtagtcttccttaacaatggtcttatttacacagcaagggatatcaacattgaaaatgagcacaaaaataaataaagtcttagccatgccattgtgcaagaaattactcaagtgaatgatcaatagaaatttgtttccaacacataagctgattgttaaaactgaataagcacttagagaaagctaggtattgaataaatatgaacaagaatattaaattatccctgttacactgcaggaagatttgacaataaggatttaccttccccaaatatttggagagcakaaactgattaaaatgaaaataaagcacaaatataaataaacagcaaaacaaggaagtatgcaacatataatattagaggtttgggggccatatttggaaatttccgtgagttttatcagcacttctattggcaatattcagaaaacaaagacatagacttttcaaataatacactattcatgctagaaatagcccttattttctattttcataaaggaagtcacctattttaaaatattttcattgca

SEQ ID NO: 723722 - DNA, 626 bp, Homo sapiens
tcctttgatcatttcgcatgaattaaatataatatacacctaatgtaaattaattccttatatgcatacaggatgctatcagcttgccaagcctgggttataatgtgctaataaacaatctgaaaatctcagtggctcacaacaaaagctttgtttcattgtacttttactctctatcccacatccgtcccacaagcctattatggttctgctcagcgttatcttaacagcattcagactgacaaagtaacctttatctasaatgctgttcacctcccagtgaagcacactctagcttaaagttgccacttgaaagtgacaaacatcacttttgttcacattttcttggccacacaaaacaagccttattgccaaatctgacatcaatgggattagaatatataatctttccacaggcagacacacaagaaggggcacagcagggaggacagaaaacacattgtgtcatgtcatatcatagttctactctcttgttcacgaatatttaacatcttctgtccatgtacaaaacacaataattcccctcctatctccataaggaggcaattcaaagattcatcatctggtcaaagcatgagactcaaactcttatgagagtttcaaca

SEQ ID NO: 723723 - DNA, 626 bp, Homo sapiens
tcctttgatcatttcgcatgaattaaatataatatacacctaatgtaaattaattccttatatgcatacaggatgctatcagcttgccaagcctgggttataatgtgctaataaacaatctgaaaatctcagtggctcacaacaaaagctttgtttcattgtacttttactctctatcccacatccgtcccacaagcctattatggttctgctcagcgttatcttaacagcattcagactgacaaagtaacctttatctacaatgctgttcacctcccagtgaagcacactctagcttaaagttgccacttgaaagtgacaaacatcacttttgttcacattttcttggccacacaaaacaagccttattgccaaatctgacatcaatgggattagaatatataatctttccacaggsagacacacaagaaggggcacagcagggaggacagaaaacacattgtgtcatgtcatatcatagttctactctcttgttcacgaatatttaacatcttctgtccatgtacaaaacacaataattcccctcctatctccataaggaggcaattcaaagattcatcatctggtcaaagcatgagactcaaactcttatgagagtttcaaca

SEQ ID NO: 723724 - DNA, 819 bp, Homo sapiens
tctggggtgaaaggcaagccccttttctctgtggcttctttgccactgcctcaccccaccctggaccctgacctccgaggttttgacccaggccccacacctaatatagatttcgctttgttgttgctgactatgagctctgactctgattagcctgaaaatagcaaatctagaacaagtggctgcctctatgctcctgccaaaattagacatagaacttttagacttgaggacaagatcaccataaaaattgctgcatgacttgtcatatacttgatataaattatgcaattttatataagttatattaagtttgccaagtcattatcaaaayattagtctaaacatcttttgtatgtactaaataaggtttcgtttctcagatctaacactggctcagagctataatgttcaataaaggagcctctagctcagggggctcttgaatgcttcaaatgtggctagtataattttgatcttatttaattttaattttaattgagatttaaattaaaaactggtattgctttcagttttggggaaattttaagtaattttggaacaactcaggtatgtaaatctactttttctgctgtatgttttatgaaatctaaatgcagaaaaatatttgtgatattagtattaagatgtgctgtaagggtaaaatacacattgcgttttgaagactcagtacaaaaaaaaagaatgtaaaatatctcactaatagtttatgttgttcacatcctgaaataatattttgtgtacattgggcaaaaattatatagtacaaaagtcagttttatctgtttattttcacct

SEQ ID NO: 723725 - DNA, 1352 bp, Homo sapiens
tggcagctgattagatggtgcccacccagattgagggtggttctgcctctcccagtccaccgactcaaatgttcgtgtgtgtgtgtgtttgtgttgttttgttttgttttgttttgagacagagtgtcgctctgccacccaggctggagtgcagtggtatgatctcggctcactgcaatctctgcctcccaggttcaagtgattctcctgcctcagcctcccgagtagctgggactacaggtgcacaccaccatgcccgactaatgtttgtatttttagtagagatgggatttcaccatgttggccatgctggcctcaaactcctgacttcaggtgatccaccagcctcagcctcccaaagtgctgggattgcagacacgagccaccacgccctgcccactgacgcaaatgtgaatttcctctggcaacactctcacagacacacccagaaacaatactttgcatccttcaatccaataaagttgacaccttgtattaactatcacagtcactaaaagtaatccatttgtgtgattttaatgctttcattttttaaaataaaatctatacttttgtaattgtatgtacatatattttgctggcaagttataagaatcgcttgaaagtagttataacttcactagaaaatagcagttgcttaaaaatatctgctgtttaaaaggtgggaaaaagtrgtataaacaatatacccaactgaaaattatgacagcgtctaaagatggttcccataaaatcagaaacttcagtgtcatttccgagaatgattaaactttaacttaatgaaaaaggaaagagttatttctgatattcagaaaaaaataaagttcagaggaagatctgaaaagttgatttaaaaaaaacataaaagtgaccattctgattggaaaaaaagattaaacagtactattaatataaacatgtttttgttaaagaaatacattaattttttttcaggccaattttacaatgaacatatatcatttacccagtggaaatttatttttgttttagaaaaaagggcatgcaattatacattcatactggaaaacctttatactaaaaacaaaagagaggtaagatgtaaaaacatagtatattagatttcttgaacaaagttctgtaaatactctgttgtcaattaaaataaaaaaggttagatgtgtaaataattatttaaacattcttgtaagccatcagattgtctagtatatgttgggtaaaaaaaattaaacatactaagtatccgataaatcaaagaaaacgtatattgaatataaattacttaaatttacagataaagaagttaaaaatgctaaaattgtcacaaattt

SEQ ID NO: 723726 - DNA, 814 bp, Homo sapiens
catttcaaatttttataactattgtttctttttcttttttaatctttggcccataccttcagtattaggttcaataataactatcctagctgatagcattcttgtgcattgagattttaccctactcaaaataagtttggcagaaaagagctagaagtaaaagaactttcacacacaaaaaaaaaacaatgcaagataataacttagcctgccactgtttttatgggtgctgacagaagacgcaacagtcctggttcagagacaaagcaatttattattcataataatagcagtagctggagtattagtgtaattacactagttccccaaaccgcaaatctcagactgtgtcataagtgacaggtggaggcttcacatacaataggatgctccaaatgagaggaatcctatgtctagtgaagctgccacttttttagcaagcagtggggaagactatactttgtctgcagggagatcaggtgcattgcagaactatgtgatttacgtctgcaaggcattatttcatttttcaaaatttccagctgcataaacaagactgaaaaatagcccaggtgaataaacaaggctttgcaattttgacatactcagcaagatgcttaatagagcccatggctttacaacactatgctattgctggtcttacatggaattatataaaattaaactatctgctaartatgatgttaagcttttgctaagctttttgtcatatatactctataatttaggatgtttctttgtatttctttttaagagatttatcataaggagatgctgaattttttaagtccat

SEQ ID NO: 723727 - DNA, 636 bp, Homo sapiens
cattgaaaaaagtgtatcactgatttttttccaccaggcatggtggctcatgcctgtaatcccagcacwttgggaggcagacgcgggcagcttgcttgagcccgggagttcgaggccagcctgggtaatgtggtgaaagtctgtctctacaaaaaatacaaaaattagcagggcatggtgacacatgcctgtggtcccagctactcaggaggctgtgatgagaggattgcttgagcccaggtatttgaggctgcagaatgagccatgatcatgccactgtactccagcctgggtgacagagtgagaccctgtctcaaaaacaaacaaagaagtatcatttttttgtttcttatatcaaaataaattccaattggatcacaaacttaagtgtgtcaaaaaacaaaattacaatgaacttaaagatctcggctgactttattgcaattctaaactcaagcaactcttctttccataaactagaaaaagtgttccaatgagctgaatagaggaggttgattttacagacagaaaagggctgaaaaaagcagaagcaaagaacaaaacatagattggtcatttcaaaattacttttcttgtggggcaggaacagaaaaacagaacaatagagaaataacc

SEQ ID NO: 723728 - DNA, 636 bp, Homo sapiens
cattgaaaaaagtgtatcactgatttttttccaccaggcatggtggctcatgcctgtaatcccagcacattgggaggcagasgcgggcagcttgcttgagcccgggagttcgaggccagcctgggtaatgtggtgaaagtctgtctctacaaaaaatacaaaaattagcagggcatggtgacacatgcctgtggtcccagctactcaggaggctgtgatgagaggattgcttgagcccaggtatttgaggctgcagaatgagccatgatcatgccactgtactccagcctgggtgacagagtgagaccctgtctcaaaaacaaacaaagaagtatcatttttttgtttcttatatcaaaataaattccaattggatcacaaacttaagtgtgtcaaaaaacaaaattacaatgaacttaaagatctcggctgactttattgcaattctaaactcaagcaactcttctttccataaactagaaaaagtgttccaatgagctgaatagaggaggttgattttacagacagaaaagggctgaaaaaagcagaagcaaagaacaaaacatagattggtcatttcaaaattacttttcttgtggggcaggaacagaaaaacagaacaatagagaaataacc

SEQ ID NO: 723729 - DNA, 636 bp, Homo sapiens
cattgaaaaaagtgtatcactgatttttttccaccaggcatggtggctcatgcctgtaatcccagcacattgggaggcagacgcrggcagcttgcttgagcccgggagttcgaggccagcctgggtaatgtggtgaaagtctgtctctacaaaaaatacaaaaattagcagggcatggtgacacatgcctgtggtcccagctactcaggaggctgtgatgagaggattgcttgagcccaggtatttgaggctgcagaatgagccatgatcatgccactgtactccagcctgggtgacagagtgagaccctgtctcaaaaacaaacaaagaagtatcatttttttgtttcttatatcaaaataaattccaattggatcacaaacttaagtgtgtcaaaaaacaaaattacaatgaacttaaagatctcggctgactttattgcaattctaaactcaagcaactcttctttccataaactagaaaaagtgttccaatgagctgaatagaggaggttgattttacagacagaaaagggctgaaaaaagcagaagcaaagaacaaaacatagattggtcatttcaaaattacttttcttgtggggcaggaacagaaaaacagaacaatagagaaataacc

SEQ ID NO: 723730 - DNA, 636 bp, Homo sapiens
cattgaaaaaagtgtatcactgatttttttccaccaggcatggtggctcatgcctgtaatcccagcacattgggaggcagacgcgggcagcttgcttgagcccgggagttcgaggccagcctgggtaatgtggtgaaagtctgtctctacaaaaaatacaaaaattagcagggcatggtgacacatgcctgtggtcccagctactcaggaggctgtgatgagaggattgcttgagcccaggtatttgaggctgcagaatgagccatgatcatgccactgtacwccagcctgggtgacagagtgagaccctgtctcaaaaacaaacaaagaagtatcatttttttgtttcttatatcaaaataaattccaattggatcacaaacttaagtgtgtcaaaaaacaaaattacaatgaacttaaagatctcggctgactttattgcaattctaaactcaagcaactcttctttccataaactagaaaaagtgttccaatgagctgaatagaggaggttgattttacagacagaaaagggctgaaaaaagcagaagcaaagaacaaaacatagattggtcatttcaaaattacttttcttgtggggcaggaacagaaaaacagaacaatagagaaataacc

SEQ ID NO: 723731 - DNA, 3453 bp, Homo sapiens
atgtgagctgaatttggccctaaactaagtcctggtggctaatgagccatgagccaaggctgagaagtggggtggcttgtgccctgcagtcgtgagaaaaggcacagggcagctctacgtggacttgggcttagcatctctgggttgctcagagggcaaagtgtcctgagggaggtaaattgtggtaaaacagtttaaaaagtgagaggaatgggagaggtgaagcttaattcctgctggttccacggtgatgctataatgcttaggagttgaaaaacgatttctctagcccataggaactcaaactcactgaaagagaaaaaacttggcattgctttagcaaaattcaagtagatgctacattccactggaataatctagaatgcatgtgctagtttcttctatactgcaggtcgcattctctggcaggcctgcttcacttggcagcaacacttttaaagagaaacggctacatctccaggttctgtgccccgggcttgcagagaaaaggaataaaattaaaacagtatttgaacttttaaaaatatttaaattgctggctcatttcagactggcgtttcttaaaataatggtctctactcaccaagccactgccaagggacccacggtggctgtcctgtatccttgggttcaattagaagaactctccttgctcatcaaggcttttcatagctgtctttcccatttatcctccacacctgtgaacttctgtcataagttctagtccagcccatcatctcgctggttccactggacaccaggcactatacttaccttttcttttcttttctttccttttcttttctttctttattttctttctttctttctctctctttttctttctctctctcccttccttccctccttctttccttctttttttttttttttgagatgggccctcactctgttgcacaggctggtctcaaacttctgggctcaagtgatccttctgcctcagtctcttatgtagctgggaccacaggtccaaaggcatatgccatcacatctggctaactttttgcttttgtgtagagacggactctcactttgttgcccaggctggtctcgaactttcaagccatcctcccacctcggcttcccaaagtgctgggattgtaggcgtgagccaccatgctctacctgtacttgcttctatttttgcattctgttagattgtgtccttcatgacgtaaagaatgcacacccagtagaatgcatttctattcttgcatgctactttgcattcttgtttacaaagcttcccctaacttcctccctccttctccacctgctcaaatatgtcaatattcagacttggacccagcccttctgttgctgactgttctggtggcaggcccttctccctgccaaacaggacctcagtgctgtttaggggtccagctctctccagctaaggggaaggtgacctggccacagctcaagataatttccaacttctaagtcaattatcatggtcccatcccctgaccatgactagctggggtgggcaggctggttggtttgtagaacatccttcaatttccaacttccaattcaatttgcctggttgtttcctcattcctcgtgattagattcagcttaaacaatttgaggtcggaatatgaataatctcttgattaaccgagagggtaactggtatttataattcctgaatcctttaaagtgtgaggagagccatagaatccatgtccttggggacatcttgtttatttttatttttacttttattttaggttggagggtacacatgcaggcttgttacatacgtaaactcgtgtcacgagggtttgcgctactggttgtttcgtcacccaagtatggagcctagtacccaatagttatcttttctgatcctttccctccttccatgttctaccctcaaataagccccagtgtgtgttgttcccctctacgtgtgcatgtgttttcatcatttagctcccatttataagtgagaatatgtggtatttggttttctgttcctgcattagtttgctaaggataatgacctccagctccatccatgttccttcaaaagacctgatctcattctttttttgtagcttcatagtattccatgccgtgtgtatatgcaccacattttctttatccaatctgtcactgatggacatttaggttgattctatgtcttagctattataaatagtgctgcaacaaacttttgagtgagtatgtctttatggcagaatgatttatattcctttcggtatacacccagtaatgaatgggactgctgggttgaatggtagttctgtttttagctctttgatgaatgaccacactgctttccacaatggctgaaccaatttacactcccaccaacaatgtataagcatttgcttttctctgcaaccttgccagcatgttattctttgactttttaataaaaacctaacattccaacaggtgtgagatagtatctcattgtggttttgatttgcatttctctaatgacaatgatgttgagctttttttcatatacttgttggtagcatgtatgtcttctttggtaaaatgtctgttcatgtcctctgggggcatcttttttataagcgagttkctcaaatatataccagacatgggaatcctgtgattttgtgtttctcgtccaaactagtgaagccacttgcattaagagaggcccttacctctccaggcccttggcagtcctgcattatccacacattgcccaacccggggccccacagttaggcctgtgctgctgccagggattgctgtgggtggagatggcaagggcctgacagatgcctacgttattgccaccacccccagggcaagtttctccagggattcagcagaggctcagcttgtagcctcaagggctctctggctctacctcctttctgcctggaggatcgtagccctggccctcaaaaggctgaatgtggaggggaatggggccaggcacttttatagtacatcacataggcacaggataaatgttttgagggaatcaggagtaaggaggtagaaagagctttagtgataattgactgtttttcagatcaatgccatgaaataatacaaacagcaagaggatatctcattgttattattttgcttaccaatattctagagctttaggcaaaattgcaaaggagctattatttttctttggtgtcttcaagcctccccttctagtccctcactattgtccttccttagacttctagagctcaaaatggcttctatcaggaattagcttcggtttctttgttcacaccaaagtgtatatggctaataacattttaaagtgttacttctatggagatgttggcattttgccaggttcaacagccaatagaagaaatgcagcttaaaattccttgcatctgccagatggggaaaatatgtgactctgta

SEQ ID NO: 723732 - DNA, 2902 bp, Homo sapiens
atcaagtatctcagtttctggttagagcaatattattttcactctttcattaatttctggtttattttattttaggtgctagagatgacactgcagagtagagaacaaaggaatcttagtaattgttcaatccaatctccacactttaaagatgaagaaactggtattgagaaaaatacacagcttatccaaggttgcactgctggttggtagctgagatgaatttagaacccacatctgatgactacaccatattgctcccagttttcctgtctgttccacatgtaaaagtctgactcttcacttctcctttgagtatatagacttttaacatttttgtatgtcaagatggacttttcctcatacccagcccctgccttttctcctcccttcataccttgcaggatctttaacagaatttaaaaggagttttttgttttgttttgatgtatctaataaaagtcaagggagggagagggccagtataagcaagagtacagtttcctagtttgtagatgcggtagtctgaggaatcagaaacacacaaaggtttggagaactggtacatgctcccaggtgggaagccaggactcttggtaggatcttgaggacaaggcaaaggacaataagagagcgaggggatcctagaggtggaatcaaggaagagaaactagagagagaaaaaggaactggctatccatccatgatggatcctgtgtggactgatgggtggcttggcatcatcctttagtagacttcatgtggttgaataattggccaatggaaggaatttcttttttggtaacagactctgtgtgtacagttatgggtcttaatttataataaaaggttacattgaaaattgagcatattggcaactttgggctttaatattactactgtgctatttaggtcccaaccatcctagctaatctgggcattcttgaaacagctctcattattggtatgtcaaaccgtctcatagggcatgtacttaacaaaagtggagtgaagggttcaggatgcataaatggggtgaagctcgtggtattccattcctttttactgaagccactcctaccagctgccttctagattgttcaccttatatgagcatggtgcagtatagaagttgtagactttggcctcagacagatctaaattctaatctcagatcactacttcctggttgaggacaagatttctttaaccaccccaagtcccaattttctcatgtctaaaatggcagaaataatgtgtactttgcagggttgttgtgagagttaagtaatatgggtaatgcacttgggacagtgcttcacacaaaattgtcagtaaatggtgatctttcttttcctggcactacaaagctgaggagaggagggagggagggagatgaatgtctggaggaagaaagggcaggagtttcttcatctttgagtgaaggagcattgagggttagcagggatataggaatagtgagttggctgggaagaaaaaaaggattaaaagaggaaaagaataggaaaaaagaaggataccatggagaaaatgggcaacggccccagaaagaagagcaagaatggcagtgatggtgagcattgctggaatgatggaaggttctccggccccggtgatgcgtgggcaccaccggagagcttgttagaaatgcagagtctctgtccctccccagaccctctgaatcataatttgcaatttaatgagaggtccccaggtgattcccatatccattaattctgcagagttgatgttttcatctgcggtggcggggggcgggggggggsggtgcggtgggggtgcggcaggtgttcagcagattcaaatcaagaggaagtccccaagggctttaggttatctctaaatttatcaggaagacttcccatcgaagtgggttgagatccaggatgtgtcactttcctttgtattctgatctggctggtctggacagaggttctgcaaaccagagtcatgctgtggactcagggattcttggaacttctcgtctgaatccaaagtagcaggtgtgaaggaacaaggaagtggagtggtgaacattatttgtctatagaggaaacaggaagagaatggggattcttcttttagacacatctggcaagtgaggcagtcatcctgcaccgcaccctcctccctgcgccttcagctcccggtgccctaccttttctctgagcaacagaagcacttttgtctgcatttaggttgctcatcactggtgcattggaaagaacactgggctaatgccttcgggcaagccacttcaccaccctggctccagtctcctcatatgcaagaagggcttaaaattgtgatggtaggtgcccagggtttcccagtgcagtggggactggaactgtggtcttctggtgactgtttctaccttatggtactctcaagtcagcaggtagccaggtgataaaagggaaagaagctgctgggtgtaaaattaaaaagcggccctcccctggggccagcgggagcgcagaaacagttgctgttcagtcttgccacttgtcagcatgagggaatttgggcccaggatagccagacaatctttttttccaagaaaaactagaagtccagacttttctgttagattttcttagttttttttagagactctgaattcattaaacacacacacacacacacacacacacacacacacacacacacacaaaatgagaaaacctgctgctcatacaaaacaaatctgagggcagagttttgaagactggcagtgaattcattgaaaaaaacaaaaacaaaaacacaatgaaaaaacctgctgctcatacaaaacaaatctgagggctgcagcagctcacaggatgccagtgtgtgacgtctttcctaagtcttttaa

SEQ ID NO: 723733 - DNA, 2902 bp, Homo sapiens
atcaagtatctcagtttctggttagagcaatattattttcactctttcattaatttctggtttattttattttaggtgctagagatgacactgcagagtagagaacaaaggaatcttagtaattgttcaatccaatctccacactttaaagatgaagaaactggtattgagaaaaatacacagcttatccaaggttgcactgctggttggtagctgagatgaatttagaacccacatctgatgactacaccatattgctcccagttttcctgtctgttccacatgtaaaagtctgactcttcacttctcctttgagtatatagacttttaacatttttgtatgtcaagatggacttttcctcatacccagcccctgccttttctcctcccttcataccttgcaggatctttaacagaatttaaaaggagttttttgttttgttttgatgtatctaataaaagtcaagggagggagagggccagtataagcaagagtacagtttcctagtttgtagatgcggtagtctgaggaatcagaaacacacaaaggtttggagaactggtacatgctcccaggtgggaagccaggactcttggtaggatcttgaggacaaggcaaaggacaataagagagcgaggggatcctagaggtggaatcaaggaagagaaactagagagagaaaaaggaactggctatccatccatgatggatcctgtgtggactgatgggtggcttggcatcatcctttagtagacttcatgtggttgaataattggccaatggaaggaatttcttttttggtaacagactctgtgtgtacagttatgggtcttaatttataataaaaggttacattgaaaattgagcatattggcaactttgggctttaatattactactgtgctatttaggtcccaaccatcctagctaatctgggcattcttgaaacagctctcattattggtatgtcaaaccgtctcatagggcatgtacttaacaaaagtggagtgaagggttcaggatgcataaatggggtgaagctcgtggtattccattcctttttactgaagccactcctaccagctgccttctagattgttcaccttatatgagcatggtgcagtatagaagttgtagactttggcctcagacagatctaaattctaatctcagatcactacttcctggttgaggacaagatttctttaaccaccccaagtcccaattttctcatgtctaaaatggcagaaataatgtgtactttgcagggttgttgtgagagttaagtaatatgggtaatgcacttgggacagtgcttcacacaaaattgtcagtaaatggtgatctttcttttcctggcactacaaagctgaggagaggagggagggagggagatgaatgtctggaggaagaaagggcaggagtttcttcatctttgagtgaaggagcattgagggttagcagggatataggaatagtgagttggctgggaagaaaaaaaggattaaaagaggaaaagaataggaaaaaagaaggataccatggagaaaatgggcaacggccccagaaagaagagcaagaatggcagtgatggtgagcattgctggaatgatggaaggttctccggccccggtgatgcgtgggcaccaccggagagcttgttagaaatgcagagtctctgtccctccccagaccctctgaatcataatttgcaatttaatgagaggtccccaggtgattcccatatccattaattctgcagagttgatgttttcatctgcggtggcggggggcggggggggggsgtgcggtgggggtgcggcaggtgttcagcagattcaaatcaagaggaagtccccaagggctttaggttatctctaaatttatcaggaagacttcccatcgaagtgggttgagatccaggatgtgtcactttcctttgtattctgatctggctggtctggacagaggttctgcaaaccagagtcatgctgtggactcagggattcttggaacttctcgtctgaatccaaagtagcaggtgtgaaggaacaaggaagtggagtggtgaacattatttgtctatagaggaaacaggaagagaatggggattcttcttttagacacatctggcaagtgaggcagtcatcctgcaccgcaccctcctccctgcgccttcagctcccggtgccctaccttttctctgagcaacagaagcacttttgtctgcatttaggttgctcatcactggtgcattggaaagaacactgggctaatgccttcgggcaagccacttcaccaccctggctccagtctcctcatatgcaagaagggcttaaaattgtgatggtaggtgcccagggtttcccagtgcagtggggactggaactgtggtcttctggtgactgtttctaccttatggtactctcaagtcagcaggtagccaggtgataaaagggaaagaagctgctgggtgtaaaattaaaaagcggccctcccctggggccagcgggagcgcagaaacagttgctgttcagtcttgccacttgtcagcatgagggaatttgggcccaggatagccagacaatctttttttccaagaaaaactagaagtccagacttttctgttagattttcttagttttttttagagactctgaattcattaaacacacacacacacacacacacacacacacacacacacacacacaaaatgagaaaacctgctgctcatacaaaacaaatctgagggcagagttttgaagactggcagtgaattcattgaaaaaaacaaaaacaaaaacacaatgaaaaaacctgctgctcatacaaaacaaatctgagggctgcagcagctcacaggatgccagtgtgtgacgtctttcctaagtcttttaa

SEQ ID NO: 723734 - DNA, 2902 bp, Homo sapiens
atcaagtatctcagtttctggttagagcaatattattttcactctttcattaatttctggtttattttattttaggtgctagagatgacactgcagagtagagaacaaaggaatcttagtaattgttcaatccaatctccacactttaaagatgaagaaactggtattgagaaaaatacacagcttatccaaggttgcactgctggttggtagctgagatgaatttagaacccacatctgatgactacaccatattgctcccagttttcctgtctgttccacatgtaaaagtctgactcttcacttctcctttgagtatatagacttttaacatttttgtatgtcaagatggacttttcctcatacccagcccctgccttttctcctcccttcataccttgcaggatctttaacagaatttaaaaggagttttttgttttgttttgatgtatctaataaaagtcaagggagggagagggccagtataagcaagagtacagtttcctagtttgtagatgcggtagtctgaggaatcagaaacacacaaaggtttggagaactggtacatgctcccaggtgggaagccaggactcttggtaggatcttgaggacaaggcaaaggacaataagagagcgaggggatcctagaggtggaatcaaggaagagaaactagagagagaaaaaggaactggctatccatccatgatggatcctgtgtggactgatgggtggcttggcatcatcctttagtagacttcatgtggttgaataattggccaatggaaggaatttcttttttggtaacagactctgtgtgtacagttatgggtcttaatttataataaaaggttacattgaaaattgagcatattggcaactttgggctttaatattactactgtgctatttaggtcccaaccatcctagctaatctgggcattcttgaaacagctctcattattggtatgtcaaaccgtctcatagggcatgtacttaacaaaagtggagtgaagggttcaggatgcataaatggggtgaagctcgtggtattccattcctttttactgaagccactcctaccagctgccttctagattgttcaccttatatgagcatggtgcagtatagaagttgtagactttggcctcagacagatctaaattctaatctcagatcactacttcctggttgaggacaagatttctttaaccaccccaagtcccaattttctcatgtctaaaatggcagaaataatgtgtactttgcagggttgttgtgagagttaagtaatatgggtaatgcacttgggacagtgcttcacacaaaattgtcagtaaatggtgatctttcttttcctggcactacaaagctgaggagaggagggagggagggagatgaatgtctggaggaagaaagggcaggagtttcttcatctttgagtgaaggagcattgagggttagcagggatataggaatagtgagttggctgggaagaaaaaaaggattaaaagaggaaaagaataggaaaaaagaaggataccatggagaaaatgggcaacggccccagaaagaagagcaagaatggcagtgatggtgagcattgctggaatgatggaaggttctccggccccggtgatgcgtgggcaccaccggagagcttgttagaaatgcagagtctctgtccctccccagaccctctgaatcataatttgcaatttaatgagaggtccccaggtgattcccatatccattaattctgcagagttgatgttttcatctgcggtggcggggggcggggggggggggtgcggtgggggtgcggcaggtgttcagcagattcaaatcaagaggaagtccccaagggctttaggttatctytaaatttatcaggaagacttcccatcgaagtgggttgagatccaggatgtgtcactttcctttgtattctgatctggctggtctggacagaggttctgcaaaccagagtcatgctgtggactcagggattcttggaacttctcgtctgaatccaaagtagcaggtgtgaaggaacaaggaagtggagtggtgaacattatttgtctatagaggaaacaggaagagaatggggattcttcttttagacacatctggcaagtgaggcagtcatcctgcaccgcaccctcctccctgcgccttcagctcccggtgccctaccttttctctgagcaacagaagcacttttgtctgcatttaggttgctcatcactggtgcattggaaagaacactgggctaatgccttcgggcaagccacttcaccaccctggctccagtctcctcatatgcaagaagggcttaaaattgtgatggtaggtgcccagggtttcccagtgcagtggggactggaactgtggtcttctggtgactgtttctaccttatggtactctcaagtcagcaggtagccaggtgataaaagggaaagaagctgctgggtgtaaaattaaaaagcggccctcccctggggccagcgggagcgcagaaacagttgctgttcagtcttgccacttgtcagcatgagggaatttgggcccaggatagccagacaatctttttttccaagaaaaactagaagtccagacttttctgttagattttcttagttttttttagagactctgaattcattaaacacacacacacacacacacacacacacacacacacacacacacaaaatgagaaaacctgctgctcatacaaaacaaatctgagggcagagttttgaagactggcagtgaattcattgaaaaaaacaaaaacaaaaacacaatgaaaaaacctgctgctcatacaaaacaaatctgagggctgcagcagctcacaggatgccagtgtgtgacgtctttcctaagtcttttaa

SEQ ID NO: 723735 - DNA, 577 bp, Homo sapiens
ttgtaaattttaatattttacccagtaaaaagcttattaaataataggatatactgattagaggttactttcaagaaattaaatatttttgtgtcttcagaaagagttctccttttggaaagatactatatgrataaagaagtaaattttaagtacatatttttttaaagtgcatcagttattatttaaaggaacatttaaattttagcatttgagcagctatctttcctccttcaaagttttctcattatcctttccttgtacgtattattatttataggctgcaaatgaaacctaaaagaacataaatggttttctatttcaacaaaagcaatcacctccacgtctcactttcttatctttaattaaataagtaagataaaaagtaaaaatcatggttgcccctttggttttgctggtctgacccattatcccagcacattgtggtagagatataataagcctgctttgcctagaagatcacttaggaacaaccaaggcttggggaagaaatcagttgccactaaaatgtcaaagtatcaagtatttctgcatgtgtaactagaggaaaaggaga

SEQ ID NO: 723736 - DNA, 577 bp, Homo sapiens
ttgtaaattttaatattttacccagtaaaaagcttattaaataataggatatactgattagaggttactttcaagaaattaaatatttttgtgtcttcagaaagagttctccttttggaaagatactatatggataaagaagtaaattttaagtacatatttttttaaagtgcatcagttattwtttaaaggaacatttaaattttagcatttgagcagctatctttcctccttcaaagttttctcattatcctttccttgtacgtattattatttataggctgcaaatgaaacctaaaagaacataaatggttttctatttcaacaaaagcaatcacctccacgtctcactttcttatctttaattaaataagtaagataaaaagtaaaaatcatggttgcccctttggttttgctggtctgacccattatcccagcacattgtggtagagatataataagcctgctttgcctagaagatcacttaggaacaaccaaggcttggggaagaaatcagttgccactaaaatgtcaaagtatcaagtatttctgcatgtgtaactagaggaaaaggaga

SEQ ID NO: 723737 - DNA, 577 bp, Homo sapiens
ttgtaaattttaatattttacccagtaaaaagcttattaaataataggatatactgattagaggttactttcaagaaattaaatatttttgtgtcttcagaaagagttctccttttggaaagatactatatggataaagaagtaaattttaagtacatatttttttaaagtgcatcagttattatttaaagkaacatttaaattttagcatttgagcagctatctttcctccttcaaagttttctcattatcctttccttgtacgtattattatttataggctgcaaatgaaacctaaaagaacataaatggttttctatttcaacaaaagcaatcacctccacgtctcactttcttatctttaattaaataagtaagataaaaagtaaaaatcatggttgcccctttggttttgctggtctgacccattatcccagcacattgtggtagagatataataagcctgctttgcctagaagatcacttaggaacaaccaaggcttggggaagaaatcagttgccactaaaatgtcaaagtatcaagtatttctgcatgtgtaactagaggaaaaggaga

SEQ ID NO: 723738 - DNA, 308 bp, Homo sapiens
ctcttaatgttgttacatagtctctaaaaataatctaaaatagatgatttagtcatgtggaataagattcagaaggtatcccaggccatgtagttaaagtctcttaacctcagcaacacgcctsccagattccctccttctctgagagatgttctctatataaacaaatattatatatattcttcccttatttctctttcgcccctctttttaatacaaatgatggagggagtatcgaagctgtccctaaagaggtcacaattaagcagaaacctgaaagaaatgattgagcatatcaggtaaggatc

SEQ ID NO: 723739 - DNA, 308 bp, Homo sapiens
ctcttaatgttgttacatagtctctaaaaataatctaaaatagatgatttagtcatgtggaataagattcagaaggtatcccaggccatgtagttaaagtctcttaacctcagcaacacgcctgccagattccctccttctcygagagatgttctctatataaacaaatattatatatattcttcccttatttctctttcgcccctctttttaatacaaatgatggagggagtatcgaagctgtccctaaagaggtcacaattaagcagaaacctgaaagaaatgattgagcatatcaggtaaggatc

SEQ ID NO: 723740 - DNA, 625 bp, Homo sapiens
taatcacaagacattattttatgaaaaaatgtgttctaagcttgaaacaataaaatgttgggaacataattcattcatataaatctggggcttccaggagacaaaaatctgggtttattaaaaaaaattagggtacctttgtgttttacaggtttaacacaagaaatccttgactagcaagttcttctcattctaagtcgatttacaatatatatgtatgtccttaaaacactgtagaaagcaaatggaaatcaaaaggggttaccatacctaccaaaaaagtaagtcagayttatttttttgtattcacttaaagttaagaatgtactcatttaaatttaagtattcacttaaatttaagaatgaagttgtctgatatttccaagactactcaaagagtgcatggtcttctcatataacataatccatttgacataaatggtctaatgtctagtctaagtcccttctgtacaattttagttccagtcctctattttacttgtcaaaaacagttatcatcctagataatacctaattaaaggtggtaaaacatgtatttagagattccggggcttataaacaaaccactgaatatagttttcaatgttaagttaaatatcaagtt

SEQ ID NO: 723741 - DNA, 1256 bp, Homo sapiens
acactgaccctacctgccctggcaggatttaagagcagctggtggtggacacccacagctctcctctcctcctcctcccccttcatcagcagcygaactcgaggggagagcagcaagagactgtgcaatggtttttgcataagttcatgccacacacacacaggataacacacacattttctcttttgaggggctgctccctcagcaacacacaggcttctgtggacccagcattgtcttggtgggagccaggcgagggcccctgggagtcctggaggatggtagctgctggagacacggggagattggatgccaggactggcgcattcataggtgagcagtggggggtgggcactgtggggaggggccgcctgcaccggaagccactctcccccagcctggttcctggagacgagttctggaaaatcccctcccttagaggacaaaggagcagaggcaccctacagaaaggtgtgaagggagggagagtcaactctgacaccgacgattccccagtaccgacaagtcctagagtggcctccgctggacttgcatgttttggaggaggaggcagtggcgaggaagcttcaggtgtgagacacagggagctttctggttggacattctggtctcctaaaggtcccatcctggggacctgatgggagtccccagacttggctgccagttagagaaggaagaagccactggtgggtggaggctggagcttgtgtcccacggcacacagaatgcaggcttagtgcggttatgttcgattcctagaaggcctgttatggtgtcttttgggaagatgcgatataaaaatgtgcagtgatggctcctgtgtgggaacccggggaggagccctgggcacacccaacgcctgtttcgaggcttcctcatgtgcctccaggggatgccaggaaccaggaagccagggcctctttcctgacacccctgctcagccttccctcacagacacacttgctgcatagccacattcacacccgaacacacggacacacaacacatacacatacctacacacacagtcacactcacactgaaacacagacacacaacacacagagacacatacctatccacactcacactgaaatatacagacacacacacctacatgtatacatccacattcacagtgaaaaacacagatgcacaacacacacacataccgccacacatgcacacatacacactgaaacacacacacaacacacagagacacacgcacctac

SEQ ID NO: 723742 - DNA, 3003 bp, Homo sapiens
ctctccctccacacctccctgcaagctgagggagctggctccggccttggccagcccagaaaggggctcccacagtgcagcagtgggctgaagggctcctcaagtgctgccaaagtgggagcccaggcagaggaggtgcccagagcaagcgagggctgtgagggctgccagcacgctgtcacctctcaataggacatgttttttgttcttaccaagattcagccttttttttttttaattgaataaatgctcctcagattgctgctctggtaaatttccaatattttaaaaaagttgactctgacagtttttgccaatgttctcattgtgttcatgaagaagaggattctcagagacccttacttactctaccattttactgacatcactgatcgtatgcttctttagacagcccccaactgctcacaaaagatactttgatatttcggcaaaaaccgtgattagtacataaatgctgtattatgttttaagttcctaacatgagaggtctcatatataatgcactaatttttaagtaaaataatgataaaagtgactctgggaagttgctatatctgtaactgtcaagcaataagcagtctttcaagttagtacaggacccatttatttctttggattttattatttcaacccacttaatcaggccaccagcaataataggaagaactaaaaacattgctacaaaacatgtaatcataagatgtctgactccaagagaactgagggaagtggaaattatgacataaagatccaaaaggaaagtgtttgggccagctggagagaagaggtggctccaaattagtcctctcacctccaccctaaccccaaagggcaaagaatgacagcttagacagcatatattcctattggttacaagcttgccaaagcagtagctttcaaggaatggcctagcctgtgcccctgggaatgtgtaccctggagaacttccatttgcttttggtagagaggaacctagaaagaacaaaggaagtctgacacatagtataaaattgtgaaaaaaagttgcccttttacattccagtttgagatcttttaaaaaacagtgaagtttacatatattccatatcatccaatataaagatacaattgaatacaataaatgttcataatcacattaattgattgtatttgaatgttttaaaatatatgcagagtgttttaaaatattcaaaatatattcacatttgttttctgttttaacattatagcaatcctggccatggtgcttcccaaattttgtggacaatataactgagacccagagattttcatcaaattgttagacaaagtaagattcaatcatagccttcctgtttgttaaaatgcattctccactacccatatccttcatcatattagagaatcaataatttactgttcatagtttcaactctcctctttgctctatgtacacacgttctctaaatccatcaagtatttgatatctgtgttttcagaaattacatgtgacccttggttagcttaatcaaaatatttgcaactccgtttaagtctcccttgaatgcacagtgagacaagacaactttgatgcacagagttgtctttcttcgggatgacatttctgacatcatgtctggaaacaaaagacataatgactccatgatattccatctcaatcacacaaaaaaacttaaaaattaaaaaaagatttttagaaagaagaaattgccatttttttctgcaggaaaggggaactgcttgaagaatttgaatgatgtaagtttgtctgaaagctttaaagatgaaaggtatcactttttacccattagcattataggatgatgagatcctgaatgtgccttgccacttcaaagggtcactggactacagctttcagaaaagactgcctgcaagattgtgaaggaggttcaattcccttcaggttcttctttcagtgcacttgaacatggctacaacttttagaattcgccaaagtttttaatgtaacttctaaatctttctatttctgggtcccccttgtaaatttccatatagaacctcagatttcttttgtccttcttcaggcctacattgaatttctaggacttagaccagggttctagcctcttgcttaaatatttatgcttatcacttcagtgaacagaaggtacaggtgcagttcgggttcaaattctggaaacccatcatgccttgcctaagaggtatcttgctgctaagacaactgcccagagaaatcagatgtgtgtcctggagaaacrtgaggaataccaattgtgagtttacttctttagtcctcccagtgagagaaaggacaacagacagagttatgtgtggggtggcaaatagtgtgtaattatttgcaaatctgccttaaagcaagagatcaccaatatatcctagtctgcttaccaggggaatacttcgtagctaattgaaaatttcccaaggaggttattttttgattatgtcattcccaacatgataattttgagacttttgactaatattttctttaatatttaaaccattaaccataaatagtgttgttttgatttttaatgttattcaatgtagtggagactaaaaattgttttcctttgcagtgactcaggggagatcagagttgggtgaaccttactccagttcctggtagagagttttccatattaacaaccatcagcagtgggttggacaccattctaaactcctcttgtctgcttctgaagcagcttgctctctctctgaagcacaataggagccattcggcctggctagtctctcaggggggtcaactttacatttcccaactctgtggaattcctttgagtacgtaagcctaaagagctttctgttttcactttctgtctcttaattctgtatgaaatctaattatcactgttgagtatatagttttcattaatctagacatataattccatttctattccaccttgttccctggaaaattttaatgtaaaa

SEQ ID NO: 723743 - DNA, 676 bp, Homo sapiens
attttattacactgtgctctgatagagtgcttgatatagttttcttaaataaatatcttaaatttattgagacttcttttgtggcttatcatatggtctatcttggagaatgttccatgtgctgatgaatagaatgtatattctgaggttgttggatagagtgttctgtaaatatctgttaagtccatttgttctatggtatagtttaagtccattgtttctttgttgactttctgttttgattgatgacctgcctagtrctgtcagtggagtattgaagtcactcactattactgtgctgctgtctatctcatttcttaggtccagtagtaattgttttataaatttttataaattttggagtttcagtgatatatatacacattgttgaatatgtatatatatatagtccatgatatatatatatagtccatgatatatatatatagtccatgatatatatatagtccatgatatatatagtccatgatatatatatagtccatgattttatatatatagtccatgatatatatatatatatagagtccatgatatatatatagtccatgatatatatatagtccatgattttatatatatagtccatgatatatatatatagagtccatgatatatatatagtccatgatatatatatatagtccatgataca

SEQ ID NO: 723744 - DNA, 642 bp, Homo sapiens
gtattttccaatgagagtcagctgtggggatggccacagctgcatcagcccttacagaattttatggggtctaagtgattggctttttctctagccttttctaaatccatacagtattcctcagcagtgagaaaggtatttaataaatttgctgcatcatttctagtgacattatgagtggcaaaatttgacgaaaaatgattttctattctcttgggatcatccttacaagtaggcatgttgttcttccaattatacagatcccatgtaaaaatgagagagtagactcaagtcagtctcactggctgtccagtggacatgtccatatctccagtaggaacttgtcttagtgggtattgccctacatggatttgggtagccccctgacaaattgagtactctgatgggtgtgagaaagagacacgaytttatctcctggcctttggggacagagggagctgaaatctgggactgtggctcaggaagtagagatgggacaatgccactataagggggtactccttttcattagaattagacagaataggtttctttgtctctctttcctgttgaactataatcttacaatttgtttttcatataggcttattcaggtatagcaacataaaagagtgaacatac

SEQ ID NO: 723745 - DNA, 361 bp, Homo sapiens
ctcataaaattaatgatccaaaaatctcattcttttagtatcatattttatctatcttttatacttttatctatattttatttatctatctatctctgggagactaccaagactagaggcaattatttctccccagatatttacttttatcttttgttttcattgtctttggattatgaacagatatgaattcaaacatctgacttttacaaaaacttatttgaattttcagcttataaaacagcctccctgctctaaagccagtactcagacatwaaaaaactaactgaaatcaccacagagcttctgctattatgcctgactgtaaaacattaaacattaaaaataaaactcatttttt

SEQ ID NO: 723746 - DNA, 1421 bp, Homo sapiens
aatttgttcatcaataaggccatgacttttggcatctttaaggtcaaagcactttcttaattctggtgaaattagaccagaaatcattagctgtgtctcaagcaacctaattcctgtgtcatagtcaatgaggcctcttaaaactgcttgaaagactgaaaggacttctccagttgtctgatcaatggtgcctgcaatcactttatccagctgaaaggaaaatgcaaaaatctcaggtcactctgttacacaagggtgggcggagtttcatgcaacttaggttttttaaaaaataaataatacatttcaacataaaaatcctctacttaccaaggcgcagcaatgctgtgaatgttaggcagttcaaatgcacaagtgatctatgtcagtgatctattcaacagcacaggatgtgataaaagctttgaaaacaacatgcatctgtgaattgaaaacttgatatcgtgtatattgacaaggttagtgaggacacaacagagtagatgatgatagtgagaaaacagaacacatatctagaaggcaaaccatgctttctgcatttaggtgagattagagtctagtggcakgaaagagagtatcaaaccccatgctattgatgtttacagcatacagacttcttcaaagatagtcaaaaactaagaaactggaaaaattgttacatacccccaaaatgtgacaaattatgtggaaagtattcccaggagtaaggaattaaatataaagataactttttgaatattgaatattatgttaggcctgttgatatacactgtcaagttttaaaagtttaagtaccagccaaattttaaatgatttatactttaagaagatgctagggcatcctcactataatgtatggccttgtattactcaaataagtctcatggatatctctgaaagtcaaacaatctctaacacatcaatgccacctttagagatgacccacaggctcttttatagcctataatataataaaatacctactatactagaagaatggcttttaaagagaagagttagaagaatgaatgatacttttcttttaccatgcaaggcagagattaagatgtcacagaaactgatggtcagcatgtgtaagattgcatttaataaacaacactggaatctccaaacatttaaataaactcaatccctattttaactacgtacaaaattcaaggtcatttctttattattgacatagatttccagagccatgcaatcaaactaagcttcttgaaacagcctcatgtttaaataaataatattaccttctcctctacctttacatctcctgaggtttgtgattcttgtagctgtttcagagattcactgaataataaattataactttcctgaagagttttcacttgtttttccaattcatttctttcttcatc

SEQ ID NO: 723747 - DNA, 667 bp, Homo sapiens
aaaaattataaatgggacttgggaatttttcaggctttgttcagtgtggtccaaggggtggaggaatgaatggaaagatgattaagctcaatggaaagacagcacattactctgtacctaaaatggggaatgagctccctgtctttggaagtgtgcaagcagatcctagacaactccttgacagggctcctggcatcagtgatggggttggcctgggagacttttaaagcccctcccagctccaggtgtccgtgactatgggctggacgctctccaggctmccctgctatggaattgccggaagcctgatggctgtgagcccgtttgcactcagccttcctcgctcccagctcacctcacactgacttctggctcctcaaacctgtctggttctgcagggcacccctggatcctggggctggctgggaggggcccttcccccactgcctcctcctgggcccctcctgtttatgaggctgttgtccagggttgctggagcgacgctggatccacgccccactcggagcccactgacttttgggctttttcatggcttttgaacatagcagctactcctgtctcctgtctgagtgggtctcttggatgaaaacccatcgatgagggtgtttccaagcaccctgggctcacaagagctcctggtttttcc

SEQ ID NO: 723748 - DNA, 667 bp, Homo sapiens
aaaaattataaatgggacttgggaatttttcaggctttgttcagtgtggtccaaggggtggaggaatgaatggaaagatgattaagctcaatggaaagacagcacattactctgtacctaaaatggggaatgagctccctgtctttggaagtgtgcaagcagatcctagacaactccttgacagggctcctggcatcagtgatggggttggcctgggagacttttaaagcccctcccagctccaggtgtccgtgactatgggctggacgctctccaggctcccctgctatggaattgccsgaagcctgatggctgtgagcccgtttgcactcagccttcctcgctcccagctcacctcacactgacttctggctcctcaaacctgtctggttctgcagggcacccctggatcctggggctggctgggaggggcccttcccccactgcctcctcctgggcccctcctgtttatgaggctgttgtccagggttgctggagcgacgctggatccacgccccactcggagcccactgacttttgggctttttcatggcttttgaacatagcagctactcctgtctcctgtctgagtgggtctcttggatgaaaacccatcgatgagggtgtttccaagcaccctgggctcacaagagctcctggtttttcc

SEQ ID NO: 723749 - DNA, 600 bp, Homo sapiens
ttttttttttccttaagcaacaagaacctgttttattttttccaaatacaaatacagaagtttgcatgttctgcaaatattgcttcaaagcaacatttctatttagggtgccttctgttcgaatagcacgtggacgtagaaatgcatccacrgtgcaaggttggctcgcccaggacccacactgcatacacttaccgcttaaagaaacaaaatgggaggccgggcacagtggctcatgcctgtaatcccagcactttgggaggccgaggtgggtgggtcacctgagatcaggagttcgagaccagcctggccaacgtggtaaaaccccatctctactaaaaatacaaaattagccaggcatggtggcgcatgcctgtaatcccagctactgaggaggctgaggcagggagaatcgcttgaacccgggaggcggaggttgtagtgagccaagatcgcgccactgcactccagcctgggcaaaaagagcaaaactcagtctcaaaaaaaaaaaaaaaaagaaacaaaatggtccaggtacagtggctcacacctgtaatcccagcactttgggagaccgaggtgggtgggtcacctgaggcc

SEQ ID NO: 723750 - DNA, 1111 bp, Homo sapiens
caaaaaattagctgggcgtggtggcaggtgcctgtagtcccagctactcaggaggctgaggcaggagaatggcatgaatccgggaggcagagcttgcagtgagctgagatcacgccactgcactccagcctgggcgatggagcaagactcaaaaaataaaataaaataaaataaaaataaaataaagaaataaatacaaataaagctgtggctgggcacagtgactgatgcctataattctagcactttaggaggctgaggcaagaggattgcttgagccaggacttcaagaccagcctgggcaacatagcaagaccctgtctctctaaaaaatacaaaaattagctgggtgtggtggtgtgtgcctatagtcccagctattcgggaggctgaggtgggaggatcacctgagcctggggagttggaggctgcagtaagctgtgattgcaccactgcactccagcctgggccatagaatgagaccctgtttccaaaaaaaaaaaaaacaaataattttaagactcaacgttttgtatacagtccttattctaactctgaatctaatatttaaccaaaagttacacatctcaagccaggttcacccagaacactgctagagaggatcgaccaccttaaccccacccagcttcaagctttacaaggagacccaagctgcacacgggcctctgcttacgatgytgaagagaaggtatgttgtgagcctgcatgccccttcaccctgagatctgattccctgtcatctccgacatcctgtctttctgctctctttctggtcgcccccctccaacttccctcaagccccatgcccctattacacccagtaacttctcacttcaagcctttgtgtttgctctttcccaggtgcctcggtggcttgctgctccctcctgtctttgctccaatagcacctctgcatggaggcctgccttgaccttcttgccccaagtcagaaagccatcatccagaatttgaaaatgatagcttttcattggtatatctataccgatggatctattgattgacttattgatagatatagtgccctccttaacttgcttttggcctgacctgtctggagtgcagtggcatg

SEQ ID NO: 723751 - DNA, 376 bp, Homo sapiens
tgaactgttacttgttagactgcagcctttttgtccttgcagtgcctattgtaggaatataatactcagttttgagtaatttctaatattctactttgcctatcatagtacgaatatgatttatcatattatattcgactttacctatcatggaagaagaattgtgtttcagttatcagatctgatttrccaaggtatgaaggctagtccacccatgcaacccaactagaaaaagagatggtagacagaatggtcacactggtggtacgcaagatccaccatgagagacaaatcagtgggcaaagttttgagaaacaggatattgacacaatcccaaagtacccaccccctgaagatatttactcattacaaaggg

SEQ ID NO: 723752 - DNA, 628 bp, Homo sapiens
aaacaagaaccaccttacaggattgatatgaggccaagaaccatcattaggcagataaataaaataatgtttataacattcttggtactgagtccggcacatgatcagcctccattaaatgaaacctaccgttttggagaattaggaaatttatatgtaaaaccatagaagatgacatatgattcagagttagattctgacgacatctacattcgattgtgtttgccttatgccaamtcatgtttttaataagcattatctcattctttacactgacaccctgctgtgtatttattaagtggatcacacagataatgagtaaaaccaaagtgcaaatgctgggccctgtgtcaccatcctctgctaacttgccccagagagctttcacatctgactgaaatctaaagtctttatatttcttttcctcatggatgatttggcattattctttaacattgtcttgctcttcaagatcctaccactaattcaccataggtaaacacaaacttacactttgaaatccaacagttgcatttttctaacatcatcattaaagaagtatttatagatttttcaaaagcacgggcttttttgaagtgttcaattctacagaatattgttagtactt

SEQ ID NO: 723753 - DNA, 809 bp, Homo sapiens
ctctgtacaagtgaaggaattaaggatcttgaccaggtaggactcggcgtcagatattctggctcccactctcttgcacttttcaatgactgtgtcccctgattcaggtgttttcctagcattagctttgggtggcatctcaccttgttgttgtgttatacagaaactattcttaaatgccacttttgaatggggtccacctcacccccattactcattgtttcactcccagatcatcactgggaatgatttctacagtgttttaattttcttagaaatcagagggctgccaccaggcgagtgggaaaagccctagttttagatcatgagttgactaaaaggccctaggaaaatggmttttctcaggtgccatctgagtctctgtaaagagaaagggatgttgccaactcttcctctcagcagggtttcactcaggcgaaagaggccatggagcagtccctccagctttgtagcacagattgggttaactgtttacttcagaattggaagaggccttcgaagtccctctagttcagtgattttcagacttgttttaggaaaaatccctcctgcaaatgaattcttacttggaaagccattagcaaattggtaaagtggagatgcttggtttaggcagagatggggggcttggagcctacctcccatccctccctggtccaaggagcatcctgagagctgtgttctgtccagtgctctcttaagtcctatttgaaaaccactgatttcttcctctttccccttctgtaagtaatcattcaccaaattcagctgacctgagccctcaaatc

SEQ ID NO: 723754 - DNA, 661 bp, Homo sapiens
tagtgtgtggtggaactagggaatagaatttgtggagacatcaatttagaaataagactaaaagatataccctagtttgttaactaccttgctaaagagttttaatcttactgccttattgtttagaagatttctatgtcaggaatgtggaaagtacatttggaaaggtgaaagagtcagtgaaaacagttaagacattgtacagatagtttagttgaaatatgatgaatccctggacaagggtagtggcaaaagcaatggaacagaggaatgaatgaatacaaaagacacttcagagatagaagccaaagggatgaattaattaatgacagtggtgggagaggggtgaggaaggagtcaaagatgatgatattagtcactgagcatcactgagtgatactattcactgagatcaaaccctcatgagggaggttcgggaacaaagaggattctgaacataatgatatgaagtacatttgggtagcccagggagagatgccctaaatacaaatggaaatttgggcctgaagcataaatgaagaatctaatattgtatgtaaaakaatattattataattgacaaatataatttacatcgagatacccttgaaaacctcagattgccttttgaattcttagtattagcaattttcaaaatcta

SEQ ID NO: 723755 - DNA, 615 bp, Homo sapiens
gatattttttatattttagtttcagttaaagagccagtcttacatgcagttcttcagcagcccaagtttatcttcaacttctttccactttccctgtccatgtttggcttctcttgctaaatgatcttttcttgcccaggctgggaactcttctcagcagtgctgtatcctttggaccacacctctatcctcctgtccataaattactacctgtagcttgacctcaaggtcttatttaytgctttccttttgacattaagtatcctgattaattaatctgtgctaaggaacttgtgatttatagtgtcttatctctccagataatgctgtattttgatatttcaaaatcaaactaccagagacgacatactgtaagtaggaaaaaatgtattaatggcaggaatcctaggctctagggcaagcgagtttgaaagatcatttggagccactgagaggtcttttggtggctttggatcacatattctaggcaatttcctacatcatctagggtggaattttgatgctctgtttttagtttttaactccatagtcaatgaaactatcataaaaatttatggtcaaaggagaattttagccattcccatttcttttgtg

SEQ ID NO: 723756 - DNA, 615 bp, Homo sapiens
gatattttttatattttagtttcagttaaagagccagtcttacatgcagttcttcagcagcccaagtttatcttcaacttctttccactttccctgtccatgtttggcttctcttgctaaatgatcttttcttgcccaggctgggaactcttctcagcagtgctgtatcctttggaccacacctctatcctcctgtccataaattactacctgtagcttgacctcaaggtcttatttactgctttccttttgacattaagtatcctgattaattaatctgtgctaaggaacttgtgatttatagtgtcttatctctccagataatgctgtattttgatatttcaaaatcaaactaccagagacgacatactgtaagtaggaaaaaatgtattaatggcaggaatcctaggctctagggcaagcgagtttgaaagatcatttggagccactgagaggtcttttggyggctttggatcacatattctaggcaatttcctacatcatctagggtggaattttgatgctctgtttttagtttttaactccatagtcaatgaaactatcataaaaatttatggtcaaaggagaattttagccattcccatttcttttgtg

SEQ ID NO: 723757 - DNA, 630 bp, Homo sapiens
gttgtgaggaattcaaaaacagcagtgtaaggaggctccttctgatggcattggaagaataaaagcaaaaaaaatgataagcccaagatattaaaatatcattttaaaaaatggatgtaaacgtagggactttatgtaaagttgttgaaaatatctcctatatcttgtacatactgaactgagagagccaagatttaaactcagtgtttaatcaccagttgaattcacagtcatatcagtcaggatgagctgggttacactgtagtaacaaaataactccatgatgtcagtggcttaaaacttaagaatttatttctcacttgtactgygtatccattgcaggttggttggcagttctgctctgcatcatccttactgcaggacccagcctggtgcagcagtgactatctggggcattgctggtcattgtggcaaagggaaagaaaggaagtgtgaggaattgtgcactggctcttaaggcatctaaaggaagtgagagaggtcacatttgctcatatatctttggctaaagcaagtcatatgtactttagtaatttcaagggggcaagaatgtacaattccatccggtataagaattgaaaatttttggtgcacagcaaaaatgactac

SEQ ID NO: 723758 - DNA, 1135 bp, Homo sapiens
cgggggggctcccaccttgaggtaccaggggctgggttggggggtctctttccgatgcctggccccgtgtgccatcaggaacaggattgcatggtggcaatggggcaggtcatccctgagtgcctccttatcctgaagaaggctgtgtcccattgcgggtacatagtgtgtgctggaccactgggggtgccgagcgtgtgctggaccacggggggtgcacagcgtgtgctggaccacggggggtgccgagcgtgtgctggaccacggggggtgccgagcgtgtgctggaccactgggggtgcacagtgtgtgctggaccattgggggtgcatagcgtgtgctggacagaccccgggagaacactgcagatactgcgtgtccaggcgctgtgcatcccgtgggttggccacatggcacgacgcagatccagacagggtggagaggccagtgtagtcctgtctcacacacacgcgcacatgcagggtggggtccggctcctctctgaccaggggtccaggccctgcctcactcagaagccctggggaccctgactggccctccagaccccaatccacagctcccgcttctgctggcctggcagcccccactagggggatggtgctgccctgtctatgcgccaggtggagacgaggagtggggactggagtcacaaagacccttccgagcctcttagcctccctgctcagatggccttggggacgcagggtgagcagagccatgtgcccagtggtggagctcctggccaggctgcctggaggcctgtgcrgcccacacacccgaggggagccgtccccacctggtgtccccaggccccgaagcttctggctcgctctagcacctccccagagtacctcggagcaggcttgggcagcgggacagcctcgcagaccagagctaggcctgtcccaggactccagagcctccagcgcgggactgggcaggcagtggctgggcttcctggggcccttgtgtctccgcagctggccccggtactcagctcaatggggccaccccgagccacagtgccgagcggtgtccaggccagacgcttcctggacttggctggatgggcctggcacagtcggtcctcagcaggccacactgggggctgggg

SEQ ID NO: 723759 - DNA, 908 bp, Homo sapiens
tatctacttacctataaatgaataatagctgctggtgggtaactgtggctctttgttttcatgtaaagagcatatttcagagaagtggacttgtttcactttttttttttttttttttttttttttttaggkcctaaatgtagcttctaggagacttagtttaggggaagtaaagaaaatgatgttaactgtggatcactgggccctcagggcagatgcccacccatctggataccggagatagcacctgctcctagtttcatggccgattttgcctgcgtctgcttcactggttgtacccatgggtggtgacttcttcagaaagtgatctcataacctgtttgcacattgttttggaagtaaacgttgccagagattaaagtattaaatgtaatcttacttacccttctagaggacattgcggcaaaaatattcttccaaagggatgcctgatattacagatggatccaggttttgtagggcctatgtttatgcaattttgtagaacttctttaataaaaagtatataaaaagttgatttcatagaagtaaaaagtagtatagaagatacctgaggctgggaagggtaagaggaaggaggatgatgagagatttttgaaaggatacaaagttacagctagataggagaaacaagttccagtgttttatttcactgtaggatgactataattagtaataatatgtagtgtcaaatggctaggaggatatcaaatgttctcaacacaaaaaataataaacgtttgagatctgatcactaaacattacatgtacagcactatgtaccccataaatgtgtacaatcattatacatcaattaagaaataaaagaaaaaagaaaaagtattgatacggtttgattctgtgtccccatctaaatttcatcttga

SEQ ID NO: 723760 - DNA, 908 bp, Homo sapiens
tatctacttacctataaatgaataatagctgctggtgggtaactgtggctctttgttttcatgtaaagagcatatttcagagaagtggacttgtttcactttttttttttttttttttttttttttttaggtcctaaatgtagcttctaggagacttagtttaggggaagtaaagaaaatgatgttaactgtggatcactgggccctcagggcagatgcccacccatctggataccggagatagcacctgctcctagtttcatggccgattttgcctgcgtctgcttcactggttgtacccatgggtggtgacttcttcaraaagtgatctcataacctgtttgcacattgttttggaagtaaacgttgccagagattaaagtattaaatgtaatcttacttacccttctagaggacattgcggcaaaaatattcttccaaagggatgcctgatattacagatggatccaggttttgtagggcctatgtttatgcaattttgtagaacttctttaataaaaagtatataaaaagttgatttcatagaagtaaaaagtagtatagaagatacctgaggctgggaagggtaagaggaaggaggatgatgagagatttttgaaaggatacaaagttacagctagataggagaaacaagttccagtgttttatttcactgtaggatgactataattagtaataatatgtagtgtcaaatggctaggaggatatcaaatgttctcaacacaaaaaataataaacgtttgagatctgatcactaaacattacatgtacagcactatgtaccccataaatgtgtacaatcattatacatcaattaagaaataaaagaaaaaagaaaaagtattgatacggtttgattctgtgtccccatctaaatttcatcttga

SEQ ID NO: 723761 - DNA, 662 bp, Homo sapiens
tggccttgcattcagaagccccaagtgtgctgctgactggctgccttgggagtagcactgacacctccctcaaggactggaaacaaaaaatgaaactccggagtctttctgtgtttgctgcacaactgctctgatttccagggtcttactgtcttctaccgtcattaggctagtagaataaaagtggttcaactcagccaacactttcagttccaagagcagtgagtagctcttcaaggatgcaaagtgaagagggccacggtgcgtccctccagtgagccgggcaaggtgggaagactgttcagcacagtgccagaagtggcctctgtccatttaaacatgggtcatggaagcccaagggagaagcaattaattgcccctcagggattcaagtttggcttcgtggaggggtggcatgtaaactgatccttgaaggagatggcttattagtttttaaaataaataatgacaatgagggctttccgggggctgtgcatgtgctcaggagatgagaggcaaataagacacaatccccatcctcaaggactttgcagactggtaaagcrcacagacagatgagcggctggaaaagctgagtatgatctgcatcagggcagaggtcagcacagagggggcgcctgccccagcaggggaggggagga

SEQ ID NO: 723762 - DNA, 605 bp, Homo sapiens
cactgggaggcaggctttgcccaagtgtcagcggagtgtccatggccagtggccgtagcagggaaaacagcacacaaaatgcccaaaattggctgcagagtttaaaacatcaacaaagcaaatccttcctgaccaggaaggcttaccacattcatwtgcatgttcatgagcatctgctagctgagtatcaatgtatccttctttctattctgatggacagccattaatcacagtagatctgcccttgtcagtacctcagtaaacagataatggaagcagggttttttttttttgtgggggacgggggaggcaaggggagaagaatcactttacccagaagaatattgtgaagaagcccactgctgcctctgtctcagactaagctagcatttgctgaaaatgtcaacagattgcttcttgagttttgagttgtgcagacatcaaaagcttattttgcttaaaatcacttggttggtttaggcatttagaatgtctctgactatgtaatttggattaagaggttcttgttgggttttactggtttagcataaatcaggacataactggaatagaccccttcacataacctgagcctttaggccatt

SEQ ID NO: 723763 - DNA, 1981 bp, Homo sapiens
ggtaagcatgttcctgcaaggaaaactttagtaagttactaaggaaaataagcgaaagcacacatcattttgagaacataactttttcacagttaaaaaataaaataatagtcaaaagttgtactaaatttacaccctgtggaatcttttcaaaaatctttaattacaaatgtaatacatgcttggaaaaaagtcaaacaataccaaaaaatttctttaaaaaactgataatctgcttcccctcccctccccaatctcacttcctagagctaactactgataagactggcatttatccttccagatttatcccacatacattcaaatacatacacatatattattctaaaattttatttatgaacaggtgttcatgccatatgcacatattgctctaacatttgtcacttaaataatggagttttcttcccacgtttttagaatgttacagatgtactctattctaataactacaaactgataacattagctaatatttaatgagtacttatattctaagtgatattctatctatatattttagttaattgtcacaatgctctgaagtagattcaattatctctaattcatggatgaaaaaactgaggcccagagaagttaagtaagcctagatcacacatctagtaaatgatccagaattcaaagccaggtaccctgactccagagtctatccccttagcagtacccattcctcaaagtatccctttactgatgaacatggaggttgatttcaatttttttctatacaaacaatgaagcaataaacacctatgtgcatgtatcttttgaacatatgccagtatttctatgtatcagatacctaaaaatagacccattagggtcaaaggtatgtgtaactaatttttggtaaatgctacaaattgaggacaccaatctacactcaattacattctcactaacataggaaatgatcaatagttcacattttgccaaactcctaggtaaaagatggtatctaaagattcattactaataaggataaacatctttttgtattatccattgttatttcttttttgaaatgtctgttgatcttttgcccatctttccattggttgctttttttggccacaagagactctcatacattatgtttgtcacacacagtaaacatttttctcttttgtttggcttttaactttatcttgctttcaccttatggtttctggctttcaagcatgcttaaaaggataccctgaacctctgaaaatagcactgttatactttttttatatttagatatttactccatctggaatctattttcatttataatatgaaataggaatgtaactgcatttgctccccaaaaatagataattttctaaatactacttttaaaacaatccatcctttccccaatggcttgaaatattgggttcattagttctaaactttttgcgaacacatttctgtagtatttattcattctacagatctatttgcctattcctactccaaaaccattattttaattattttatcattaaaattattttaattttaataaaataattaaatttaaattaattttaattaaattcattttaattattaaaataactattttatcattaaaataattaagattaaaagtaataatttaaatcattaattataaaaattaaattaaattttaattattttatcattaaaatcaataaaccattattttattatataaaaattattttattaagtttacccttctggagaactttgatatttccttaaattttactgmaattttaattggaagaactgaatttggggagaattgatatctttagcaactgagccttcccttctcagaatacagtaggtcactgtattaattcagatcttcttttatgaattcagtttcatcctataggttgcacatatttcttaatatttattaataggtactttatagtttggattactgggatttttgtta

SEQ ID NO: 723764 - DNA, 1022 bp, Homo sapiens
cattttatcaatcctgcatcctttatttttaagaagaaaaattccaacccattattcttccatccactccctcttaccactcttaatccttataaggctgggcgtggtggctcatgcctgtaatcccagcactttgggaggccaaggcgggtggatcccgaggtcaggagattgagaccatcctggctaatacggtgaaaaccccgtctctactaaaaaaatacaaaaaaatttcgccaggcgtggtggcgggcacctgtagtcccagctactaggggggctgaggcaggagaatggcgtgaacctgggaggcggagcttgcagtgagccacagtgagccgagatcgcgccactgcactccagcctgggtgacagagtgagactccatctcaaaaaaaaaaaamaaaacaaattcctttcaagtaccttatgatacctcataaggcttttgcagtggtttgaataattgcccccaaaagttatgcccatgacctcatccctgtagcctataaatgtgatcttaccttgataaaagctctttgcagagtaattaagttaaagctctcaagatgagataatcctggattatctaggtgaggctgaaagataatgacaaatttttttttaaaggaaatgaaagaggagaagacagacatagaagactaggccacatgaagactaaggcagagattggatttatgcagctacatacaaggaaagcctacagccaccagaatctggaagagataaggaaggatttgccactaaagcattcagaaggtgcacggccctgctgacatcttgattttggacttttttggggaccgggtagccattatccttcttcttgatatccaggttcaactgaaggcataaaatgtcaagttcctcagctcaaaatcaaaatctctactctgccactatcttggtaatttaagcaaattattctgcctcttttggtctaagtttagtcatttgtaatattaaagtggtaaattagatcagaagatcccaaaatgaca

SEQ ID NO: 723765 - DNA, 1305 bp, Homo sapiens
tgactcggattacagtgatagaactatgaatgaattttattgttgaaaatttccactactggcatgattacattgttttaccaaactaaaaatggacatttcttttttatataatgcacacaaagaatagttatgactatagtgcttcttcctctataagctaaactaaacagtattgctattttgcattggttaaataatagtagtagaactattaatagtagtagtaccagcaacatgctgttttactgaagacgacaatcacgaccacctccaaatcgcatgccagtctcccagaagaaactatctgtcctgtctcagggtgctcactctcataggacctgctaagtgcagaatgcatgacccatcctcttggtaataattgattagacaaaagatggctacctgaccctgagtctctctgggggacctggaactggcacacagaaagactgtttcagttagcagggggtaatagtccagttgaatgacacagacttaggggctgaggctgcaaactagaatggccattttggaactgaggaacaaagagagagaaggctggtgagaagctggaaaatgaagcagaattgcaaagagaagcagggaagaaaagttcagaaggacccagaggtagagatacagagagaaaagtgaaaaacattcactatcatggatcctggtgatttttagttcccacttctacctcctggtgaatcctagttgtatttgtactgtttaattcactaaaaataatccatttctgtgtagtgaaaaaacctcccttcttaaaccaacgtaattatctcctgcagccacatgatttytaagataattcgtatttctaacccttgcaacaaaaaacagctaattcctaatttattcatttatatacaattaaaacaaaaacaaaatgctttgtcagaaacaaaaaactcaggagaaagaagtcaacacaagaaagtttctcattaaaaattaaatttttggctgggtgcggtggctcatggctgtaatcccagcacttttggaggccaaggcagaccacttgaggccatgagtttgagaccaacttggccaacacagcgaaaccccttctctactaaaaatacaaaaattagccaggcttggtggcacgtgcctgtaatcccagctactcaggaggctgaggcataagacctacttaaacctagaggtggaggttgtagtgagccaagatcatgccactgcactctagcctgggtgacaaagcaagactctgtctcaaaaaaaaaaaaaaaaaaaaaaaaaaaaaaatttctgaga

SEQ ID NO: 723766 - DNA, 1305 bp, Homo sapiens
tgactcggattacagtgatagaactatgaatgaattttattgttgaaaatttccactactggcatgattacattgttttaccaaactaaaaatggacatttcttttttatataatgcacacaaagaatagttatgactatagtgcttcttcctctataagctaaactaaacagtattgctattttgcattggttaaataatagtagtagaactattaatagtagtagtaccagcaacatgctgttttactgaagacgacaatcacgaccacctccaaatcgcatgccagtctcccagaagaaactatctgtcctgtctcagggtgctcactctcataggacctgctaagtgcagaatgcatgacccatcctcttggtaataattgattagacaaaagatggctacctgaccctgagtctctctgggggacctggaactggcacacagaaagactgtttcagttagcagggggtaatagtccagttgaatgacacagacttaggggctgaggctgcaaactagaatggccattttggaactgaggaacaaagagagagaaggctggtgagaagctggaaaatgaagcagaattgcaaagagaagcagggaagaaaagttcagaaggacccagaggtagagatacagagagaaaagtgaaaaacattcactatcatggatcctggtgatttttagttcccacttctacctcctggtgaatcctagttgtatttgtactgtttaattcactaaaaataatccatttctgtgtagtgaaaaaacctcccttcttaaaccaacgtaattatctcctgcagccacatgatttctaagataattcgtatttctaacccttgcaacaaaaaacagctaattcctaatttattcatttatatacaattaaaacaaaaacaaaatgctttgtcagaaacaaaaaactcaggagaaagaagtcaacacaagaaagtttytcattaaaaattaaatttttggctgggtgcggtggctcatggctgtaatcccagcacttttggaggccaaggcagaccacttgaggccatgagtttgagaccaacttggccaacacagcgaaaccccttctctactaaaaatacaaaaattagccaggcttggtggcacgtgcctgtaatcccagctactcaggaggctgaggcataagacctacttaaacctagaggtggaggttgtagtgagccaagatcatgccactgcactctagcctgggtgacaaagcaagactctgtctcaaaaaaaaaaaaaaaaaaaaaaaaaaaaaaatttctgaga

SEQ ID NO: 723767 - DNA, 1305 bp, Homo sapiens
tgactcggattacagtgatagaactatgaatgaattttattgttgaaaatttccactactggcatgattacattgttttaccaaactaaaaatggacatttcttttttatataatgcacacaaagaatagttatgactatagtgcttcttcctctataagctaaactaaacagtattgctattttgcattggttaaataatagtagtagaactattaatagtagtagtaccagcaacatgctgttttactgaagacgacaatcacgaccacctccaaatcgcatgccagtctcccagaagaaactatctgtcctgtctcagggtgctcactctcataggacctgctaagtgcagaatgcatgacccatcctcttggtaataattgattagacaaaagatggctacctgaccctgagtctctctgggggacctggaactggcacacagaaagactgtttcagttagcagggggtaatagtccagttgaatgacacagacttaggggctgaggctgcaaactagaatggccattttggaactgaggaacaaagagagagaaggctggtgagaagctggaaaatgaagcagaattgcaaagagaagcagggaagaaaagttcagaaggacccagaggtagagatacagagagaaaagtgaaaaacattcactatcatggatcctggtgatttttagttcccacttctacctcctggtgaatcctagttgtatttgtactgtttaattcactaaaaataatccatttctgtgtagtgaaaaaacctcccttcttaaaccaacgtaattatctcctgcagccacatgatttctaagataattcgtatttctaacccttgcaacaaaaaacagctaattcctaatttattcatttatatacaattaaaacaaaaacaaaatgctttgtcagaaacaaaaaactcaggagaaagaagtcaacacaagaaagtttctcattaaaaattaaatttttggctgggtgcggtggctcatggctgtaatcccagcacttttggaggccaaggcagaccacttgaggccatgagtttgagaccaacttggccaacacagcgaaaccccttctytactaaaaatacaaaaattagccaggcttggtggcacgtgcctgtaatcccagctactcaggaggctgaggcataagacctacttaaacctagaggtggaggttgtagtgagccaagatcatgccactgcactctagcctgggtgacaaagcaagactctgtctcaaaaaaaaaaaaaaaaaaaaaaaaaaaaaaatttctgaga

SEQ ID NO: 723768 - DNA, 1238 bp, Homo sapiens
gcctggccgacacacatctgggcaatgacctcacaacccctgggagcatctaggcacaaccagttttgtgggtggcggttggagaaagctgggggccagcccagggcaggatctccttcctgggctctgcagcagtttctcatctactgcagtggggttctggccagagcagtcagaaagcatgaaggaggcactgctcgcttcctccacgtgactcctggggtgcaagctggggcagggaccccggctctgccagaacccccagggggctagcagggtctttgctggattatatttctccttcatttcattgttctccccagtgaattctggggattctgagaattccattttgccctgaatcatacgcagctcttttgacagcttcagaagtggacgtcctgttgtgtgcagcggggagaatgtcaaccctatgattaacgccccacatggtggtgggaagaggctgggatgcctcaagtcccaggcccagaggatggtgggcctcacaaaacttgggtgcagggtgttgcagaggtccgtgcaagaagggaccccgaagctggaagctaaccgccactggcttctcaggaagtccccttgaccagaacccagtcccagacakatgaatcagtagccaaagagggccacaaactctgggtgctggccccgtgcctggctctgggggcagagacacacgggcccttagggctgagaactcaggtggaggggtctggggtgggagggttagtggcaaggaatgcacgggaagaacacagtcagcggccatggacctggatcctgttcacgcacctcaggcccacacggtgggcaggacgggttagagccgccacctgggtccaatcggccgggtgggggcagcccaggaaggtgttcccaggagcagaccccaggttccctgttgcagcccatcccgtggcccgcaggctgcctaatctccctgctgcagctcccatttgcttggcctgcagaaggttttcaaccacagccgagcaaggtccttaggcaccttcaaggctgagacattcgcccctgatccactgactgtgggctctcgggagagcggccacacccctctcaccatcaacagtcacctgggcctggccctcatgggagacagactcggccagcacctcccactgccccctagttgggaggaaccccactctcacctggggctcccgtctgcaagctccaggtggtaggaccgacctggg

SEQ ID NO: 723769 - DNA, 578 bp, Homo sapiens
gactggtgggagtggggtgttccttcggggtacaagatgtggccctagcctagctggagcttcctcttggagctctgacctccagcctggcccttccctcggagggaaggtggcccctggctgctccctcctctggggccagagatgggggctggggctttgttcttgtaccactttccttcctggggaggggacttggctcctrgccagaatggaccttccatgtcagtagcctggggagggggacacttgagagctggtgggagcgcatgggcaaactgcccttggcactgtccctagacagtcagtctctgtggggtctcctaggaagagcttcctggactctgtcacggtcagggagctacctctcctgatgcctgcccccagtggtgcacctgggccccagcccccagggcagacttgtggcttctgggctggagctcagggggtcacaggaaggtgggcagcccagtaggtatggggcacacggggggaagctcactgcgaaggagctgcagagctgagtgcgcaccttcttgggccaggccttaccatagctgtagcaccgtctgccgcag

SEQ ID NO: 723770 - DNA, 1465 bp, Homo sapiens
ccaaatcccccggtccacgagcagcagaggtgggaggagctgcaggggccaggccacaatcagcaggggccagggcagccagtccctctattctgcagcccctggtctccaccttgatctcacctccaggtagggctccctgtgtggccattggccaggagcccccaccctccttcccctcaagtccaagccccctggcaggtctctggccagggcagagattaggagctggctctcagcctccctgcccctggctgcctcctggccgtgcccataagccgggctcctggcagtgatgaccccagagytcagaccctcacagcccagccttcacccctggtgcccagaccagctgctattttggggctgtgggtgccaggaacagttggcagctgggtggggtggggcataggggataatgtttgggaatgaattaaaaactaaaaaatgaaatgatacagggtgactccctccagcttattagagggatggagaggccttgcccgacagtgagagcacagagcagagaagtctgcctctgcttggtgaccctgtcccgaggtgccaggaaggtagcagggtcttctcaagtcaccgctagccagggacatgggccagaggcagccctggaatccagcaggcttggcattggtcctgggaccactcatgacatgcacgtgcacacacagacaccctggagccttatgtcctgtggcccccagggctgccacagagccagaaagcaggaccctccctcacgggcaccgccagaaagcaggaccctccctcacgggcaccgccagaaagcaggaccctccctcacatgcaccgccagaaagcaggaccctccctcacatgcaccaccagaaagcaggaccctccctcaaatgcatcgccatagccacactcctccaccctggactctggcctggcctgacggaggctgctggttattcaccagatggaggcccaggctccatgtcttcagccaccgtgccctgccccagcatcaagttccctccgcactctatttcctccttggtagaggggaaaaataaagccagtgtctcccacggttgcctcggggtaaccggtggcaacaccatgaatgagatcaagaagaggctctccaggggaagctgaggccagggtggggcccagcccggggctggggatgtgtttcagggggagcacggccaggcacccgcccccctccccccgcccctccttgccatcctcatccctgcagggctgagacacgcaggtcattccggctccttttctggaactcagcatcagccaagccatgatcgccacagagatggccacacccctcctcttctcagctttgcaacccccaccccagctggccaggccagatcccagaaggcagccctcaccacccagaagactcacagcaggaatacagggatacaggggcggaaataggccctagtgctgggga

SEQ ID NO: 723771 - DNA, 1563 bp, Homo sapiens
gatcttgctgcaaagtgatgatgcttcattctgcccagagagctccacaatcacctccctctgaaagcccccctccttggagcctcctggctcccacacagaggcaccgtgtgccagggactgggccccatccggaggcagcttggactccacgtttgctcattctgccaaaaagaattcgtggcaaataacgttcacacaagcacagccagcggtgggcagaggtgggtgcctgttggcttgttttaattttttaccatttttatcatggaatatcatatcacaggagaaagtgcaaaagtgcgtgtgtctaagtgactatgaatcagaggccaaatgttgtcagccctctaggggccctctgcgtccctccctccagagaggaacgccatccatgtctttcctatcattgttcctgactttatttttttcctcmgttttttaattgtgataaaatatacgtaacataacgtatatgaccattcatagctgaccattcttgccactcataagcacccagttcaggagcatcaaggacattcccatggctgtgcagccgtcgccaccatccatttccagaacttttccaccttcccaaactacagctctgtccccattcaacaccgactccccatcccctcccctcaagcccgggagacgcctgtctatcttctctgtgaatttgatgactctcgtgtttcttatcattggaattccagttccagtggaatatgcattccattggtacttgtccttttgtgacgctcatttcatttagcataacgtcctcgagcttcatccgtgctgtcaagggcgacaggctccccttcctctttaaggctgaatcattttccgctggatggacggacacattcgcttctccgtccatctgtcgacggacacgcaggtggcctccaccctctagcccctgtgaacacaggtgtgccagtattttttcatgttcctgcttccaattctctggagattgacccaaaaggggggtttctggatctctgctttcttttacctctttatatgcctcctagataccatagtctgcagctttgcctgttcgtgaactctctgtaaaaggactattctcagtgtgttcttctgatttgctgctttcctgccatctcagttctaaactccgtcctcactgcacgtgtgactcttgtccacgcacgtttgtggctgtgtcgcgttcccggcgtggccacgccgccacgtattgatctgcccgctgcagacacctggcctattttccaggactctgcaggcaggggcacccttcgccagagtgtgtgcagggcctttctgtagtgccctcccccagaagcacatgggcccgtcggcccccgcgtcctcggacacgcaatgctgtcggtcgttctaaccgggctgtcctgacgggcgcgcagcggcatcccacggcagtgttcacgagtgttgccccgtgtgtggggaggcgcctgttcagctgtgccacccgtttttctaaggagtcctctttttcttgctgattcagagtccttcatattctggttttgagttcctgtgagt

SEQ ID NO: 723772 - DNA, 619 bp, Homo sapiens
tttggtgccgacccgtttaacccttatgttgacctgacaataggcattattaccacattttactggtaagcaacctgaggcccagagagacagagcaacttggccaagatcacacagcctttaagaggcagagctgagatttgaactgaggtctgtgtatttgcaaagtctatgcctgggcaaaaatctcaggagagatggagtgagttgactcaaaccaccgcrtactggtcccagaccaaatgggggacaggcctcctgcacagccaggagcacccacccaaggaccaagatctcatctgagagttctgtgtctcacctaccacctggggtgtggagtggggaagaacccagcctggccttgggctgggccaccaccctgtcttcccacacctggtcagcctgctccttcccaaatcaagcatgcagtgtcgcccaggtaaggagagagcctccagcgccacctgctggagatgcagtagcagcgccctccaggggaccctgcatccccagagtgtctggggagagtggggtgagatataatgggggaaagggagggggtcagtgcgtctcgcaggcaattatctcctatacttgaccccatgaacaggggtgagta

SEQ ID NO: 723773 - DNA, 2403 bp, Homo sapiens
ttgatggggaacatatcagcgggtaaaggaggaagggaagattgtgaccataaatggctaatataggtcatttttgggggttatagtgccattcggtgtcctgattttggaattgtgtcaaaaaagattcaatttttactgtataataaataaaatcataaaattaaaatcactgattgtaatgtactacattctggaaacaattttttttwaaaaaaaactgtatgttaaagctattctggattagtcaggagttgaggtacaaataaaaaaggttaattttttttgttgtttcatgtagcagacatattctatgtgagataatgatcaatataaaaaatcactgcagatcaatctcaaactgacatttgaacagtagtaccaatatttatcaatcctagagaaagaggattctggattgctgcacctctcattgtctttcttcctctatatcttaccttgtaagcctgagctgatttatcaatgcattatcagttggtttaacaatttgattttacttcttttgtacatggagattgttctttactaaggccatagagcatattgatatgatgttttttcaaaggaatgcatgctaaataagcatcacttagagacctggtgagatatataagaactcaaaaatgtgagttttgttcctattttagggtttgttattttgtgttatattgattactcaattgtcttgattctatcataattttaattaacttgagaacagaaattatacattgcattcctatttccagcaacacagttatatgttctgtagacagcaataaacttattgaaaataaataaacgtgaaatgctctaaaggtgaaaataaaggtgaaatgatatatctgagaggaatgtgggtttttttttatgtttagatctgtacagtgtaggattgtcctacatagggatctgtgcagttgtttattattttatactgtaacactcaaggatacaaagacaaaatatctgttgaattgctcatttttatgagtgtcatagcaaggaattacgaagtgaatacaagtaaaagtcccaggctggttctttggtatggggccaacttctgtcagtatttctaagaagtaagaatatataattaatgtgccagagggctaaaatcaaaatggcactgtctctgtataattatcaaaggacatctcaatagcagcaatatgaaggggaaaaataatgtaattattaacataatgattttatttaagtggagagaacagcttaaacttttaatgtctgtttccatcaatgtttttttaatccaaactgttttcatattggcagacctcggtttctaagcttctattggaaaagtgtcaaggatatggggggaaaagatatgtgtgttaagatacaaggtccagtctcaaagaagatatattataatgtgtgtgtgtgtgtgtgtgtactggttttgctccattttcttacagatcaattttctatccgtctatgccttcttttgaggccataaatactaatctctaatgctacctttcattcttgcttctcctttggtctggtcgagggaaggtacaattagcagatcccaggaagagaggaaagaacatctgggttcttattatccccccacctgtctgctgcttatggtttgacagtgattgtgtttctttccttgcagtcagagctcttatcatctgacctctttcttttggctacagcttttgtttagctctggttacactattccatcttcttacccttatgaatctagaggtactcatggtttctcactgttcttagtcactgtgtgcttcattgtatcttatcgattctcttattcttggttacaccttggtaaatagttctttcattgcatcctcttcaattaatactttaagtgtgctatttatggcctgaatttggactgatatagactggatgggtgggaggcctttatcgctactctgtttaatgctctccttcatacttctaaacgtaaatgaaatacattttatttcatggcattttattgtgaatataatctctatactattacttggtatttcatacctttttgttgagaagattattgcaacaaatttggaaatgagggaacttctaagaagaaagaagtggctttacatgaattgccagcattttctttttcactggggtaaagttgaccttttctgaaacctttctctaatggatgacattatgaagaaaggtatcttccacctcaaagggcactgtttggtctcatcttcattcaaagagtatagagtccaagatgaaagtaaacctggcgtgtttacctgaggcgtttgggataagatgccatttaatcttttggataaaaatgggaagaagtcttggggtcatctcctagaattaatgagaaaa

SEQ ID NO: 723774 - DNA, 2403 bp, Homo sapiens
ttgatggggaacatatcagcgggtaaaggaggaagggaagattgtgaccataaatggctaatataggtcatttttgggggttatagtgccattcggtgtcctgattttggaattgtgtcaaaaaagattcaatttttactgtataataaataaaatcataaaattaaaatcactgattgtaatgtactacattctggaaacaatttttttttaaaaaaaactgtatgttaaagctattctggattagtcaggagttgaggtacaaataaaaaaggttaattttttttgttgtttcatgtagcagacatattctatgtgagataatgatcaatataaaaaatcactgcagatcaatctcaaactgacatttgaacagtagtaccaatatttatcaatcctagagaaagaggattctggattgctgcacctctcattgtctttcttcctctatatcttaccttgtaagcctgagctgatttatcaatgcattatcagttggtttaacaatttgattttacttcttttgtacatggagattgttctttactaaggccatagagcatattgatatgatgttttttcaaaggaatgcatgctaaataagcatcacttagagacctggtgagatatataagaactcaaaaatgtgagttttgttcctattttagggtttgttattttgtgttatattgattactcaattgtcttgattctatcataattttaattaacttgagaacagaaattatacattgcattcctatttccagcaacacagttatatgttctgtagacagcaataaacttattgaaaataaataaacgtgaaatgctctaaaggtgaaaataaaggtgaaatgatatatctgagaggaatgtgggtttttttttatgtttagatctgtacagtgtaggattgtcctacatagggatctgtgcagttgtttattattttatactgtaacactcaaggatacaaagacaaaatatctgttgaattgctcatttttatgagtgtcayagcaaggaattacgaagtgaatacaagtaaaagtcccaggctggttctttggtatggggccaacttctgtcagtatttctaagaagtaagaatatataattaatgtgccagagggctaaaatcaaaatggcactgtctctgtataattatcaaaggacatctcaatagcagcaatatgaaggggaaaaataatgtaattattaacataatgattttatttaagtggagagaacagcttaaacttttaatgtctgtttccatcaatgtttttttaatccaaactgttttcatattggcagacctcggtttctaagcttctattggaaaagtgtcaaggatatggggggaaaagatatgtgtgttaagatacaaggtccagtctcaaagaagatatattataatgtgtgtgtgtgtgtgtgtgtactggttttgctccattttcttacagatcaattttctatccgtctatgccttcttttgaggccataaatactaatctctaatgctacctttcattcttgcttctcctttggtctggtcgagggaaggtacaattagcagatcccaggaagagaggaaagaacatctgggttcttattatccccccacctgtctgctgcttatggtttgacagtgattgtgtttctttccttgcagtcagagctcttatcatctgacctctttcttttggctacagcttttgtttagctctggttacactattccatcttcttacccttatgaatctagaggtactcatggtttctcactgttcttagtcactgtgtgcttcattgtatcttatcgattctcttattcttggttacaccttggtaaatagttctttcattgcatcctcttcaattaatactttaagtgtgctatttatggcctgaatttggactgatatagactggatgggtgggaggcctttatcgctactctgtttaatgctctccttcatacttctaaacgtaaatgaaatacattttatttcatggcattttattgtgaatataatctctatactattacttggtatttcatacctttttgttgagaagattattgcaacaaatttggaaatgagggaacttctaagaagaaagaagtggctttacatgaattgccagcattttctttttcactggggtaaagttgaccttttctgaaacctttctctaatggatgacattatgaagaaaggtatcttccacctcaaagggcactgtttggtctcatcttcattcaaagagtatagagtccaagatgaaagtaaacctggcgtgtttacctgaggcgtttgggataagatgccatttaatcttttggataaaaatgggaagaagtcttggggtcatctcctagaattaatgagaaaa

SEQ ID NO: 723775 - DNA, 874 bp, Homo sapiens
ctgaacaagtagtctgcacggatgcataaaggcatgaagaggccaggatgatacactgaagtgcgaagttggggagcattttgatgtctatgaaactggagaggtaggcaaaggacagtttaatggtcttatgtgtcattataataatgttggacttcctactgaaaataattgagagacactagtgagatgatgagtgtggattgggtggtgtctgttattacaggcaggaagaacagaaagttttctaagacattaaaacaagtaatagctatagcctgagtttaaaccaatatgatgcatgtatagaacaacactgactttgagaaaggagaatttacaggagttgaggactggatgtggaaagtagaggagattgagcatatcatataggaatatttttgtatgcaatttacagaaaatacagcttacatttctaaaagaaataaaggtttcttcttcccacataatctacccagcagtatggattgctgaagctctactgtgtcatttagggaccaaatttctgtagtcttctgcttcatgatccytgctgtgctttttttttttttttttttttttttttttggcatctggctctgtcaccaggctggagtgcaatggcatgatctcggctccacctcccaggttcaagtgattctcctgcctcagcttcccgagtagctgggactacgggcgtgtgccaccacacccagttaatttttgtatttttagtagagacagggtttcaccatgttggccagaatggtcttgatctcttgaccttgtgatccgcccacctcagcctcccaaagtgctgggattacaggtgtgagccactgcgcagcctgtgcttcctttttgttcttgctta

SEQ ID NO: 723776 - DNA, 545 bp, Homo sapiens
tgcctgctagagagtgtaggtagattccrggtcccatgtagtgcagcaagagggcaggcagatatgaacaggtataaactatacagtgtggcaggaactggagcataggtaggcacagggaaccatccaaattactcctgtgaggagggtgagacagagtagagagaggtgtgtgtgaaggatggatggggcataacatgacaggagaggaggatgggacatgagcctgagaggatccagaggccagatcatgaaagagcttcacatccatgctcaggagattaaactttatgctagaaataatggggagacatggggaagtcttaagccataggaaggttttaagattattataagcagatgattgattgtatttacagtgtggagaatggattggaaggaagcaaagataaatatagggagactagtaaagatgggtacactgatccagattagaaatgacaatgaacagacctgctaaagaggcaaatggaaaaaagaaaaaaagtggatcgattcaaggaggcaggaaaggtatggatttg

SEQ ID NO: 723777 - DNA, 545 bp, Homo sapiens
tgcctgctagagagtgtaggtagattccgggtcccatgtagtgcagcaagagggcaggcagatatgaacaggtataaactatacagtgtggcaggaactggagcataggtaggcacagggaaccatccaaattactcctgtgaggagggtgagacagagtagagagaggtgtgtgtgaaggatggatggggcataacatgacaggagaggaggatgggacatgagcctgagaggrtccagaggccagatcatgaaagagcttcacatccatgctcaggagattaaactttatgctagaaataatggggagacatggggaagtcttaagccataggaaggttttaagattattataagcagatgattgattgtatttacagtgtggagaatggattggaaggaagcaaagataaatatagggagactagtaaagatgggtacactgatccagattagaaatgacaatgaacagacctgctaaagaggcaaatggaaaaaagaaaaaaagtggatcgattcaaggaggcaggaaaggtatggatttg

SEQ ID NO: 723778 - DNA, 545 bp, Homo sapiens
tgcctgctagagagtgtaggtagattccgggtcccatgtagtgcagcaagagggcaggcagatatgaacaggtataaactatacagtgtggcaggaactggagcataggtaggcacagggaaccatccaaattactcctgtgaggagggtgagacagagtagagagaggtgtgtgtgaaggatggatggggcataacatgacaggagaggaggatgggacatgagcctgagaggatccagaggccagaycatgaaagagcttcacatccatgctcaggagattaaactttatgctagaaataatggggagacatggggaagtcttaagccataggaaggttttaagattattataagcagatgattgattgtatttacagtgtggagaatggattggaaggaagcaaagataaatatagggagactagtaaagatgggtacactgatccagattagaaatgacaatgaacagacctgctaaagaggcaaatggaaaaaagaaaaaaagtggatcgattcaaggaggcaggaaaggtatggatttg

SEQ ID NO: 723779 - DNA, 595 bp, Homo sapiens
tgtgccctttctttacagtgatgatcaaagtgattctcccaggccaaaaaatcaaataagaagttaattttaaaaagacaaaacaagccattctacccagtgggcatcttcagtgtactccctctactaattggctctctggcactgtgacttaccacttgttgcagtaatttttgcaaagtgtgaaatgactgatacagatttatgcaaatatacctacgctatgttatggtatatattatgctcttctgttccattctatgttattttcctttatcaaaggctaattgtgacccacaaaattgatttgatgacccactcatgtgggtgattcatgctatatgacacaatggaggataaagagaagcattgaaaattcacacacttaaaacttgggcatatcctattgaaagtatctgcgttactcacaacacaatctctgtcattacttcatcttcctctgcctgcttcctactcacttttcaattatatccccaaaggtaacttctcatctctctccctgcattaataatcactcrtggaattaggagttcttacaataaggagagacatttttaagaattgctgggatgtg

SEQ ID NO: 723780 - DNA, 3134 bp, Homo sapiens
tcagatccaggcagtaggctgcctgctggtatgcaatggaaatgggatggaagttgcaagatttcatctttttctctcttcaatgccattttagtcggaaattggaagagattatttcaggagatgctttccacaagattagtaagggggaagcctgaattgttaaagatggcacatacaacccaaaaacttaatgcgtcaaattattattattttttaagagtagcccaggatggagtgcaatggcaagatcacagcccactgcagcctcaaagtcctgggcacaagtagtcctcctgcctcagcctcctgagtaactgaaactacagacatgtgtcaccatacctggctatttttttcatgtttgtagaaacatggtctttctatgttgtccaggctagtcttgagctctcaagcaatcctcctgcctcagcctccagagttgctaggattacaggcatgagccaccatgcccagcaattaatgcaactactacttgtgtaatttaaataaataagagatgtaaagtgtaaaatatgtccatgtgataaggtaaattatgtgacacaaaaatagaggttatagggagaaaacacaaactggccggtagaaaatgttcttatttagaagactctaactttaatgttctaaaaactaatgtgattaatattaatgtttctaggttctttcgttattaatcctcaaaagactaatcaaagaatcacttgtacatttatattttgataattatatcatagctgaattcactattcattggctatctggatacagttattgctgtcctcgtagtccttatgtgttagtataatgtgaaagtccacctggtatatgtgaggtcctcaaacggcataaacaaaattggaaattgcatgagaaattgcagctagatcagtgaattgaggaaagataaggggctcaatgttgactcaacagagttgggaaacttgagaaatctttatcttcacaatgtaaaacaaatctagctaattttaagataatccaaagcatgtataagaaaaatggaattttcaaggaaggcatcaaggactgatatagatcttgtgtagtcaacggctgataacagttgttttctccacctaattatagagggggtgtattattttggaaacaactttatgtttatttaaaacttaaagagagatttgatgtaatgagtcctacttacatcaaaaactgaggactatgagtcttttcagaaagcgggtagcatctgtcatatacaatgtgcctattctgctgggacttgcattccacctcttttttccaagaacgtgttcacaatgagcactaaaacgcagtcgcatttctgttatgtggaggaaacagcacaaacatcttttctgccctagaaatttgaattctgggttggagtcttcactttgtaaactaatctcagggaaattctagcctctgaattattcatttgctcaaagataaatcttcctttaccaagcatatattttaaagtataggaataactcatgaaattttaggcctacaaagaggtggtgggaaggaaaaggatgagaagatctaaagtttgataaaatgacttctaaaatgtagtcttctgttggaggagagataaaagcagcatgatttagtccaatggtttgtttcttttgcctcagaactacttatttttycagggaaatgctaatgcagaagttcaatatgtaaaaatcaatgtctaactctgtggttgaaagaggatggatatcccaaagtttgacccacagtatgtctgtttaccactctctccaagccccaagaagatatcatgggttattcctgaacagatttccccagaatgccccagaactgcggagaacactgtgaataaactggacatactgctaggaaaagcaggggccataactcacttctaatctaaaactcattttctttcttctttaacttagaccagtttcacagagcttttgtaaataagcatgatgattttaaaacgatctcttagcctgacatgagaggctttcaatttaatttttattccattcctccactgtgatcagaaccactttatacatttacagttttcgctaacagtatttcttcaaaaattaatagatgcacacgtagaaattagtataaattgcctagaatcatccatcttcctctccactcagaaatgcacatttcaagtgaggtacccaatgacaaaattatcttactgaaatttgtttcaattttacctgttaccaatttttaggtgatggagaagtgattactaaacacaatttttagtggtgagattcaataacaaaaatgcataatatctccccacaggccatcttcctacttcatattctctggtcgtcacaagtaaaaattatgaaatggggtgctaaaatctagaaatagaattgtctcttgtgcatgctgttaatagggtatgtaacaacatgggtggaagtaatttggcattgtatatctttttcatcttgaattccctgcagtatcattttaaacttttaaagcttcattttatttttactgtgcttcttagagaacacacaataaggtaagaattatatatctattgtaacttcataaatgagaagttaaaagctcatatatcacagacacacaagggaaggcttcagagtttcctccatctataaaatgaaaagcctcatccaaatcaagatgtgataggatatacattcggtaccttaaaaatattagattctgatctaatatgttagacccaatgcagtctgctccccattatctattcttcactttttctgaatataatccttatttttagaggtgcacgatacctggaattggactacattttccagcctttttgcatgtaagcatgaccaaagagagctaatgagattcagccaatgtactgcaaagagcttctgcaaacactccttaaaagacaactcatgtaggccaaggtgagagaattgcttgaggctaggagttcaagactaggagcctgcacaacataatgagacccccatctcctcaaaaaataaaaataaaaataaaccatcagctgagcatagtggcatacacttatagtcccagctacctaggaggctaaggcaggagga

SEQ ID NO: 723781 - DNA, 923 bp, Homo sapiens
taactgtaaatactttgtcttcaacatgagtccattaaatttaagaatcagagtagcaaatagtggggaaaaatacagtakcaccaacttcaaaatatttacaattactgtttgcagttttgatcataaattgatcagtaattctaaacataacatttaaaaatcataactatcttgagacatttttgacaatttccattaaatcctatgaaaacatagttgaaaatctatgtatatgcataggtatttgcaaaaaataaagataaatgtgaaagctacttcctaatcctacattttaaatttcagttccaaatgccatcgccattggaaataaaagcaacaaaaacaaataatatccaatttaaatttttcaataaattaaatatactcaaatttttttaaaaaaattctgttctctataattttggtttcgtgttcaaaatcagtatattccctcaaactgtctttgactgagattattttggatggggaaaaagccggaaatcctctattgcactgtatctcagtggccactttatatctctaactacctaaaagtaaactgtacttggactcaaagaatctgggttcaggccctaggcccaatactatgtgacttgatcaagtcatttcgcccatctggggtagttttgtgttttgtgtttttgttttttaactgtaaaataaggagattggactgaatgatcttcaactctgactttggttgttgggaagattgcaatgcaatgccatttaatgaaatagacagagagagagagagagagatcagtagaccattcttctttcatatggcaaaaaggaagaaaagaaggaaagaaggaaggaagggtgaagggagagagaaggatagaaggagggagaaagacatagatctttgtcatacacctcctggtctactcagg

SEQ ID NO: 723782 - DNA, 923 bp, Homo sapiens
taactgtaaatactttgtcttcaacatgagtccattaaatttaagaatcagagtagcaaatagtggggaaaaatacagtagcaccaacttcaaaatatttacaattactgtttgcagttttgatcataaattgatcagtaattctaaacataacatttaaaaatcataactatcttgagacatttttgacaatttccattaaatcctatgaaaacatagttgaaaatctatgtatatgcataggtatttgcaaaaaataaagrtaaatgtgaaagctacttcctaatcctacattttaaatttcagttccaaatgccatcgccattggaaataaaagcaacaaaaacaaataatatccaatttaaatttttcaataaattaaatatactcaaatttttttaaaaaaattctgttctctataattttggtttcgtgttcaaaatcagtatattccctcaaactgtctttgactgagattattttggatggggaaaaagccggaaatcctctattgcactgtatctcagtggccactttatatctctaactacctaaaagtaaactgtacttggactcaaagaatctgggttcaggccctaggcccaatactatgtgacttgatcaagtcatttcgcccatctggggtagttttgtgttttgtgtttttgttttttaactgtaaaataaggagattggactgaatgatcttcaactctgactttggttgttgggaagattgcaatgcaatgccatttaatgaaatagacagagagagagagagagagatcagtagaccattcttctttcatatggcaaaaaggaagaaaagaaggaaagaaggaaggaagggtgaagggagagagaaggatagaaggagggagaaagacatagatctttgtcatacacctcctggtctactcagg

SEQ ID NO: 723783 - DNA, 923 bp, Homo sapiens
taactgtaaatactttgtcttcaacatgagtccattaaatttaagaatcagagtagcaaatagtggggaaaaatacagtagcaccaacttcaaaatatttacaattactgtttgcagttttgatcataaattgatcagtaattctaaacataacatttaaaaatcataactatcttgagacatttttgacaatttccattaaatcctatgaaaacatagttgaaaatctatgtatatgcataggtatttgcaaaaaataaagataaatgygaaagctacttcctaatcctacattttaaatttcagttccaaatgccatcgccattggaaataaaagcaacaaaaacaaataatatccaatttaaatttttcaataaattaaatatactcaaatttttttaaaaaaattctgttctctataattttggtttcgtgttcaaaatcagtatattccctcaaactgtctttgactgagattattttggatggggaaaaagccggaaatcctctattgcactgtatctcagtggccactttatatctctaactacctaaaagtaaactgtacttggactcaaagaatctgggttcaggccctaggcccaatactatgtgacttgatcaagtcatttcgcccatctggggtagttttgtgttttgtgtttttgttttttaactgtaaaataaggagattggactgaatgatcttcaactctgactttggttgttgggaagattgcaatgcaatgccatttaatgaaatagacagagagagagagagagagatcagtagaccattcttctttcatatggcaaaaaggaagaaaagaaggaaagaaggaaggaagggtgaagggagagagaaggatagaaggagggagaaagacatagatctttgtcatacacctcctggtctactcagg

SEQ ID NO: 723784 - DNA, 923 bp, Homo sapiens
taactgtaaatactttgtcttcaacatgagtccattaaatttaagaatcagagtagcaaatagtggggaaaaatacagtagcaccaacttcaaaatatttacaattactgtttgcagttttgatcataaattgatcagtaattctaaacataacatttaaaaatcataactatcttgagacatttttgacaatttccattaaatcctatgaaaacatagttgaaaatctatgtatatgcataggtatttgcaaaaaataaagataaatgtgaaagctacttcctaatcctacaytttaaatttcagttccaaatgccatcgccattggaaataaaagcaacaaaaacaaataatatccaatttaaatttttcaataaattaaatatactcaaatttttttaaaaaaattctgttctctataattttggtttcgtgttcaaaatcagtatattccctcaaactgtctttgactgagattattttggatggggaaaaagccggaaatcctctattgcactgtatctcagtggccactttatatctctaactacctaaaagtaaactgtacttggactcaaagaatctgggttcaggccctaggcccaatactatgtgacttgatcaagtcatttcgcccatctggggtagttttgtgttttgtgtttttgttttttaactgtaaaataaggagattggactgaatgatcttcaactctgactttggttgttgggaagattgcaatgcaatgccatttaatgaaatagacagagagagagagagagagatcagtagaccattcttctttcatatggcaaaaaggaagaaaagaaggaaagaaggaaggaagggtgaagggagagagaaggatagaaggagggagaaagacatagatctttgtcatacacctcctggtctactcagg

SEQ ID NO: 723785 - DNA, 923 bp, Homo sapiens
taactgtaaatactttgtcttcaacatgagtccattaaatttaagaatcagagtagcaaatagtggggaaaaatacagtagcaccaacttcaaaatatttacaattactgtttgcagttttgatcataaattgatcagtaattctaaacataacatttaaaaatcataactatcttgagacatttttgacaatttccattaaatcctatgaaaacatagttgaaaatctatgtatatgcataggtatttgcaaaaaataaagataaatgtgaaagctacttcctaatcctacattttaaatttcagttccaaatgccatcgccattggaaataaaagcaacaaaaacaaataatatccaatttaaatttttcaataaattaaatatactcaaatttttttwaaaaaattctgttctctataattttggtttcgtgttcaaaatcagtatattccctcaaactgtctttgactgagattattttggatggggaaaaagccggaaatcctctattgcactgtatctcagtggccactttatatctctaactacctaaaagtaaactgtacttggactcaaagaatctgggttcaggccctaggcccaatactatgtgacttgatcaagtcatttcgcccatctggggtagttttgtgttttgtgtttttgttttttaactgtaaaataaggagattggactgaatgatcttcaactctgactttggttgttgggaagattgcaatgcaatgccatttaatgaaatagacagagagagagagagagagatcagtagaccattcttctttcatatggcaaaaaggaagaaaagaaggaaagaaggaaggaagggtgaagggagagagaaggatagaaggagggagaaagacatagatctttgtcatacacctcctggtctactcagg

SEQ ID NO: 723786 - DNA, 923 bp, Homo sapiens
taactgtaaatactttgtcttcaacatgagtccattaaatttaagaatcagagtagcaaatagtggggaaaaatacagtagcaccaacttcaaaatatttacaattactgtttgcagttttgatcataaattgatcagtaattctaaacataacatttaaaaatcataactatcttgagacatttttgacaatttccattaaatcctatgaaaacatagttgaaaatctatgtatatgcataggtatttgcaaaaaataaagataaatgtgaaagctacttcctaatcctacattttaaatttcagttccaaatgccatcgccattggaaataaaagcaacaaaaacaaataatatccaatttaaatttttcaataaattaaatatactcaaatttttttaaaaaaattctgttctctataattttggtttcrtgttcaaaatcagtatattccctcaaactgtctttgactgagattattttggatggggaaaaagccggaaatcctctattgcactgtatctcagtggccactttatatctctaactacctaaaagtaaactgtacttggactcaaagaatctgggttcaggccctaggcccaatactatgtgacttgatcaagtcatttcgcccatctggggtagttttgtgttttgtgtttttgttttttaactgtaaaataaggagattggactgaatgatcttcaactctgactttggttgttgggaagattgcaatgcaatgccatttaatgaaatagacagagagagagagagagagatcagtagaccattcttctttcatatggcaaaaaggaagaaaagaaggaaagaaggaaggaagggtgaagggagagagaaggatagaaggagggagaaagacatagatctttgtcatacacctcctggtctactcagg

SEQ ID NO: 723787 - DNA, 2072 bp, Homo sapiens
cagagactgggtagtgctgtgactctatgataaaataaaattgggaaaacgctgtattaaacaagataaacagacttcatattgtcaattttatcccagattttaatatgctacatgcattttgaatctccactagacggacttacaagtttgtaaatacagcatttacaaacttatttaattattgcttctaaaggaatttaaaggtctttgaagtatttttagaaaatactgagctaaatcaaagtgggaaaaaaatgtgttggaacattaaagggaccgttctgtctagaagggaatattgtaatatagtggagaagtgaagttggcttggctacaagcagccaagccaaagagggccttggtaccatgattcccacttttgtgcacatttacaagagggagaatattcatgttgcttctagaagccacaatcttggtcttttcctcgctattacagcccattaccttccttcatctaaaaaggagagttgaatgaaagtttctctgggcatgactcttcactcctcttgagtcctcattaagatgaagcagaagagttatgcaggtgtgggagtggatcccctcattatttaatactttgatattttgtttatcatgtatttattggtattcaatttcatttttcagaatattccattaaaatcatatcttgaatactagggtttgtttggaactcccttaagttttgcccctaaggctagctagggcctccatcatttcatctcatcctggcccagccctaggtctgtgggtattgagaacttaccgagtgatttcaggcttccttgcttcattacgagcatctttatttttttaatatgttattaaatataagtacaaattgcaatcactgcatattcttccacaaaagaatgtatcttttaggccaagctctggtggctcatgcctgtaatcccagtactttgggaggccaaggctggcggatcacaaggtcagaagttcaagaccagcctgaccaacatgatgaaaacccatctctactaaaaatacaaaaattagccaggtgtggtagcgtgtacctgtaatcccagctactcaggaggctgaggcaggagaatcacttgaacccaggaggcaaatgttgcagtgagccaagatcactccactgcactccagcctgggcaacaggctgtctcaaaaaaaaaaaaaaaaaaaaaaaaaaagaatgtatcttttaactttctgtatctacttgaagtattgatagcagatataacagaattttgaccttcactatgtaagggtgattgtgtgtgtgtgtcctgtgcttacctggttatcactctttaacaacaaaaatatggattatctgcttattactatgtaattttaaagaagtagacattcctgttttgttgtttccgtctgttttagaattgtctttgattttatttaaatacattgcaaacacattacacttggggcttattttctttcattcccataagtgtatctttgatgttaaattaattagattctcctttagtaaataaaatagattccattatcaaatctttacaagagtttaaaagaggcagttcccgccaggcctagtggctcacgcctgtaatcccagcactttgggaggccaaggtgggctgatcacttgaggccaggagtttgaaaccagcctggccaacatggtgaaaccccgcctctacctaaaataaaatacaaaaatcagccgagtgtggtggcacacacctgtagtcccagctactcagggaggctgaggcaggagaatcacttgaatcttggaggcggaggttgcagtaagccgagattgtgccactgcactrcagcctggatgacagagcgagactccgtctcagaaataagtaaataaataacaataaaaggggcagttcccaccagtgccactatgaaggtaaacttttaccagagtaaaaaaaaaaaagtaggaaaaaaactgtttttttaaaaaaaggttatttggccagtattctttcctttgtcaatgcagttatttttctctgaattcacatctttgcccagagaatatattt

SEQ ID NO: 723788 - DNA, 586 bp, Homo sapiens
attccgtacctaagtatctaccctagatatacatagaaaattataatacgttgtatgtcatactggaataaagaaatgagaagcttgtgtttggaggcaaaagagtacagctccagccaccttagcccatgtgggtatcctaagggctcaggagatcaatatcttgcacttgtcctgaatggaaggttttatagtgagttagttaaaaaggcttcccagtgtacttcccatytttcagtctacccactcttttaggatgtgcagagaagatatatagtttacatgtgatcctgttgctctgttcctggaagggagttcaaaaggaagagacaagtctccattccaatattggtggtgttcttccaaccaggtgcaatgaatatttgctgttttatttaagaatattcagtatgctatgaaaaatgagaaaaataaggaaaatgaatgaaactaaatataaaagctagtggcttgtgagatatgttagacataaaagaagttgagcatatgtgtgcttaatttcagttgggaggaatagtaggaccaagagcaccaaatattcatacagtaaacatatatcaggcac

SEQ ID NO: 723789 - DNA, 586 bp, Homo sapiens
attccgtacctaagtatctaccctagatatacatagaaaattataatacgttgtatgtcatactggaataaagaaatgagaagcttgtgtttggaggcaaaagagtacagctccagccaccttagcccatgtgggtatcctaagggctcaggagatcaatatcttgcacttgtcctgaatggaaggttttatagtgagttagttaaaaaggcttcccagtgtacttcccatctttcagtctacccactcttttaggatgtgcagagaagatatatagtttacatgtgatcctgttgctctgttcctggaagggagttcaaaaggaagagacaagtctccattccaatattggtggtgttcttccaaccaggtgcaatgaatatttgctgttttatttaagaatattcagtatgstatgaaaaatgagaaaaataaggaaaatgaatgaaactaaatataaaagctagtggcttgtgagatatgttagacataaaagaagttgagcatatgtgtgcttaatttcagttgggaggaatagtaggaccaagagcaccaaatattcatacagtaaacatatatcaggcac

SEQ ID NO: 723790 - DNA, 1300 bp, Homo sapiens
caccatggaatactatgcagccataaaaaaggatgagttcatgtccttttcagggacatggatgaagctgaaaaccatcattctcagcaaactagcacagaaacagaaaaccaaacactgcatcttcaactcataagtgggagttgaacaatgagaacacatggacacagggaggggaacatcacacatggggtcctgttgggggttgggggctatgggagggatagcattaggagaaatacctaatgtagatgacgggttgatgggtgcaacaaaccaccatggcacatgtgtgtaacacatctatgtaacaaacctacatgttctgcacatgtatcccagaacttaaagcataatttttagaaaagtattcagctgaatgtgaatacagtcatgtgatctatgtcaatcctatggctttgttaacctgcagcaaattcacaatcacagaacaattaattgatcagatttaggcaaaggaactgcctcttaattattttggaggccaataacatcttttgacagagcatggtggctcacacctgtaatcccagcactttgggaggccgaggcaggcagatcacgaggtcaggagtttgagaccagcctggccaatatggtgaaaccccatctctactaaaaagacaaaaattagccgggtgtggtggcgcacacctgatatctaactattcaggaggctgaggcaggagaatcgcttgaacccaggaggcagaagttgcagtgagccgagatagcaccaatgcactctggcytaggcgacagagcgagacttcgtctcaaaaaaaagaataaaaaataaaataaaataataatcatcattttcctctgaatctacaaataggtatttttttgaatgttaattataaaaaaaattagctctcatatttagcaaacatagaaaattctccatgttacaattaaaaatctttcatagaaatatttcaaatatatatggcatgagatacaattatttcttcatgtgtcaatgaataagatttactactccaaaagaagttatctgggacaataaatctttacgttcaccgtatgaaagtatgaattctctttagtatgcgttatatgattttcttaaatttccctctgaaatgacatatgaatgagattgaaaggatccatcaggccatattcaataatcaataatgaatgacatattaatagactagataatgcaaaactgaacaccacaaacatgataaggaatggtcatcctcattttatcttgcatctgctttcaaatcaaaatgcagttgcaccatta

SEQ ID NO: 723791 - DNA, 861 bp, Homo sapiens
ttcaattataaatgcatcccaatatcagaaatgtaaaaatatacgtggcttaaaatcataaaatatggtaataggcacacaataaatatgtattgaataaacaattattgacctaaggacaaaaagcataacaatcatttttagaataaaatatagattaatttcttaaacaaaacaaaaagtataatatttgggaaggtctgatgagattgactttattaaaatttaaagcttctgtgcattaataaacactgatttggaaaacatattgccacacatataaccaggaaaggactagaatctaggaaagataattgactcctacatattaagaagaaaaaaaagagacagaaaaccaaatagaacaaacttgcaattaagttacaaaagaaaaatacaaacaaataaaaataaacctcagaaatatgtccaacttcattggtaatcagggaaaaaaacagacaaccaaataggaaaaacagaagattgtattataagattatacaaacttgcaattaaatcatataaattccaaacaagtaaaaaaaaaaaataagaaatatgttaaaccttgttagtaatcaaggaaaagcaaattaaaacaggatgataccatttcacacacatcaaattggtaataatataaatgtgtgataaaacgaactttggcaaactgaaacaactatttctgagagaaatttagcaatgcagataatatagctgaagctgctgatttaatcaccatctccatgatacactaatgacggaayagagtttttaaaaacacttcccaggtaattacattccaagaatgagaacaactgtcctagcgaaattttcatgtgcgcacaagaaaaaaac

SEQ ID NO: 723792 - DNA, 3085 bp, Homo sapiens
tttgaaacagggtctcgctctgtcacccaggctggaatgcagtggcgtgatcttggttcactgcagcctcaasctcctaggctcaagcatttttcctgcctcagcctcccaagtagctgaaactacgggtgcacgccaccacacccagctaatttttgtattttttgtagagatggggtttcaccacattgcccaggctggtctcgaactcctgagctcaagcaatctgccccgcctcctaggcctcccaaagtgctgggtctacaggtgtgagccacgaagcccagtccctatatttatttttagaattgtattttattgcaagtcatctcaaactcctaaatagaaaaggctgttttacatcatacagtttacatttttgagaacagcctccatttcagacatcaaactgttgggatgctgagcacatgtactgaataccctgtcatgatgctccttcttgctaaagttgagctctcataagctgacaagataaacagaatccactcaacctgtgtgtttaatttctaagaaagcacctgatttctgaaactatagttttgccctacatttttatctagtggtaatccaattttaggcccccagctggtttcagaagaaaagttctatcttctcttaagacaccaggatgtcatccctactgaatagcttagaagtcaactcctctaaaatacctttacctggaggcccacactggaccaaactccctcccatgtcttcacatggcacctatacacacctttatcccggtgtcatcctgtgtaaactgcctgtttacctttccctcaatagatccccatttcttgagagcagggatccatcatctctgaatcccacacactaacacagccatgccgtgtcacagatgcctgataggtgcaggctgaataaatgaatgaaaaaggcagtcatcaaagatgaatgttaagggagggagaagctacttcactcctgatatttattcccttccatctactcttggcttctctccaccctctcacctgttactctctaggttgtaagggcttcaaaggaaaaactggacatgactagtccctaccaccccaccctgtctcttcctcttcggggacaggtgctggtgggaagcacactgccacccgcaccttcatgccatcagctttacaggctagggcggaccatatgtaggaagggctgctgtggtctagtcctgccagcgacctggtagctatgacgatgtaattgggggttcagtgttaggaagtgccctgcccacagttataaactaaattctctcataataaaggtgatattttgtcttctgatttaaaaaaatattttatttatcaattggtttagaaatcagggcatgggagacgatattttaaaatgagggcccttaaatcccctccaaataaggatgagtgggcttcaagatttttaatttgaaaggcttctcctacgctataaattacagctctcccagcctaacaccatcttgttaagaaagcagaaaatggtaagcaatagtatgctgtgaaactacatattactatgaattcatcataccctagaaaagcctttagctgaacaagggctaaaatgaatgatgataaaaacctttctgtgtcatcggtagaacattttgttttgtctatatttctagaatcccatgattcaaaaagtaagtatcaaattatctgtatcaagctctgggactctttctcctgatattctctcacccccaccccaccccaaatcttaagtgctgctctaacatgcaaccatatgagttggatctgccaagactccttctgccctttgccccttagtgctgacaagatgcttgaggctgggcacaagaggatgataggtatcatcttatacatagcacttggttcaatccacggagtggagtctagaactgtggacccaaaggcatcaactcaatttaggggttgagtagcttctccaagtcctacagatatattttaccattacccaagcctggagtcttccactatgtaagagtttgggcagataataaaatactccaatgatcagaactgatctcacaacaaacatgccaggtagatattatcatctacattttatagaagaggaaattgattcaaagagaaacacagttagtaatttgaaaggtgggcatttgagcccccatcctttagacttgaacagccacacattactatttccactcttctgctgtgcctcagcagagcctcattcccgttactgaaaaactcattaggacacacgagccattgagagtggaggtgaggatctgtttccacggaattgattgcatattactatgcagcttttaaaagactgtggcaatgtcctgcacagacagagagaagacgagcagaaaatggtatgcagaggcatggacagggcacagtaggcataatctgtaagccaacatcctcaaggaacagatgtaagtagagtctggggcagttatttctctgacttgtttaaagatgttacataaatacacaacgagcagggcacttattgtgtatttatgtgacatctttgaacaagcctcaaacctctgagaagcagaggctttccttctaagctgagcttctaagatccatgggccaagcccagcttgcttctctgtcattggacactgagggttttctcctttgttgacaagtgttgaatcacctcttaccaagagaagtaggtcttccctagattgcccctgaaccttcaatcttttggctattgatacagaatctatgcacagtgctgctcatttctgcatatattatcaaaatgcataaatactggataacccaaagctcactctctgatgtgtccatgagggcctctagccatctggattccgtgcccccagaatcaaattctatgaacatggcataaacaggggctcagttttcttctttgtctctttccctcctgtattcactatcattattattccaatactgaaggtaaggaagctgagaggcctagaatcttcattcaccgcattcatccagaggactgtccaatcccgatgcttatgtctacaaaacactccccacca

SEQ ID NO: 723793 - DNA, 1231 bp, Homo sapiens
gggaaagtgctcttgttttgaaagaaatatcacacatatacactaaaaaaattatgaaagatttatgactcagtacagtaaatttataattctaattatatatataattatatacatatwtttatatatataactatatacatatatttatatatatatatacacacacatatatatacacacacacagagagagaaagaaagagagtcaggttctgtgaaaattgctggaaattagaagtagaaaagccaatattggtacctaccctcacaaatattgcaacattggggaagacagatgattaagcaaatgaataaaacaaagtttaattactgatctgaactgtatttaaagtcttacttctgtgcaacctttaaaaaagtactgaatctttctgaattttagcttacaaaatatataaaatttaaaaggagacacttcctctcacatactggtgattatgttatgaggattaagataggctatacaatcatctaagacgatgtctgttatgtgagaagtctttaataattgataactaatattatatgaaaactgtataaattattagaatggctttttttctgtgccttctgtttttctcataaagttttaagaattaatatttcttacattttgtactcaaaaacagaaaatttgcttgtaatattttatgtttcttaatttttatgtaataatatattagttatttatttcataggccagtttagatttagatcccatgaacactgctttaacatgtcttttgacaatttaggatgaattcaggaatgtatcaaagtacaatcaagaacaatgttttgctttttctttgcttttcgttactgtgacttatttccctctggctttttcagctttctctcaagttaatactttctcaactcttagatgcctgatatcttgtcttgccattaatcactgtgaacttaacagctagcacaactctcagtattatcttgagtttaattctgtgtacacagcaatgaatcaaagtcatgaaaacagaggattgtacctcttcaaatcaaagcatttaaaaacatttatatcatttaaactttcaggcttaaaaatacttttagttctgacagttttctctttgaagttaatatagtttaaacacactatctggtaaaattttacttgatgaaaaagtattaattagctataattattgaaggtgattttgccaaaaaaattaatggcttca

SEQ ID NO: 723794 - DNA, 812 bp, Homo sapiens
ctcaggtgatccacctgcctcggcctcccaaagtgctgggattacaggtgtcagccactgcacctggtcgtaagttgctttrtttacttatttaaaaaaatttatgtattcatttattttcagacaggtgtcttgctgtattgcttaggctggttttgaactcccgggcgaagacagtcttcctgcctcagcctctgtagtagctggaattacaggcatataccatcaggcttggcaacataagttgttttattgttattgtataccagaatcctaataaagaaaaaatttcttattcttcatgtgaaatttgagtgggatagtgggctaagtgagggagctttgtagagctataaggtatccagagatatgaatacatgttattctattccaaaatttttattgaggtatagtacatactcagtaaaatatacacttctttaaatacaacctaatgacatttttttccttttttttctgagatggagtcttgctttgtcacccaggctggagtgcagtggtgtgatctcggctcattgcaacctccatctcctgggttcaagcaattctcttgcctcagcctcctgagtagttgggattacaggtgcgtgccaccacgcccagctaatattttgcttttttttttttttggtagagacggggtttcactccatgtctggccaggctgttcttgaactcctgacctcaagtgatccgccttggcctcccaaagtgttgggattacaggcgtgagccactgtgcctggccaatgactctttatatttgcatatacctgtgtaacttttaccca

SEQ ID NO: 723795 - DNA, 812 bp, Homo sapiens
ctcaggtgatccacctgcctcggcctcccaaagtgctgggattacaggtgtcagccactgcacctggtcgtaagttgctttgtttacttatttaaaaaaatttatgtattcatttattttcagacaggtgtcttgctgtattgcttaggctggttttgaactcccgggcgaagacagtcttcctgcctcagcctctgtagtagctggaattacaggcatataccatcaggcttggcaacataagttgttttattgttattgtataccagaatcctaataaagaaaaaatttcttattcttcatgtgaaatttgagtgggatagtgggctaagtgagggagctttgtagagctataaggtatccagagatatgaatacatgttattctattccaaaatttttattgaggtatagtacatactcagtaaaatatacacttctttaaatacaacctaatgacatttttttccttttttttctgagatggagtcttgctttgtcacccaggctggagtgcagtggtgtgatctcggctcattgcaacctccatctcctgggttcaagcaattctcttgcctcagcctcctgagtagttgggattacaggtgcgtgccaccaygcccagctaatattttgcttttttttttttttggtagagacggggtttcactccatgtctggccaggctgttcttgaactcctgacctcaagtgatccgccttggcctcccaaagtgttgggattacaggcgtgagccactgtgcctggccaatgactctttatatttgcatatacctgtgtaacttttaccca

SEQ ID NO: 723796 - DNA, 812 bp, Homo sapiens
ctcaggtgatccacctgcctcggcctcccaaagtgctgggattacaggtgtcagccactgcacctggtcgtaagttgctttgtttacttatttaaaaaaatttatgtattcatttattttcagacaggtgtcttgctgtattgcttaggctggttttgaactcccgggcgaagacagtcttcctgcctcagcctctgtagtagctggaattacaggcatataccatcaggcttggcaacataagttgttttattgttattgtataccagaatcctaataaagaaaaaatttcttattcttcatgtgaaatttgagtgggatagtgggctaagtgagggagctttgtagagctataaggtatccagagatatgaatacatgttattctattccaaaatttttattgaggtatagtacatactcagtaaaatatacacttctttaaatacaacctaatgacatttttttccttttttttctgagatggagtcttgctttgtcacccaggctggagtgcagtggtgtgatctcggctcattgcaacctccatctcctgggttcaagcaattctcttgcctcagcctcctgagtagttgggattacaggtgcgtgccaccacgcccagctaatattttgcttttttttttttttggtagagayggggtttcactccatgtctggccaggctgttcttgaactcctgacctcaagtgatccgccttggcctcccaaagtgttgggattacaggcgtgagccactgtgcctggccaatgactctttatatttgcatatacctgtgtaacttttaccca

SEQ ID NO: 723797 - DNA, 595 bp, Homo sapiens
tatattataagaattttcgagctttttgtaaaaatacaattagtggatgaataattgtccatttgagtggatataaaatgatttgcttaacatttcctctatagttggttttttgggttgcttccattttttattagaaacaagggcatactacatctctttgtacataaatctttgtcgatttgagattatttccttctgatggagcaccataagtgtaattactgggtcaaaggctgtggtaatttacattcccatcagcagtattgtctgtttcatcacaccctagccagcatggggtattctcattaaaatttttttcttcactctgtgatgggcaaaatgtgttatctcactgttgttttaatttactttttaaaaaataattagatattggaaaatgggttcaacctatgagccataaaaaattaatcttctgttaattgagtgttcatcccttcacacttacccagcagtgatttgaatttttaaaactcaatttgtatggattcttaaacaccaaggatattaaccctctgcrtgacatcctcggaagttgttttcaatttccacacagttaaatctaaaattttta

SEQ ID NO: 723798 - DNA, 606 bp, Homo sapiens
cccattgccacctatggaatttaactccatctttcaagaccaaactgtggyaccagctcttccatgaagcctctctctcagctcagccagaagtgctctctccttctctgtaagggacgtggttttcatcaaatgccatgacactttctggcacagagttagtgctcacaaaatgaaagttgcaatgaccacgccctgcactctaaacactgactcatttcatccttactacaaccccatggttgtgtactattagcatccccattttccagatagaaaaaatcaaggtgtagaaaggctaaataccttgcccaaaagagcatcagaccagggcttgaacctgatcagctgactttggaactcgtatgtgcctctaatcatgaggaactgcaccatgtctatttattcagttttgctgtcccctgcccagcccagggcctggcttggagcaggtgctcagtaaatatttgctggcttcagcactcattcctcaagcctcctgtgcacagtcatctcactgtcctgggagtctcttaaaggcaaggcccagtggctggctcagaggggtcccaggaaacgtggccaaatggctccactcacctgcat

SEQ ID NO: 723799 - DNA, 674 bp, Homo sapiens
tgagcggagctagccacttcagcaaagaaagtgtgatgaagtccatgaacccagagaataaagccctttggsctgtcaggggcagattcttaagggcacagaaggggaaaaacaacaaaagcaagtttatattcacagggaaacataatctgtgattataaatattttatgggcaaagaaagcagcactggctgagagactggggtggagagggtggacagcaaattagattccagcctgcaaagtgatagggcagctggaaaagcagcaaagccgaggctattctgggctgtgctgcgagggcctgcgtcacaggccctggccacagtctttgttgaaaccacagccttccagcggtcagcacagaacaccttggggagagggtttaagtccatgaagaccagaggaggggacagcgaggacagaggagagtcatctgaatgactctggtgaacctcaacagcagggaggcaggtgaggggaggcagcaccctgcaagcacgtgaaaggaagacacttcctgctgactaagggcagaggaagaagtgaggctgaccccagaaagcaagccacctgagaagccagaaggcagcttgggtcaagctgccccagtgagagcaaaggtccagcccttgagcaagtggtgccaggctaagaacaattccaccctccct

SEQ ID NO: 723800 - DNA, 674 bp, Homo sapiens
tgagcggagctagccacttcagcaaagaaagtgtgatgaagtccatgaacccagagaataaagccctttggcytgtcaggggcagattcttaagggcacagaaggggaaaaacaacaaaagcaagtttatattcacagggaaacataatctgtgattataaatattttatgggcaaagaaagcagcactggctgagagactggggtggagagggtggacagcaaattagattccagcctgcaaagtgatagggcagctggaaaagcagcaaagccgaggctattctgggctgtgctgcgagggcctgcgtcacaggccctggccacagtctttgttgaaaccacagccttccagcggtcagcacagaacaccttggggagagggtttaagtccatgaagaccagaggaggggacagcgaggacagaggagagtcatctgaatgactctggtgaacctcaacagcagggaggcaggtgaggggaggcagcaccctgcaagcacgtgaaaggaagacacttcctgctgactaagggcagaggaagaagtgaggctgaccccagaaagcaagccacctgagaagccagaaggcagcttgggtcaagctgccccagtgagagcaaaggtccagcccttgagcaagtggtgccaggctaagaacaattccaccctccct

SEQ ID NO: 723801 - DNA, 582 bp, Homo sapiens
tgcagagagggggctcaaacacacaaaggcaggtctctcttggttctctgacctattaagtgacaattatggtacctgtgttaaacatcttctaagtgaaataacttgccattagtagttctgtgctactaatgcatttcctccctcagttgcataaatgccagcatttgtgattttaaataayagcacataaaagcctagaaggaatctttgaagtatttgctgactttctttgccaccacaatttagaatttcaagttcctttcctcctttatttttcccttcagagtaactgttgaccccactgtagcaccaaggaataggaatggccatgtatagcagaaaatctagaataacagggacttaagattgcaattatttttcatataaaagaagtccagagggcagacatagctggtatgacagggacccggcttctgtcttttcactccacctaggcttccatcctaaagtcacctgtgatttaggaaagttgctggggcttcaaccatcagggcgggaggaaggagcaagtaggggaggacaggtggacaacacttccagctgagtcagctcccctgg

SEQ ID NO: 723802 - DNA, 582 bp, Homo sapiens
tgcagagagggggctcaaacacacaaaggcaggtctctcttggttctctgacctattaagtgacaattatggtacctgtgttaaacatcttctaagtgaaataacttgccattagtagttctgtgctactaatgcatttcctccctcagttgcataaatgccagcatttgtgattttaaataatagcacataaaagcctagaaggaatctttgaagtatttgctgactttctttgccaccacaatttagaatttcaagttcctttcctcctttatttttcccttcagagtaactgttgaccccactgtagcaccaaggaataggaatggccatgtatagcagaaaatctagaataacagggacttaagattgcaattatttttcatataaaagaagtccagagggcagacatagctggtatgacagggacccggcttctgtcttttcactccacctaggcttccatcctaaagtcacctrtgatttaggaaagttgctggggcttcaaccatcagggcgggaggaaggagcaagtaggggaggacaggtggacaacacttccagctgagtcagctcccctgg

SEQ ID NO: 723803 - DNA, 592 bp, Homo sapiens
taaaatcttgcatttgtttaactctacagatatgttgattgaattattaaggagtgtaacatgtcaacacaactactatatctttacaccatgaaaatctctacatttggttttttatgagaaaaatcattttgtgacgtatgttttcactttgcaaaagcccagccttgaggacagtttttcttcttgaaaaatgatggattgatctacattaagaggtggaagaaaagtaagattttctttatgtagcagtcgatcacatagaatggagtgctgtctggttgggtatgtagtaagtaaatgaaatacttgcattttttatcctggtttaaaaccagtactcctaattccatttgttattacaattggtaatttagaaccaaaattgttggcactagaattctgcatccacagcttaactgctatgygattataggaaaattattgaacctctctgggcctcagtttccccatctgtagaattgctgtaagattattgaggattaagtgagataacgcattcaaagctccttgaccacaggagatgacagtgttcagctactctccactgtagttatcattgaaaatacaa

SEQ ID NO: 723804 - DNA, 605 bp, Homo sapiens
gtttcgcagaacctttgatgtaattctgaatctcccaaagcaggctaaattttaggacatcttccagacttaatggtccagtaacccttttatcaaggaggatcawgtaagaccttgaactcgtttggggaaacattagcctagcacaatgctaggcattgtacaggcttgttaaataatttgaataattctcgaaaaatctacattcagttatcagaatctgttcacctgcaaaattgtttatgaactttctcaaggcagtcaatgcaatggttaagtactggctatgtggtcttggacaagttacttgacctcagcttcctcttctgtaaaagagggatgatgggcctggcacagtggctcacgcttgtaatcccaggactttggaaggctgagatggtggcgcacacctgtaattgcagctactcaggaggctgaggcaggagaatcgcttgaacccgggaggcggaggttgccgtgagccaaaaaatcacaccactgcactctagcctgggcaacagagtgaaactctgtctcaaaaaaaaaaaaaggaaggatacagtattctcccaggaaggcagttgtgaagatcaaatgagctaata

SEQ ID NO: 723805 - DNA, 1237 bp, Homo sapiens
tcaaatatacaacattaatcttaaatgaacaatagaataatgcttaacctagcttttcaccatcaactcgaaggaagtctaaatattttaaaacattaagagaagtacctccaaaagaatgcacataattctttcctaatgtgggattagtaaaatattgtaaatctgagagcacatagtagctttggtactatctaatgagtttcaaagccrtcttccaagtttcacagtcatacttgcattatggcttaggagtgaggcattgttgcactgacctgtcctcctccaaagagcagctaaaagcatgagatgtgacatccttggtaaagttcttgccaattgctgacaactcacctggggtggcagtcacctggcttttgcccagcgggcttactttagaccattgctggcaagtaaagcattgtggagctgcctcctgaaatttcacttgcctgtcttaatgttgaaaaagtttcaagtagtttcgctttagagtcactaagaaacccagttataatctgaaagtgaaatgagatttaggtttacatgacccttagagaatgaggacaggtatactgttagatgagacgggattaagtctgtggtattgagctgttcagggtgtttgctgtattatctcaaactacctgtagtgtatttgtaggtatgggtgagagtaactgtgcttggaatagaaaagccctgctgcatcgagacacaatgctggcagctgcggcagtgtacagaggtaaggggcgaccactctttcacccgcctcaccaaggcacttgtgctgtatcatgttgattcccttcacgttgccaatgcattttccattcctgttaaggctccctcagacttcttgtccttcctctcaaaacacagatcctgtagctttttccagacagcctttactatttccttaccctcagtattaagaatttttcatgtaagatgttctcagaatcttacaagtatccttgtacccatttctttttgaagaacatgacctttattgagcagaaattttttcctacttgcattttttcagactttaaccattattgtctttttagaaatgtacagaaatgaagatggttcagtacctgctacataccagatctattacatgataggatggaaatatcatgagtcacaggtaacgttactaagatggatcacttttcttagtgggttcgtgttcagattattgtttactaacttgggggaaggggta

SEQ ID NO: 723806 - DNA, 1958 bp, Homo sapiens
ggaacttacaggtccagcagaattcacttcaaaccctgagtcatatatttcataygttattgctagctccctcgctcctgagtaatgtgggcaagttactcggcctttttcctccttggtgtcttcaactgaacaagggcttgaagggaggaaagcaggacagcctagggtgggagagacagggtcataaggctggaagacataatagaacagggtcagttttagcctcaatggagtggtggaggggagtgttccaagtctgcagctgaggcagccttggcacagcctggcaggtgagtggcaggatgcaggcaaagcaatccagattcttcttctgtgatggaattttcaggcctgcattacctagtgcacctcactcccatgtgtatctgtactcatacatccactattgagggcaggggagagagttctaaagggcactgaaaagccaattaagtgctgggttctgctgggattcatcatacaatgaacaggacacggtgtcagacacagtgttagatttcatatctcagaatcacatggaccagggtttgaattactcaagcacccttagtttcaacaaaggtagtaattagatttttaaagggttaaggcataggccttgctcagtttttgttaggattaaaggggaaaattgcataatgcactcaggatggctgacaaacacaaaatgcacataggactcccaattctccacaactgtatggagccgccttctctcctccaaaccacctgtccacttcactcccagtctttctcttagcagatgacctgacttagacctttgcaaagaagaaaggccactagatgagcatttgcttcccctcaaagcctctaattagatcagttcttgtaacttactcttcccccttcacagccccaaaaatggtactgagagcaaatccaactgaaagtgctttccaaagtgtgttccataggaaggaaggtgtaggaaaggccacatattacactagcagcttcagaggccattggcacattaaaggttttgagagattgcacagttaaatattgccctgaagcatataattaaagaatgactgaaaagcaaacttactcttttctgtgaatgtgaaaaacatggacttacagaattacaaagtagagctcagaggagaatgtcacccacattactagcactagagaagctgcttctctgcatcagcctcaaagcatgtgggactcaaaaagtgtgggctgggacacacagtttaaatgacactacgataggccacaagagttgattggaaatagtgaataggtaaatctcatatacctgtaaatgcctaagctctgcaccaagcttgtccaaccacccatggctcatgggccgtatgcgacccaggacagttttgaatgcagcccaacacaaatttgtaaactttcttaaaatgttatgagtttttttttttttttgctttttgttgttgttagctcatcagctatcattagtatcagtgtattttatgtgtggcccaaagcaattcttccaaagtggcccagggaagccaaaagactggacattcctgatctacactatctcgttttgttcattagtttcacagacattaggttaactctccaattagactttaggcagcctgtccctcaactatttataataattcaaagtatacgtactcattgaaaccaccgcctgccagaaagggaactataacgttttcaggcaggcctaagatgagaaagaagctgttaagccaaaatagctgatatcagttaagggggtggggagcagaaaaaacaggagtgacatttacaccgactctgtgcaggtattgtctaaaggggctttcacagccacgacctcgctgaatcaccacaaccatcctctgagaggggtgtatctccattttatagatgagaaaacacacacacacgctatggatcatttttaaaaa

SEQ ID NO: 723807 - DNA, 1958 bp, Homo sapiens
ggaacttacaggtccagcagaattcacttcaaaccctgagtcatatatttcatacgttattgctagctccctcgctcctgagtaatgtgggcaagttactcggcctttttcctccttggtgtcttcaactgaacaagggcttgaagggaggaaagcaggacagcctagggtgggagagacagggtcataaggctggaagacataatagaacagggtcagttttagcctcartggagtggtggaggggagtgttccaagtctgcagctgaggcagccttggcacagcctggcaggtgagtggcaggatgcaggcaaagcaatccagattcttcttctgtgatggaattttcaggcctgcattacctagtgcacctcactcccatgtgtatctgtactcatacatccactattgagggcaggggagagagttctaaagggcactgaaaagccaattaagtgctgggttctgctgggattcatcatacaatgaacaggacacggtgtcagacacagtgttagatttcatatctcagaatcacatggaccagggtttgaattactcaagcacccttagtttcaacaaaggtagtaattagatttttaaagggttaaggcataggccttgctcagtttttgttaggattaaaggggaaaattgcataatgcactcaggatggctgacaaacacaaaatgcacataggactcccaattctccacaactgtatggagccgccttctctcctccaaaccacctgtccacttcactcccagtctttctcttagcagatgacctgacttagacctttgcaaagaagaaaggccactagatgagcatttgcttcccctcaaagcctctaattagatcagttcttgtaacttactcttcccccttcacagccccaaaaatggtactgagagcaaatccaactgaaagtgctttccaaagtgtgttccataggaaggaaggtgtaggaaaggccacatattacactagcagcttcagaggccattggcacattaaaggttttgagagattgcacagttaaatattgccctgaagcatataattaaagaatgactgaaaagcaaacttactcttttctgtgaatgtgaaaaacatggacttacagaattacaaagtagagctcagaggagaatgtcacccacattactagcactagagaagctgcttctctgcatcagcctcaaagcatgtgggactcaaaaagtgtgggctgggacacacagtttaaatgacactacgataggccacaagagttgattggaaatagtgaataggtaaatctcatatacctgtaaatgcctaagctctgcaccaagcttgtccaaccacccatggctcatgggccgtatgcgacccaggacagttttgaatgcagcccaacacaaatttgtaaactttcttaaaatgttatgagtttttttttttttttgctttttgttgttgttagctcatcagctatcattagtatcagtgtattttatgtgtggcccaaagcaattcttccaaagtggcccagggaagccaaaagactggacattcctgatctacactatctcgttttgttcattagtttcacagacattaggttaactctccaattagactttaggcagcctgtccctcaactatttataataattcaaagtatacgtactcattgaaaccaccgcctgccagaaagggaactataacgttttcaggcaggcctaagatgagaaagaagctgttaagccaaaatagctgatatcagttaagggggtggggagcagaaaaaacaggagtgacatttacaccgactctgtgcaggtattgtctaaaggggctttcacagccacgacctcgctgaatcaccacaaccatcctctgagaggggtgtatctccattttatagatgagaaaacacacacacacgctatggatcatttttaaaaa
